United States Patent Application Publication US 2007/0214517 A1 - sequence listing, part 38

SEQ ID NO: 44318 - DNA, 1220 bp, Arabidopsis thaliana; identical to SEQ ID NO: 22709
  misc_feature (1)..(1220): Ceres Seq. ID no. 12489325
  misc_feature: MA Experiment ID: 20000185 Result: Down-regulated in Transcription
  misc_feature: MA Experiment 20000185 PARAMETER Experiment Name: At_Roots__P Parameter: Age (day) Value: 7 vs. 21
  misc_feature: MA Experiment 20000185 PARAMETER Experiment Name: At_Roots__P Parameter: Organism Value: A. thaliana
  misc_feature: MA Experiment 20000185 PARAMETER Experiment Name: At_Roots__P Parameter: Tissue Value: Roots vs. Whole Plant
  misc_feature: MA Experiment ID: 20000234 Result: Down-regulated in Transcription
  misc_feature: MA Experiment 20000234 PARAMETER Experiment Name: At_Siliques_P Parameter: Age (day) Value: 21
  misc_feature: MA Experiment 20000234 PARAMETER Experiment Name: At_Siliques_P Parameter: Organism Value: A. thaliana
  misc_feature: MA Experiment 20000234 PARAMETER Experiment Name: At_Siliques_P Parameter: Plant Line Value: WS
  misc_feature: MA Experiment 20000234 PARAMETER Experiment Name: At_Siliques_P Parameter: Tissue Value: Less Than 5mm Siliques vs. Whole Plant
  misc_feature: MA Experiment ID: 20000264 Result: Down-regulated in Transcription
  misc_feature: MA Experiment 20000264 PARAMETER Experiment Name: At_Open_Flower_P Parameter: Age (day) Value: 21
  misc_feature: MA Experiment 20000264 PARAMETER Experiment Name: At_Open_Flower_P Parameter: Plant Line Value: WS
  misc_feature: MA Experiment 20000264 PARAMETER Experiment Name: At_Open_Flower_P Parameter: Tissue Value: Open Flower vs. Whole Plant
  misc_feature: MA Experiment ID: 20000269 Result: Down-regulated in Transcription
  misc_feature: MA Experiment 20000269 PARAMETER Experiment Name: At_1mM_KNO3_L-vs-H_Roots_P Parameter: Age (day) Value: 7,10,12
  misc_feature: MA Experiment 20000269 PARAMETER Experiment Name: At_1mM_KNO3_L-vs-H_Roots_P Parameter: Organism Value: A. thaliana
  misc_feature: MA Experiment 20000269 PARAMETER Experiment Name: At_1mM_KNO3_L-vs-H_Roots_P Parameter: Plant Line Value: WS
  misc_feature: MA Experiment 20000269 PARAMETER Experiment Name: At_1mM_KNO3_L-vs-H_Roots_P Parameter: Timepoint (day) Value: 7,10,12
  misc_feature: MA Experiment 20000269 PARAMETER Experiment Name: At_1mM_KNO3_L-vs-H_Roots_P Parameter: Tissue Value: Roots
  misc_feature: MA Experiment 20000269 PARAMETER Experiment Name: At_1mM_KNO3_L-vs-H_Roots_P Parameter: Treatment Value: 1mM KNO3 vs. 50mM KNO3
  misc_feature: MA Experiment ID: 20000286 Result: Down-regulated in Transcription
  misc_feature: MA Experiment 20000286 PARAMETER Experiment Name: At_Open_Flower_P Parameter: Age (day) Value: 21
  misc_feature: MA Experiment 20000286 PARAMETER Experiment Name: At_Open_Flower_P Parameter: Plant Line Value: WS
  misc_feature: MA Experiment 20000286 PARAMETER Experiment Name: At_Open_Flower_P Parameter: Tissue Value: Half Open vs. Whole Plant
  misc_feature: MA Experiment ID: 20000439 Result: Down-regulated in Transcription
  misc_feature: MA Experiment 20000439 PARAMETER Experiment Name: At_Roots__P Parameter: Age (day) Value: 14 vs. 21
  misc_feature: MA Experiment 20000439 PARAMETER Experiment Name: At_Roots__P Parameter: Organism Value: A. thaliana
  misc_feature: MA Experiment 20000439 PARAMETER Experiment Name: At_Roots__P Parameter: Tissue Value: Roots vs. Whole Plant
  misc_feature: MA Experiment ID: 20000451 Result: Down-regulated in Transcription
  misc_feature: MA Experiment 20000451 PARAMETER Experiment Name: At_CS6879_Shoots-Roots_P Parameter: Age (day) Value: 14
  misc_feature: MA Experiment 20000451 PARAMETER Experiment Name: At_CS6879_Shoots-Roots_P Parameter: Organism Value: A. thaliana
  misc_feature: MA Experiment 20000451 PARAMETER Experiment Name: At_CS6879_Shoots-Roots_P Parameter: Plant Line Value: CS6879 vs. WS
  misc_feature: MA Experiment 20000451 PARAMETER Experiment Name: At_CS6879_Shoots-Roots_P Parameter: Tissue Value: Roots
  misc_feature: MA Experiment ID: 20000573 Result: Up-regulated in Transcription
  misc_feature: MA Experiment 20000573 PARAMETER Experiment Name: At_100uM_ABA_Mutants__P Parameter: Organism Value: A. thaliana
  misc_feature: MA Experiment 20000573 PARAMETER Experiment Name: At_100uM_ABA_Mutants__P Parameter: Plant Line Value: CS22 vs. Ler wt
  misc_feature: MA Experiment 20000573 PARAMETER Experiment Name: At_100uM_ABA_Mutants__P Parameter: Timepoint (hr) Value: N/A
  misc_feature: MA Experiment 20000573 PARAMETER Experiment Name: At_100uM_ABA_Mutants__P Parameter: Tissue Value: Whole Plant
  misc_feature: MA Experiment 20000573 PARAMETER Experiment Name: At_100uM_ABA_Mutants__P Parameter: Treatment Value: None
  misc_feature: MA Experiment ID: 20000794 Result: Down-regulated in Transcription
  misc_feature: MA Experiment 20000794 PARAMETER Experiment Name: At_Petals_P Parameter: Age (day) Value: 23-25 days
  misc_feature: MA Experiment 20000794 PARAMETER Experiment Name: At_Petals_P Parameter: Plant Line Value: WS
  misc_feature: MA Experiment 20000794 PARAMETER Experiment Name: At_Petals_P Parameter: Tissue Value: Petals vs. Whole plant
  misc_feature: MA Experiment ID: 20001248 Result: Up-regulated in Transcription
  misc_feature: MA Experiment 20001248 PARAMETER Experiment Name: At_Far-red-induction_P Parameter: Age (day) Value: 7
  misc_feature: MA Experiment 20001248 PARAMETER Experiment Name: At_Far-red-induction_P Parameter: Light Value: Far-red vs. White
  misc_feature: MA Experiment 20001248 PARAMETER Experiment Name: At_Far-red-induction_P Parameter: Organism Value: A. thaliana
  misc_feature: MA Experiment 20001248 PARAMETER Experiment Name: At_Far-red-induction_P Parameter: Plant Line Value: Columbia
  misc_feature: MA Experiment 20001248 PARAMETER Experiment Name: At_Far-red-induction_P Parameter: Timepoint (hr) Value: 4
  misc_feature: MA Experiment 20001248 PARAMETER Experiment Name: At_Far-red-induction_P Parameter: Tissue Value: Whole Plant
  misc_feature: MA Experiment ID: 20001450 Result: Up-regulated in Transcription
  misc_feature: MA Experiment 20001450 PARAMETER Experiment Name: At_Far-red-induction_P Parameter: Age (day) Value: 7
  misc_feature: MA Experiment 20001450 PARAMETER Experiment Name: At_Far-red-induction_P Parameter: Light Value: Far-red vs. White
  misc_feature: MA Experiment 20001450 PARAMETER Experiment Name: At_Far-red-induction_P Parameter: Organism Value: A. thaliana
  misc_feature: MA Experiment 20001450 PARAMETER Experiment Name: At_Far-red-induction_P Parameter: Plant Line Value: Columbia
  misc_feature: MA Experiment 20001450 PARAMETER Experiment Name: At_Far-red-induction_P Parameter: Timepoint (hr) Value: 8
  misc_feature: MA Experiment 20001450 PARAMETER Experiment Name: At_Far-red-induction_P Parameter: Tissue Value: Whole Plant
  misc_feature: MA Experiment ID: 20001451 Result: Up-regulated in Transcription
  misc_feature: MA Experiment 20001451 PARAMETER Experiment Name: At_Far-red-induction_P Parameter: Age (day) Value: 7
  misc_feature: MA Experiment 20001451 PARAMETER Experiment Name: At_Far-red-induction_P Parameter: Light Value: Far-red vs. White
  misc_feature: MA Experiment 20001451 PARAMETER Experiment Name: At_Far-red-induction_P Parameter: Organism Value: A. thaliana
  misc_feature: MA Experiment 20001451 PARAMETER Experiment Name: At_Far-red-induction_P Parameter: Plant Line Value: Columbia
  misc_feature: MA Experiment 20001451 PARAMETER Experiment Name: At_Far-red-induction_P Parameter: Timepoint (hr) Value: 24
  misc_feature: MA Experiment 20001451 PARAMETER Experiment Name: At_Far-red-induction_P Parameter: Tissue Value: Whole Plant
  misc_feature: MA Experiment ID: 20001459 Result: Down-regulated in Transcription
  misc_feature: MA Experiment 20001459 PARAMETER Experiment Name: At_50mM_NH4NO3_L-to-H_P Parameter: Age (day) Value: Undefined
  misc_feature: MA Experiment 20001459 PARAMETER Experiment Name: At_50mM_NH4NO3_L-to-H_P Parameter: Organism Value: Undefined
  misc_feature: MA Experiment 20001459 PARAMETER Experiment Name: At_50mM_NH4NO3_L-to-H_P Parameter: Plant Line Value: Undefined
  misc_feature: MA Experiment 20001459 PARAMETER Experiment Name: At_50mM_NH4NO3_L-to-H_P Parameter: Timepoint (hr) Value: 4
  misc_feature: MA Experiment 20001459 PARAMETER Experiment Name: At_50mM_NH4NO3_L-to-H_P Parameter: Tissue Value: Siliques
  misc_feature: MA Experiment 20001459 PARAMETER Experiment Name: At_50mM_NH4NO3_L-to-H_P Parameter: Treatment Value: 50mM NH4NO3 vs. 100mM Manitol
  misc_feature: MA Experiment ID: 20001557 Result: Down-regulated in Transcription
  misc_feature: MA Experiment 20001557 PARAMETER Experiment Name: At_Drought_Soil_Dry_P Parameter: Age (day) Value: 27
  misc_feature: MA Experiment 20001557 PARAMETER Experiment Name: At_Drought_Soil_Dry_P Parameter: Organism Value: A. thaliana
  misc_feature: MA Experiment 20001557 PARAMETER Experiment Name: At_Drought_Soil_Dry_P Parameter: Plant Line Value: WS
  misc_feature: MA Experiment 20001557 PARAMETER Experiment Name: At_Drought_Soil_Dry_P Parameter: Post Timepoint (hr) Value: 3
  misc_feature: MA Experiment 20001557 PARAMETER Experiment Name: At_Drought_Soil_Dry_P Parameter: Post-Treatment Value: Re-Water vs. No Drought
  misc_feature: MA Experiment 20001557 PARAMETER Experiment Name: At_Drought_Soil_Dry_P Parameter: Timepoint (day) Value: 13
  misc_feature: MA Experiment 20001557 PARAMETER Experiment Name: At_Drought_Soil_Dry_P Parameter: Treatment Value: Drought vs. No Drought
  misc_feature: MA Experiment ID: 20001558 Result: Down-regulated in Transcription
  misc_feature: MA Experiment 20001558 PARAMETER Experiment Name: At_Drought_Soil_Dry_P Parameter: Age (day) Value: 27
  misc_feature: MA Experiment 20001558 PARAMETER Experiment Name: At_Drought_Soil_Dry_P Parameter: Organism Value: A. thaliana
  misc_feature: MA Experiment 20001558 PARAMETER Experiment Name: At_Drought_Soil_Dry_P Parameter: Plant Line Value: WS
  misc_feature: MA Experiment 20001558 PARAMETER Experiment Name: At_Drought_Soil_Dry_P Parameter: Post Timepoint (hr) Value: 6
  misc_feature: MA Experiment 20001558 PARAMETER Experiment Name: At_Drought_Soil_Dry_P Parameter: Post-Treatment Value: Re-Water vs. No Drought
  misc_feature: MA Experiment 20001558 PARAMETER Experiment Name: At_Drought_Soil_Dry_P Parameter: Timepoint (day) Value: 13
  misc_feature: MA Experiment 20001558 PARAMETER Experiment Name: At_Drought_Soil_Dry_P Parameter: Treatment Value: Drought vs. No Drought
  misc_feature: MA Experiment ID: 20001757 Result: Up-regulated in Transcription
  misc_feature: MA Experiment 20001757 PARAMETER Experiment Name: At_50mM_NH4NO3_L-to-H_P Parameter: Timepoint (hr) Value: 6
  misc_feature: MA Experiment 20001757 PARAMETER Experiment Name: At_50mM_NH4NO3_L-to-H_P Parameter: Tissue Value: Leaf
  misc_feature: MA Experiment 20001757 PARAMETER Experiment Name: At_50mM_NH4NO3_L-to-H_P Parameter: Treatment Value: 50mM NH4NO3 vs 100mM Mannitol
  misc_feature: MA Experiment ID: 20001905 Result: Down-regulated in Transcription
  misc_feature: MA Experiment 20001905 PARAMETER Experiment Name: At_Drought_Reproduction_P Parameter: Age (day) Value: 40
  misc_feature: MA Experiment 20001905 PARAMETER Experiment Name: At_Drought_Reproduction_P Parameter: Organism Value: A. thaliana
  misc_feature: MA Experiment 20001905 PARAMETER Experiment Name: At_Drought_Reproduction_P Parameter: Plant Line Value: WS
  misc_feature: MA Experiment 20001905 PARAMETER Experiment Name: At_Drought_Reproduction_P Parameter: Timepoint (day) Value: 10
  misc_feature: MA Experiment 20001905 PARAMETER Experiment Name: At_Drought_Reproduction_P Parameter: Tissue Value: Rosettes
  misc_feature: MA Experiment 20001905 PARAMETER Experiment Name: At_Drought_Reproduction_P Parameter: Treatment Value: Drought vs. No Drought
  misc_feature: MA Experiment ID: 20001906 Result: Down-regulated in Transcription
  misc_feature: MA Experiment 20001906 PARAMETER Experiment Name: At_Drought_Reproduction_P Parameter: Age (day) Value: 35
  misc_feature: MA Experiment 20001906 PARAMETER Experiment Name: At_Drought_Reproduction_P Parameter: Organism Value: A. thaliana
  misc_feature: MA Experiment 20001906 PARAMETER Experiment Name: At_Drought_Reproduction_P Parameter: Plant Line Value: WS
  misc_feature: MA Experiment 20001906 PARAMETER Experiment Name: At_Drought_Reproduction_P Parameter: Timepoint (day) Value: 5
  misc_feature: MA Experiment 20001906 PARAMETER Experiment Name: At_Drought_Reproduction_P Parameter: Tissue Value: Siliques
  misc_feature: MA Experiment 20001906 PARAMETER Experiment Name: At_Drought_Reproduction_P Parameter: Treatment Value: Drought vs. No Drought
  misc_feature: MA Experiment ID: 20001908 Result: Down-regulated in Transcription
  misc_feature: MA Experiment 20001908 PARAMETER Experiment Name: At_Drought_Reproduction_P Parameter: Age (day) Value: 40
  misc_feature: MA Experiment 20001908 PARAMETER Experiment Name: At_Drought_Reproduction_P Parameter: Organism Value: A. thaliana
  misc_feature: MA Experiment 20001908 PARAMETER Experiment Name: At_Drought_Reproduction_P Parameter: Plant Line Value: WS
  misc_feature: MA Experiment 20001908 PARAMETER Experiment Name: At_Drought_Reproduction_P Parameter: Timepoint (day) Value: 10
  misc_feature: MA Experiment 20001908 PARAMETER Experiment Name: At_Drought_Reproduction_P Parameter: Tissue Value: Siliques
  misc_feature: MA Experiment 20001908 PARAMETER Experiment Name: At_Drought_Reproduction_P Parameter: Treatment Value: Drought vs. No Drought

SEQ ID NO: 44319 - protein, 331 aa, Arabidopsis thaliana; identical to SEQ ID NO: 22710
  peptide (1)..(331): Ceres Seq. ID no. 12489326
  misc_feature (106)..(208): Pfam Name: Sigma 54 modulation protein / S30EA ribosomal protein Pfam Description: Sigma 54 modulation protein / S30EA ribosomal
  misc_feature (106)..(208): Pfam Name: Sigma 54 modulation protein / S30EA ribosomal protein Pfam Description: Sigma 54 modulation protein / S30EA ribosomal
  misc_feature (105)..(308): Homolog of NCBI NO: 1346469 NR Description: LIGHT REPRESSED PROTEIN A
  misc_feature (105)..(308): Homolog of NCBI NO: 33239849 NR Description: Ribosome-associated protein Y
  misc_feature (105)..(307): Homolog of NCBI NO: 16331216 NR Description: light repressed protein [Synechocystis sp. PCC
  misc_feature (105)..(308): Homolog of NCBI NO: 33860957 NR Description: light repressed protein A homolog
  misc_feature (105)..(310): Homolog of NCBI NO: 17230676 NR Description: light-repressed protein [Nostoc sp. PCC 7120]
  misc_feature (105)..(308): Homolog of NCBI NO: 1346469 NR Description: LIGHT REPRESSED PROTEIN A
  misc_feature (105)..(307): Homolog of NCBI NO: 16331216 NR Description: light repressed protein [Synechocystis sp. PCC
  misc_feature (105)..(310): Homolog of NCBI NO: 17230676 NR Description: light-repressed protein [Nostoc sp. PCC 7120]
  misc_feature (24)..(331): Homolog of NCBI NO: 18420800 NR Description: putative protein
  misc_feature (62)..(331): Homolog of NCBI NO: 134034 NR Description: Plastid-specific 30S ribosomal protein 1,
  misc_feature (62)..(331): Homolog of NCBI NO: 170131 NR Description: ribosomal protein 30S subunit
  misc_feature (64)..(330): Homolog of NCBI NO: 30102988 NR Description: putative ribosomal protein
  misc_feature (62)..(228): Homolog of NCBI NO: 227070 NR Description: ribosomal protein CS-S5
  misc_feature (105)..(308): Homolog of NCBI NO: 33860957 NR Description: light repressed protein A homolog
  misc_feature (105)..(308): Homolog of NCBI NO: 33239849 NR Description: Ribosome-associated protein Y
  misc_feature (62)..(228): Homolog of NCBI NO: 227070 NR Description: ribosomal protein CS-S5
  misc_feature (64)..(330): Homolog of NCBI NO: 30102988 NR Description: putative ribosomal protein
  misc_feature (62)..(331): Homolog of NCBI NO: 170131 NR Description: ribosomal protein 30S subunit
  misc_feature (62)..(331): Homolog of NCBI NO: 134034 NR Description: Plastid-specific 30S ribosomal protein 1,
  misc_feature (24)..(331): Homolog of NCBI NO: 18420800 NR Description: putative protein

SEQ ID NO: 44320 - protein, 308 aa, Arabidopsis thaliana; identical to SEQ ID NO: 22711
  peptide (1)..(308): Ceres Seq. ID no. 12489327
  misc_feature (83)..(185): Pfam Name: Sigma 54 modulation protein / S30EA ribosomal protein Pfam Description: Sigma 54 modulation protein / S30EA ribosomal
  misc_feature (83)..(185): Pfam Name: Sigma 54 modulation protein / S30EA ribosomal protein Pfam Description: Sigma 54 modulation protein / S30EA ribosomal
  misc_feature (82)..(285): Homolog of NCBI NO: 1346469 NR Description: LIGHT REPRESSED PROTEIN A
  misc_feature (82)..(285): Homolog of NCBI NO: 33239849 NR Description: Ribosome-associated protein Y
  misc_feature (82)..(284): Homolog of NCBI NO: 16331216 NR Description: light repressed protein [Synechocystis sp. PCC
  misc_feature (82)..(285): Homolog of NCBI NO: 33860957 NR Description: light repressed protein A homolog
  misc_feature (82)..(287): Homolog of NCBI NO: 17230676 NR Description: light-repressed protein [Nostoc sp. PCC 7120]
  misc_feature (82)..(285): Homolog of NCBI NO: 1346469 NR Description: LIGHT REPRESSED PROTEIN A
  misc_feature (82)..(284): Homolog of NCBI NO: 16331216 NR Description: light repressed protein [Synechocystis sp. PCC
  misc_feature (82)..(287): Homolog of NCBI NO: 17230676 NR Description: light-repressed protein [Nostoc sp. PCC 7120]
  misc_feature (1)..(308): Homolog of NCBI NO: 18420800 NR Description: putative protein
  misc_feature (39)..(308): Homolog of NCBI NO: 134034 NR Description: Plastid-specific 30S ribosomal protein 1,
  misc_feature (39)..(308): Homolog of NCBI NO: 170131 NR Description: ribosomal protein 30S subunit
  misc_feature (41)..(307): Homolog of NCBI NO: 30102988 NR Description: putative ribosomal protein
  misc_feature (39)..(205): Homolog of NCBI NO: 227070 NR Description: ribosomal protein CS-S5
  misc_feature (82)..(285): Homolog of NCBI NO: 33860957 NR Description: light repressed protein A homolog
  misc_feature (82)..(285): Homolog of NCBI NO: 33239849 NR Description: Ribosome-associated protein Y
  misc_feature (39)..(205): Homolog of NCBI NO: 227070 NR Description: ribosomal protein CS-S5
  misc_feature (41)..(307): Homolog of NCBI NO: 30102988 NR Description: putative ribosomal protein
  misc_feature (39)..(308): Homolog of NCBI NO: 170131 NR Description: ribosomal protein 30S subunit
  misc_feature (39)..(308): Homolog of NCBI NO: 134034 NR Description: Plastid-specific 30S ribosomal protein 1,
  misc_feature (1)..(308): Homolog of NCBI NO: 18420800 NR Description: putative protein

SEQ ID NO: 44321 - protein, 276 aa, Arabidopsis thaliana; identical to SEQ ID NO: 22712
  peptide (1)..(276): Ceres Seq. ID no. 12489328
  misc_feature (51)..(153): Pfam Name: Sigma 54 modulation protein / S30EA ribosomal protein Pfam Description: Sigma 54 modulation protein / S30EA ribosomal
  misc_feature (51)..(153): Pfam Name: Sigma 54 modulation protein / S30EA ribosomal protein Pfam Description: Sigma 54 modulation protein / S30EA ribosomal
  misc_feature (50)..(253): Homolog of NCBI NO: 1346469 NR Description: LIGHT REPRESSED PROTEIN A
  misc_feature (50)..(253): Homolog of NCBI NO: 33239849 NR Description: Ribosome-associated protein Y
  misc_feature (50)..(252): Homolog of NCBI NO: 16331216 NR Description: light repressed protein [Synechocystis sp. PCC
  misc_feature (50)..(253): Homolog of NCBI NO: 33860957 NR Description: light repressed protein A homolog
  misc_feature (50)..(255): Homolog of NCBI NO: 17230676 NR Description: light-repressed protein [Nostoc sp. PCC 7120]
  misc_feature (50)..(253): Homolog of NCBI NO: 1346469 NR Description: LIGHT REPRESSED PROTEIN A
  misc_feature (50)..(252): Homolog of NCBI NO: 16331216 NR Description: light repressed protein [Synechocystis sp. PCC
  misc_feature (50)..(255): Homolog of NCBI NO: 17230676 NR Description: light-repressed protein [Nostoc sp. PCC 7120]
  misc_feature (1)..(276): Homolog of NCBI NO: 18420800 NR Description: putative protein
  misc_feature (7)..(276): Homolog of NCBI NO: 134034 NR Description: Plastid-specific 30S ribosomal protein 1,
  misc_feature (7)..(276): Homolog of NCBI NO: 170131 NR Description: ribosomal protein 30S subunit
  misc_feature (9)..(275): Homolog of NCBI NO: 30102988 NR Description: putative ribosomal protein
  misc_feature (7)..(173): Homolog of NCBI NO: 227070 NR Description: ribosomal protein CS-S5
  misc_feature (50)..(253): Homolog of NCBI NO: 33860957 NR Description: light repressed protein A homolog
  misc_feature (50)..(253): Homolog of NCBI NO: 33239849 NR Description: Ribosome-associated protein Y
  misc_feature (7)..(173): Homolog of NCBI NO: 227070 NR Description: ribosomal protein CS-S5
  misc_feature (9)..(275): Homolog of NCBI NO: 30102988 NR Description: putative ribosomal protein
  misc_feature (7)..(276): Homolog of NCBI NO: 170131 NR Description: ribosomal protein 30S subunit
  misc_feature (7)..(276): Homolog of NCBI NO: 134034 NR Description: Plastid-specific 30S ribosomal protein 1,
  misc_feature (1)..(276): Homolog of NCBI NO: 18420800 NR Description: putative protein

SEQ ID NO: 44322 - DNA, 1343 bp, Arabidopsis thaliana
  misc_feature (1)..(1343): Ceres Seq. ID no. 13509451
  misc_feature: MA Experiment ID: 20000496 Result: Up-regulated in Transcription
  misc_feature: MA Experiment 20000496 PARAMETER Experiment Name: At_Guard_Cells_P Parameter: Harvest Date Value: 7/19/2002
  misc_feature: MA Experiment 20000496 PARAMETER Experiment Name: At_Guard_Cells_P Parameter: Organism Value: Canola
  misc_feature: MA Experiment 20000496 PARAMETER Experiment Name: At_Guard_Cells_P Parameter: Tissue Value: Guard Cells vs. Leaves
aagtgtctaatcgcgcgatgaacttgataacggcgatgaccggagctaaattgcggccatacaatgctacgatccacttgctgcactccactttgccctttcacggcgaaacaaccttctttccttaggaaacagcaacgtattacctctgatcgcttcacctttcgcggtggtggtggtggcgatgccgccgccgtcgtctcctcctccggcctccgtgatctcgttttcgtcgtaaaccctcaaggtgctaatggtagaacagctaaagaatggaagaagttgcttcctcaccttcgatctcgtcttggtaaagactgtaatgtaagtgaattattaacatcgggtccttctcatgccattgacattacaagagaggctataagggatggtgcagatgctgtcattgcggttggaggtgatggaacacttcatgaggttgttaatggtttcttttgggaggggaaacctgtcggttatctcagtggggaagctagtcgatcgactgcacttggtctgattcccttaggtactggctcagattttgctagaacatttggttggaacaatgatccttgtgaagcagtggagcgcattgctagagggatgcgatcacggattgatgttggtgttatcgacaaggaaggaaaggatttgcattacttcatcaatgtagctgatgttcatttgagcgcaaaggcaggattttacgcttcaaaatacaagaaatttggaaacttgtgctacgtaattggtgccctacaagcgttcatgggccatcataaccaagatatgagaatcagagtcaatggaggcgaatgggaaatatatccccaggtcactgctctctgcgttggaaacgcaaaatactttggtggtggaatgaaaatcacacccaacgccatccctggaaatggaaatcttgaggttgtggttcttcaaaacttcaaatggtatgatttcgtacttaaacttcataagctgtacaacgggactcatctttcggttaacaatgtgacttcaagaagtgtacaaagcatcgaagttgaagagattacagacagtggaagtatctatgtgcagtcagatggagaacatcttggattcctacctagaaagtttcaggtgttacccggtgccatagacataatcagctgatcaaaaccgcagatttcttaggataaacttgtcaagtaaagtgtagaatacttcaactttatattcttcctgtaatatgattcattgtttagcgaatcagatttatgctcgtgttacttgtgtaactcgttactatcactatttattgtgtggtctctgttaaccacaaatagatactttaaaac

SEQ ID NO: 44323 - protein, 364 aa, Arabidopsis thaliana
  peptide (1)..(364): Ceres Seq. ID no. 13509452
  misc_feature (53)..(194): Pfam Name: Diacylglycerol kinase catalytic domain (presumed) Pfam Description: Diacylglycerol kinase catalytic domain
  misc_feature (57)..(356): Homolog of NCBI NO: 29349730 NR Description: conserved hypothetical protein, with a
  misc_feature (57)..(353): Homolog of NCBI NO: 23098222 NR Description: hypothetical protein [Oceanobacillus iheyensis
  misc_feature (150)..(364): Homolog of NCBI NO: 23125055 NR Description: hypothetical protein [Nostoc punctiforme]
  misc_feature (150)..(363): Homolog of NCBI NO: 17230373 NR Description: hypothetical protein [Nostoc sp. PCC 7120]
  misc_feature (57)..(363): Homolog of NCBI NO: 15614516 NR Description: BH1953~unknown conserved protein [Bacillus
  misc_feature (54)..(363): Homolog of NCBI NO: 15643126 NR Description: conserved hypothetical protein [Thermotoga
  misc_feature (53)..(363): Homolog of NCBI NO: 33413155 NR Description: hypothetical protein [Thermotoga sp. RQ2]
  misc_feature (57)..(362): Homolog of NCBI NO: 13472344 NR Description: hypothetical protein [Mesorhizobium loti]
  misc_feature (1)..(211): Homolog of NCBI NO: 14423554 NR Description: Unknown protein [Arabidopsis thaliana]
  misc_feature (1)..(364): Homolog of NCBI NO: 18406971 NR Description: expressed protein [Arabidopsis thaliana]
MLRSTCCTPLCPFTAKQPSFLRKQQRITSDRFTFRGGGGGDAAAVVSSSGLRDLVFVVNPQGANGRTAKEWKKLLPHLRSRLGKDCNVSELLTSGPSHAIDITREAIRDGADAVIAVGGDGTLHEVVNGFFWEGKPVGYLSGEASRSTALGLIPLGTGSDFARTFGWNNDPCEAVERIARGMRSRIDVGVIDKEGKDLHYFINVADVHLSAKAGFYASKYKKFGNLCYVIGALQAFMGHHNQDMRIRVNGGEWEIYPQVTALCVGNAKYFGGGMKITPNAIPGNGNLEVVVLQNFKWYDFVLKLHKLYNGTHLSVNNVTSRSVQSIEVEEITDSGSIYVQSDGEHLGFLPRKFQVLPGAIDIIS

SEQ ID NO: 44324 - protein, 183 aa, Arabidopsis thaliana
  peptide (1)..(183): Ceres Seq. ID no. 13509453
  misc_feature (1)..(175): Homolog of NCBI NO: 29349730 NR Description: conserved hypothetical protein, with a
  misc_feature (1)..(172): Homolog of NCBI NO: 23098222 NR Description: hypothetical protein [Oceanobacillus iheyensis
  misc_feature (1)..(183): Homolog of NCBI NO: 23125055 NR Description: hypothetical protein [Nostoc punctiforme]
  misc_feature (1)..(182): Homolog of NCBI NO: 17230373 NR Description: hypothetical protein [Nostoc sp. PCC 7120]
  misc_feature (1)..(182): Homolog of NCBI NO: 15614516 NR Description: BH1953~unknown conserved protein [Bacillus
  misc_feature (1)..(182): Homolog of NCBI NO: 15643126 NR Description: conserved hypothetical protein [Thermotoga
  misc_feature (1)..(182): Homolog of NCBI NO: 33413155 NR Description: hypothetical protein [Thermotoga sp. RQ2]
  misc_feature (1)..(181): Homolog of NCBI NO: 13472344 NR Description: hypothetical protein [Mesorhizobium loti]
  misc_feature (1)..(30): Homolog of NCBI NO: 14423554 NR Description: Unknown protein [Arabidopsis thaliana]
  misc_feature (1)..(183): Homolog of NCBI NO: 18406971 NR Description: expressed protein [Arabidopsis thaliana]
MRSRIDVGVIDKEGKDLHYFINVADVHLSAKAGFYASKYKKFGNLCYVIGALQAFMGHHNQDMRIRVNGGEWEIYPQVTALCVGNAKYFGGGMKITPNAIPGNGNLEVVVLQNFKWYDFVLKLHKLYNGTHLSVNNVTSRSVQSIEVEEITDSGSIYVQSDGEHLGFLPRKFQVLPGAIDIIS

SEQ ID NO: 44325 - DNA, 1657 bp, Arabidopsis thaliana
  misc_feature (1)..(1657): Ceres Seq. ID no. 13646230
  misc_feature: MA Experiment ID: 20000173 Result: Up-regulated in Transcription
  misc_feature: MA Experiment 20000173 PARAMETER Experiment Name: At_42deg_Heat_P Parameter: Age (day) Value: 14
  misc_feature: MA Experiment 20000173 PARAMETER Experiment Name: At_42deg_Heat_P Parameter: Organism Value: A. thaliana
  misc_feature: MA Experiment 20000173 PARAMETER Experiment Name: At_42deg_Heat_P Parameter: Plant Line Value: WS
  misc_feature: MA Experiment 20000173 PARAMETER Experiment Name: At_42deg_Heat_P Parameter: Temperature (deg C) Value: 42 vs. 22
  misc_feature: MA Experiment 20000173 PARAMETER Experiment Name: At_42deg_Heat_P Parameter: Timepoint (hr) Value: 6
  misc_feature: MA Experiment 20000173 PARAMETER Experiment Name: At_42deg_Heat_P Parameter: Tissue Value: Aerial
  misc_feature: MA Experiment ID: 20000180 Result: Down-regulated in Transcription
  misc_feature: MA Experiment 20000180 PARAMETER Experiment Name: At_Germinating_Seeds_P Parameter: Age (hr) Value: 24 vs. 0
  misc_feature: MA Experiment 20000180 PARAMETER Experiment Name: At_Germinating_Seeds_P Parameter: Tissue Value: Germinating Seeds
  misc_feature: MA Experiment ID: 20001557 Result: Up-regulated in Transcription
  misc_feature: MA Experiment 20001557 PARAMETER Experiment Name: At_Drought_Soil_Dry_P Parameter: Age (day) Value: 27
  misc_feature: MA Experiment 20001557 PARAMETER Experiment Name: At_Drought_Soil_Dry_P Parameter: Organism Value: A. thaliana
  misc_feature: MA Experiment 20001557 PARAMETER Experiment Name: At_Drought_Soil_Dry_P Parameter: Plant Line Value: WS
  misc_feature: MA Experiment 20001557 PARAMETER Experiment Name: At_Drought_Soil_Dry_P Parameter: Post Timepoint (hr) Value: 3
  misc_feature: MA Experiment 20001557 PARAMETER Experiment Name: At_Drought_Soil_Dry_P Parameter: Post-Treatment Value: Re-Water vs. No Drought
  misc_feature: MA Experiment 20001557 PARAMETER Experiment Name: At_Drought_Soil_Dry_P Parameter: Timepoint (day) Value: 13
  misc_feature: MA Experiment 20001557 PARAMETER Experiment Name: At_Drought_Soil_Dry_P Parameter: Treatment Value: Drought vs. No Drought
  misc_feature: MA Experiment ID: 20001905 Result: Up-regulated in Transcription
  misc_feature: MA Experiment 20001905 PARAMETER Experiment Name: At_Drought_Reproduction_P Parameter: Age (day) Value: 40
  misc_feature: MA Experiment 20001905 PARAMETER Experiment Name: At_Drought_Reproduction_P Parameter: Organism Value: A. thaliana
  misc_feature: MA Experiment 20001905 PARAMETER Experiment Name: At_Drought_Reproduction_P Parameter: Plant Line Value: WS
  misc_feature: MA Experiment 20001905 PARAMETER Experiment Name: At_Drought_Reproduction_P Parameter: Timepoint (day) Value: 10
  misc_feature: MA Experiment 20001905 PARAMETER Experiment Name: At_Drought_Reproduction_P Parameter: Tissue Value: Rosettes
  misc_feature: MA Experiment 20001905 PARAMETER Experiment Name: At_Drought_Reproduction_P Parameter: Treatment Value: Drought vs. No Drought
aatctctatctatcttcttcgtcgtgactcaaacgaggttccgccgattataatccttctctccatacttgagagattttgttggattgttctttgttctgagtcgccttggatctatcggtgttggtgctttgttttttgagctagggattgtcggaacgatggagagtgatttgattgatttgttcgagggagctaagaaggcagccgatgcggcggctcttgacggtgttacctcttcaggtcctgaggtttctcaatgtatcgatgcccttaaacagctcaagaagtttcctgtcacatacgataccctcgttgcgactcaggtgggaaagaagctgaggtctcttgcaaaacatcctgttgaagatatcaaaagcgtagctactgatctgcttgagatatggaagaaagttgtcattgaagagacagccaaagctaagaaaaccgaaggcactaacggttgtaaagaggctaaggtgaataagatggatgttgagaagccttcaaatcctgctcctgttaaagttcagaaacttcagaggggtgattcggctaagagtatcaaggttgagagaaaggaacctgacaataaagttgttaccggtgtcaagatagagagaaaggtacctgacatcaaagtcaccaatggaaccaagatagattatcgtggtcaggctgtgaaagatgaaaaggtctcaaaggacaaccaatcaagtatgaaagctccagctaaagcagctaatgctcctccaaaactaactgcaatgctcaaatgcaatgatcctgtgcgtgacaaaatccgtgagttgcttgtggaggcgttgtgcagggttgctggagaagctgatgactatgagagagagtcagtaaatgctagtgatcctttacgtgttgctgtctcagtggaatcactgatgtttgagaaattgggtcgctcaactggagctcagaagcttaagtacagatctataatgttcaacctgagggatagtaacaacccggacttaagaaggagggttctcactggggagatttcaccagagaaactcataacattgtctgccgaagatatggcaagtgacaagaggaaacaagagaacaaccagatcaaagagaaagccctgtttgattgtgagcgtggtcttgctgcaaaagcatctaccgaccagttcaagtgcgggcggtgtggtcagcgcaaatgcacctactatcagatgcaaacaagaagtgctgatgagccaatgacgacttatgttacatgtgttaactgtgacaaccactggaagttctgttgaggagatctctgtgtcttttatttcatgagaccatgttaagacatagaggctctgattgattaatcaggagcttcgtgtccatttgctagcagcattcctagaatgctctggctccgatgtttgtttaaggatatcattcaatgtcttagagattagtaagtaggggtatttactaatttaggtgtttgtagttcttatttcttttgcttctcttcttccaaactgtcaactcaactttcttgcagattttaccaaattttgaagtttttttttttagttttagaattgctatttgtgtcctccatttaatcatcttgtacggctgaagcttcacagcctaatgtatgtgatattggtcg

SEQ ID NO: 44326 - protein, 378 aa, Arabidopsis thaliana
  peptide (1)..(378): Ceres Seq. ID no. 13646231
  misc_feature (338)..(376): Pfam Name: Transcription factor S-II (TFIIS) Pfam Description: Transcription factor S-II (TFIIS)
  misc_feature (103)..(378): Homolog of NCBI NO: 7451402 NR Description: transcription elongation factor TFIIS.oB -
  misc_feature (117)..(378): Homolog of NCBI NO: 20473950 NR Description: similar to Transcription elongation factor A
  misc_feature (117)..(378): Homolog of NCBI NO: 3288459 NR Description: transcription elongation factor TFIIS.h [Homo
  misc_feature (110)..(378): Homolog of NCBI NO: 38505156 NR Description: transcription elongation factor A protein 2
  misc_feature (88)..(378): Homolog of NCBI NO: 4507385 NR Description: transcription elongation factor A (SII), 2 [Homo
  misc_feature (89)..(378): Homolog of NCBI NO: 1373400 NR Description: transcription elongation factor
  misc_feature (1)..(378): Homolog of NCBI NO: 23617251 NR Description: putative transcription elongation factor
  misc_feature (1)..(378): Homolog of NCBI NO: 28876018 NR Description: putative transcription elongation factor
  misc_feature (1)..(378): Homolog of NCBI NO: 18377737 NR Description: putative elongation factor [Arabidopsis thaliana]
  misc_feature (1)..(378): Homolog of NCBI NO: 15224901 NR Description: elongation factor -related [Arabidopsis thaliana]
MESDLIDLFEGAKKAADAAALDGVTSSGPEVSQCIDALKQLKKFPVTYDTLVATQVGKKLRSLAKHPVEDIKSVATDLLEIWKKVVIEETAKAKKTEGTNGCKEAKVNKMDVEKPSNPAPVKVQKLQRGDSAKSIKVERKEPDNKVVTGVKIERKVPDIKVTNGTKIDYRGQAVKDEKVSKDNQSSMKAPAKAANAPPKLTAMLKCNDPVRDKIRELLVEALCRVAGEADDYERESVNASDPLRVAVSVESLMFEKLGRSTGAQKLKYRSIMFNLRDSNNPDLRRRVLTGEISPEKLITLSAEDMASDKRKQENNQIKEKALFDCERGLAAKASTDQFKCGRCGQRKCTYYQMQTRSADEPMTTYVTCVNCDNHWKFC

SEQ ID NO: 44327 - protein, 269 aa, Arabidopsis thaliana
  peptide (1)..(269): Ceres Seq. ID no. 13646232
  misc_feature (229)..(267): Pfam Name: Transcription factor S-II (TFIIS) Pfam Description: Transcription factor S-II (TFIIS)
  misc_feature (1)..(269): Homolog of NCBI NO: 7451402 NR Description: transcription elongation factor TFIIS.oB -
  misc_feature (8)..(269): Homolog of NCBI NO: 20473950 NR Description: similar to Transcription elongation factor A
  misc_feature (8)..(269): Homolog of NCBI NO: 3288459 NR Description: transcription elongation factor TFIIS.h [Homo
  misc_feature (1)..(269): Homolog of NCBI NO: 38505156 NR Description: transcription elongation factor A protein 2
  misc_feature (1)..(269): Homolog of NCBI NO: 4507385 NR Description: transcription elongation factor A (SII), 2 [Homo
  misc_feature (1)..(269): Homolog of NCBI NO: 1373400 NR Description: transcription elongation factor
  misc_feature (1)..(269): Homolog of NCBI NO: 23617251 NR Description: putative transcription elongation factor
  misc_feature (1)..(269): Homolog of NCBI NO: 28876018 NR Description: putative transcription elongation factor
  misc_feature (1)..(269): Homolog of NCBI NO: 18377737 NR Description: putative elongation factor [Arabidopsis thaliana]
  misc_feature (1)..(269): Homolog of NCBI NO: 15224901 NR Description: elongation factor -related [Arabidopsis thaliana]
MDVEKPSNPAPVKVQKLQRGDSAKSIKVERKEPDNKVVTGVKIERKVPDIKVTNGTKIDYRGQAVKDEKVSKDNQSSMKAPAKAANAPPKLTAMLKCNDPVRDKIRELLVEALCRVAGEADDYERESVNASDPLRVAVSVESLMFEKLGRSTGAQKLKYRSIMFNLRDSNNPDLRRRVLTGEISPEKLITLSAEDMASDKRKQENNQIKEKALFDCERGLAAKASTDQFKCGRCGQRKCTYYQMQTRSADEPMTTYVTCVNCDNHWKFC

SEQ ID NO: 44328 - protein, 192 aa, Arabidopsis thaliana
  peptide (1)..(192): Ceres Seq. ID no. 13646233
  misc_feature (152)..(190): Pfam Name: Transcription factor S-II (TFIIS) Pfam Description: Transcription factor S-II (TFIIS)
  misc_feature (1)..(192): Homolog of NCBI NO: 7451402 NR Description: transcription elongation factor TFIIS.oB -
  misc_feature (1)..(192): Homolog of NCBI NO: 20473950 NR Description: similar to Transcription elongation factor A
  misc_feature (1)..(192): Homolog of NCBI NO: 3288459 NR Description: transcription elongation factor TFIIS.h [Homo
  misc_feature (1)..(192): Homolog of NCBI NO: 38505156 NR Description: transcription elongation factor A protein 2
  misc_feature (1)..(192): Homolog of NCBI NO: 4507385 NR Description: transcription elongation factor A (SII), 2 [Homo
  misc_feature (1)..(192): Homolog of NCBI NO: 1373400 NR Description: transcription elongation factor
  misc_feature (1)..(192): Homolog of NCBI NO: 23617251 NR Description: putative transcription elongation factor
  misc_feature (1)..(192): Homolog of NCBI NO: 28876018 NR Description: putative transcription elongation factor
  misc_feature (1)..(192): Homolog of NCBI NO: 18377737 NR Description: putative elongation factor [Arabidopsis thaliana]
  misc_feature (1)..(192): Homolog of NCBI NO: 15224901 NR Description: elongation factor -related [Arabidopsis thaliana]
MKAPAKAANAPPKLTAMLKCNDPVRDKIRELLVEALCRVAGEADDYERESVNASDPLRVAVSVESLMFEKLGRSTGAQKLKYRSIMFNLRDSNNPDLRRRVLTGEISPEKLITLSAEDMASDKRKQENNQIKEKALFDCERGLAAKASTDQFKCGRCGQRKCTYYQMQTRSADEPMTTYVTCVNCDNHWKFC

SEQ ID NO: 44329 - DNA, 1925 bp, Arabidopsis thaliana
  misc_feature (1)..(1925): Ceres Seq. ID no. 12488849
  misc_feature: MA Experiment ID: 20000173 Result: Down-regulated in Transcription
  misc_feature: MA Experiment 20000173 PARAMETER Experiment Name: At_42deg_Heat_P Parameter: Age (day) Value: 14
  misc_feature: MA Experiment 20000173 PARAMETER Experiment Name: At_42deg_Heat_P Parameter: Organism Value: A. thaliana
  misc_feature: MA Experiment 20000173 PARAMETER Experiment Name: At_42deg_Heat_P Parameter: Plant Line Value: WS
  misc_feature: MA Experiment 20000173 PARAMETER Experiment Name: At_42deg_Heat_P Parameter: Temperature (deg C) Value: 42 vs. 22
  misc_feature: MA Experiment 20000173 PARAMETER Experiment Name: At_42deg_Heat_P Parameter: Timepoint (hr) Value: 6
  misc_feature: MA Experiment 20000173 PARAMETER Experiment Name: At_42deg_Heat_P Parameter: Tissue Value: Aerial
  misc_feature: MA Experiment ID: 20000184 Result: Down-regulated in Transcription
  misc_feature: MA Experiment 20000184 PARAMETER Experiment Name: At_Shoots__P Parameter: Age (day) Value: 7
  misc_feature: MA Experiment 20000184 PARAMETER Experiment Name: At_Shoots__P Parameter: Tissue Value: Shoots vs. Whole Plant
  misc_feature: MA Experiment ID: 20000573 Result: Up-regulated in Transcription
  misc_feature: MA Experiment 20000573 PARAMETER Experiment Name: At_100uM_ABA_Mutants__P Parameter: Organism Value: A. thaliana
  misc_feature: MA Experiment 20000573 PARAMETER Experiment Name: At_100uM_ABA_Mutants__P Parameter: Plant Line Value: CS22 vs. Ler wt
  misc_feature: MA Experiment 20000573 PARAMETER Experiment Name: At_100uM_ABA_Mutants__P Parameter: Timepoint (hr) Value: N/A
  misc_feature: MA Experiment 20000573 PARAMETER Experiment Name: At_100uM_ABA_Mutants__P Parameter: Tissue Value: Whole Plant
  misc_feature: MA Experiment 20000573 PARAMETER Experiment Name: At_100uM_ABA_Mutants__P Parameter: Treatment Value: None
  misc_feature: MA Experiment ID: 20000574 Result: Up-regulated in Transcription
  misc_feature: MA Experiment 20000574 PARAMETER Experiment Name: At_100uM_ABA_Mutants__P Parameter: Organism Value: A. thaliana
  misc_feature: MA Experiment 20000574 PARAMETER Experiment Name: At_100uM_ABA_Mutants__P Parameter: Plant Line Value: CS23 vs. Ler wt
  misc_feature: MA Experiment 20000574 PARAMETER Experiment Name: At_100uM_ABA_Mutants__P Parameter: Timepoint (hr) Value: N/A
  misc_feature: MA Experiment 20000574 PARAMETER Experiment Name: At_100uM_ABA_Mutants__P Parameter: Tissue Value: Whole Plant
  misc_feature: MA Experiment 20000574 PARAMETER Experiment Name: At_100uM_ABA_Mutants__P Parameter: Treatment Value: None
  misc_feature: MA Experiment ID: 20001248 Result: Up-regulated in Transcription
  misc_feature: MA Experiment 20001248 PARAMETER Experiment Name: At_Far-red-induction_P Parameter: Age (day) Value: 7
  misc_feature: MA Experiment 20001248 PARAMETER Experiment Name: At_Far-red-induction_P Parameter: Light Value: Far-red vs. White
  misc_feature: MA Experiment 20001248 PARAMETER Experiment Name: At_Far-red-induction_P Parameter: Organism Value: A. thaliana
  misc_feature: MA Experiment 20001248 PARAMETER Experiment Name: At_Far-red-induction_P Parameter: Plant Line Value: Columbia
  misc_feature: MA Experiment 20001248 PARAMETER Experiment Name: At_Far-red-induction_P Parameter: Timepoint (hr) Value: 4
  misc_feature: MA Experiment 20001248 PARAMETER Experiment Name: At_Far-red-induction_P Parameter: Tissue Value: Whole Plant
  misc_feature: MA Experiment ID: 20001450 Result: Up-regulated in Transcription
  misc_feature: MA Experiment 20001450 PARAMETER Experiment Name: At_Far-red-induction_P Parameter: Age (day) Value: 7
  misc_feature: MA Experiment 20001450 PARAMETER Experiment Name: At_Far-red-induction_P Parameter: Light Value: Far-red vs. White
  misc_feature: MA Experiment 20001450 PARAMETER Experiment Name: At_Far-red-induction_P Parameter: Organism Value: A. thaliana
  misc_feature: MA Experiment 20001450 PARAMETER Experiment Name: At_Far-red-induction_P Parameter: Plant Line Value: Columbia
  misc_feature: MA Experiment 20001450 PARAMETER Experiment Name: At_Far-red-induction_P Parameter: Timepoint (hr) Value: 8
  misc_feature: MA Experiment 20001450 PARAMETER Experiment Name: At_Far-red-induction_P Parameter: Tissue Value: Whole Plant
  misc_feature: MA Experiment ID: 20001557 Result: Down-regulated in Transcription
  misc_feature: MA Experiment 20001557 PARAMETER Experiment Name: At_Drought_Soil_Dry_P Parameter: Age (day) Value: 27
  misc_feature: MA Experiment 20001557 PARAMETER Experiment Name: At_Drought_Soil_Dry_P Parameter: Organism Value: A. thaliana
  misc_feature: MA Experiment 20001557 PARAMETER Experiment Name: At_Drought_Soil_Dry_P Parameter: Plant Line Value: WS
  misc_feature: MA Experiment 20001557 PARAMETER Experiment Name: At_Drought_Soil_Dry_P Parameter: Post Timepoint (hr) Value: 3
  misc_feature: MA Experiment 20001557 PARAMETER Experiment Name: At_Drought_Soil_Dry_P Parameter: Post-Treatment Value: Re-Water vs. No Drought
  misc_feature: MA Experiment 20001557 PARAMETER Experiment Name: At_Drought_Soil_Dry_P Parameter: Timepoint (day) Value: 13
  misc_feature: MA Experiment 20001557 PARAMETER Experiment Name: At_Drought_Soil_Dry_P Parameter: Treatment Value: Drought vs. No Drought
atggtgagagtcaaacaaaagaatcttgaatcttatagatctaacggtacatatccacccacgtggcgaaatccaaccacttcattcgcacccgatcaacatcgagtcagcattcactcatcactcaaatccaaaaccaaaaggagacgcttatacaaagaagcagacgacaacaccaaactccgatcatcatcatcaacaacaacaacaacaacaacgatgctgcttcgaatttctggtaacaatctgagacctttgagaccacaatttctcgctcttcgaagctcttggttatcaacttcgccggagcaatctactcaaccacaaatgcctccgagagtaccaaatcttattggaggttcttttgttgagtctcaatcatcttcgtttatcgatgttataaaccctgctacacaagaggttgtatctaaagttccattgactactaatgaagagtttaaagctgcggtatccgctgcgaagcaagcgtttccgttgtggagaaacacgccgattactacccggcagcgtgttatgctaaagtttcaagagcttatacgcaagaatatggataaacttgctatgaacatcacaaccgagcaagggaagactttaaaggattcacatggtgatatcttccgtgggttagaggttgtggagcatgcgtgtggaatggcaaccttacagatgggtgaatatctccccaatgtgtcgaacggagttgatacatatagtattagagagccattaggtgtttgtgctggcatttgtccttttaactttccagccatgattcctttatggatgtttcctgttgcagtgacatgtggtaatacctttattctgaagccatcagagaaggatcccggtgcttctgtaatacttgccgagttggcaatggaagctggtttacctgatggggttctcaatatcgttcacggaaccaatgatactgtgaatgctatctgtgatgatgaagatataagggctgtttcttttgttggctccaacacggctggaatgcatatatacgcaagagcagcagcaaaaggaaaacgtattcagtcaaatatgggggcgaaaaatcatggacttgtcttgcctgatgccaacatcgatgcaactttaaatgcgctacttgctgctgggtttggtgccgctggacagagatgcatggcactgagtacagtggtttttgttggcgatgcaaaatcatgggaggataaactcgttgagcgagctaaggcccttaaagtcacatgtgggtcagaaccagatgcagacctgggtcctgtgattagtaaacaggcgaaagaacggatatgccggttgattcagtctggtgtagatgatggtgctaaattgctgcttgacggaagagatattgtggttccaggatatgagaaagggaattttatcggtcctaccattctatctggtgttaccccagacatggagtgttacaaggaggaaatatttggccctgttcttgtgtgcatgcaggcaaacagttttgatgaggccatatctataataaataaaaacaagtatgggaacggtgctgcgattttcacgtcgtccggggcagcagcaagaaagttccagatggacatagaagcaggacagatcggtattaatgttccaatcccggttccattaccgttcttttccttcaccgggaacaaggcctcattcgcaggagatcttaacttctatggcaaagcaggagtggactttttcactcagatcaaaactgttacacaacagtggaaagatattccaacttcagtatctctggcaatgccaacgtctcaaaagcaataatgagaccttaacttcaaatactttttttacttttggattatcaaatcagcttcaagaagaaccctttgtttatttttcagctctctagtattttntcatgc

SEQ ID NO: 44330 - protein, 607 aa, Arabidopsis thaliana
  peptide (1)..(607): Ceres Seq. ID no. 12488850
  misc_feature (113)..(592): Homolog of NCBI NO: 23061709 NR Description: hypothetical protein [Pseudomonas fluorescens
  misc_feature (228)..(606): Homolog of NCBI NO: 30144414 NR Description: methylmalonate semialdehyde dehydrogenase
  misc_feature (112)..(605): Homolog of NCBI NO: 17533151 NR Description: Methylmalonate-semialdehyde dehydrogenase (56.5
  misc_feature (86)..(603): Homolog of NCBI NO: 23271115 NR Description: RIKEN cDNA 1110038I05 gene [Mus musculus]
  misc_feature (96)..(603): Homolog of NCBI NO: 11095441 NR Description: aldehyde dehydrogenase 6A1 precursor
  misc_feature (93)..(603): Homolog of NCBI NO: 28461249 NR Description: aldehyde dehydrogenase 6 family, member A1 [Bos
  misc_feature (86)..(603): Homolog of NCBI NO: 19527258 NR Description: RIKEN cDNA 1110038I05 [Mus musculus]
  misc_feature (86)..(603): Homolog of NCBI NO: 13591997 NR Description: methylmalonate semialdehyde dehydrogenase gene
  misc_feature (75)..(606): Homolog of NCBI NO: 7431455 NR Description: probable methylmalonate-semialdehyde
  misc_feature (75)..(606): Homolog of NCBI NO: 34394614 NR Description: methylmalonate semi-aldehyde dehydrogenase
MVRVKQKNLESYRSNGTYPPTWRNPTTSFAPDQHRVSIHSSLKSKTKRRRLYKEADDNTKLRSSSSTTTTTTTMLLRISGNNLRPLRPQFLALRSSWLSTSPEQSTQPQMPPRVPNLIGGSFVESQSSSFIDVINPATQEVVSKVPLTTNEEFKAAVSAAKQAFPLWRNTPITTRQRVMLKFQELIRKNMDKLAMNITTEQGKTLKDSHGDIFRGLEVVEHACGMATLQMGEYLPNVSNGVDTYSIREPLGVCAGICPFNFPAMIPLWMFPVAVTCGNTFILKPSEKDPGASVILAELAMEAGLPDGVLNIVHGTNDTVNAICDDEDIRAVSFVGSNTAGMHIYARAAAKGKRIQSNMGAKNHGLVLPDANIDATLNALLAAGFGAAGQRCMALSTVVFVGDAKSWEDKLVERAKALKVTCGSEPDADLGPVISKQAKERICRLIQSGVDDGAKLLLDGRDIVVPGYEKGNFIGPTILSGVTPDMECYKEEIFGPVLVCMQANSFDEAISIINKNKYGNGAAIFTSSGAAARKFQMDIEAGQIGINVPIPVPLPFFSFTGNKASFAGDLNFYGKAGVDFFTQIKTVTQQWKDIPTSVSLAMPTSQKQ

SEQ ID NO: 44331 - protein, 534 aa, Arabidopsis thaliana
  peptide (1)..(534): Ceres Seq. ID no. 12488851
  misc_feature (40)..(519): Homolog of NCBI NO: 23061709 NR Description: hypothetical protein [Pseudomonas fluorescens
  misc_feature (155)..(533): Homolog of NCBI NO: 30144414 NR Description: methylmalonate semialdehyde dehydrogenase
  misc_feature (39)..(532): Homolog of NCBI NO: 17533151 NR Description: Methylmalonate-semialdehyde dehydrogenase (56.5
  misc_feature (13)..(530): Homolog of NCBI NO: 23271115 NR Description: RIKEN cDNA 1110038I05 gene [Mus musculus]
  misc_feature (23)..(530): Homolog of NCBI NO: 11095441 NR Description: aldehyde dehydrogenase 6A1 precursor
  misc_feature (20)..(530): Homolog of NCBI NO: 28461249 NR Description: aldehyde dehydrogenase 6 family, member A1 [Bos
  misc_feature (13)..(530): Homolog of NCBI NO: 19527258 NR Description: RIKEN cDNA 1110038I05 [Mus musculus]
  misc_feature (13)..(530): Homolog of NCBI NO: 13591997 NR Description: methylmalonate semialdehyde dehydrogenase gene
  misc_feature (2)..(533): Homolog of NCBI NO: 7431455 NR Description: probable methylmalonate-semialdehyde
  misc_feature (2)..(533): Homolog of NCBI NO: 34394614 NR Description: methylmalonate semi-aldehyde dehydrogenase
MLLRISGNNLRPLRPQFLALRSSWLSTSPEQSTQPQMPPRVPNLIGGSFVESQSSSFIDVINPATQEVVSKVPLTTNEEFKAAVSAAKQAFPLWRNTPITTRQRVMLKFQELIRKNMDKLAMNITTEQGKTLKDSHGDIFRGLEVVEHACGMATLQMGEYLPNVSNGVDTYSIREPLGVCAGICPFNFPAMIPLWMFPVAVTCGNTFILKPSEKDPGASVILAELAMEAGLPDGVLNIVHGTNDTVNAICDDEDIRAVSFVGSNTAGMHIYARAAAKGKRIQSNMGAKNHGLVLPDANIDATLNALLAAGFGAAGQRCMALSTVVFVGDAKSWEDKLVERAKALKVTCGSEPDADLGPVISKQAKERICRLIQSGVDDGAKLLLDGRDIVVPGYEKGNFIGPTILSGVTPDMECYKEEIFGPVLVCMQANSFDEAISIINKNKYGNGAAIFTSSGAAARKFQMDIEAGQIGINVPIPVPLPFFSFTGNKASFAGDLNFYGKAGVDFFTQIKTVTQQWKDIPTSVSLAMPTSQKQ

SEQ ID NO: 44332 - protein, 498 aa, Arabidopsis thaliana
  peptide (1)..(498): Ceres Seq. ID no. 12488852
  misc_feature (4)..(483): Homolog of NCBI NO: 23061709 NR Description: hypothetical protein [Pseudomonas fluorescens
  misc_feature (119)..(497): Homolog of NCBI NO: 30144414 NR Description: methylmalonate semialdehyde dehydrogenase
  misc_feature (3)..(496): Homolog of NCBI NO: 17533151 NR Description: Methylmalonate-semialdehyde dehydrogenase (56.5
  misc_feature (1)..(494): Homolog of NCBI NO: 23271115 NR Description: RIKEN cDNA 1110038I05 gene [Mus musculus]
  misc_feature (1)..(494): Homolog of NCBI NO: 11095441 NR Description: aldehyde dehydrogenase 6A1 precursor
  misc_feature (1)..(494): Homolog of NCBI NO: 28461249 NR Description: aldehyde dehydrogenase 6 family, member A1 [Bos
  misc_feature (1)..(494): Homolog of NCBI NO: 19527258 NR Description: RIKEN cDNA 1110038I05 [Mus musculus]
  misc_feature (1)..(494): Homolog of NCBI NO: 13591997 NR Description: methylmalonate semialdehyde dehydrogenase gene
  misc_feature (1)..(497): Homolog of NCBI NO: 7431455 NR Description: probable methylmalonate-semialdehyde
  misc_feature (1)..(497): Homolog of NCBI NO: 34394614 NR Description: methylmalonate semi-aldehyde dehydrogenase
MPPRVPNLIGGSFVESQSSSFIDVINPATQEVVSKVPLTTNEEFKAAVSAAKQAFPLWRNTPITTRQRVMLKFQELIRKNMDKLAMNITTEQGKTLKDSHGDIFRGLEVVEHACGMATLQMGEYLPNVSNGVDTYSIREPLGVCAGICPFNFPAMIPLWMFPVAVTCGNTFILKPSEKDPGASVILAELAMEAGLPDGVLNIVHGTNDTVNAICDDEDIRAVSFVGSNTAGMHIYARAAAKGKRIQSNMGAKNHGLVLPDANIDATLNALLAAGFGAAGQRCMALSTVVFVGDAKSWEDKLVERAKALKVTCGSEPDADLGPVISKQAKERICRLIQSGVDDGAKLLLDGRDIVVPGYEKGNFIGPTILSGVTPDMECYKEEIFGPVLVCMQANSFDEAISIINKNKYGNGAAIFTSSGAAARKFQMDIEAGQIGINVPIPVPLPFFSFTGNKASFAGDLNFYGKAGVDFFTQIKTVTQQWKDIPTSVSLAMPTSQKQ

SEQ ID NO: 44333 - DNA, 913 bp, Arabidopsis thaliana
  misc_feature (1)..(913): Ceres Seq. ID no. 13503070
  misc_feature: MA Experiment ID: 20000179 Result: Up-regulated in Transcription
  misc_feature: MA Experiment 20000179 PARAMETER Experiment Name: At_Germinating_Seeds_P Parameter: Age (hr) Value: 6 vs. 0
  misc_feature: MA Experiment 20000179 PARAMETER Experiment Name: At_Germinating_Seeds_P Parameter: Tissue Value: Germinating Seeds
  misc_feature: MA Experiment ID: 20000180 Result: Down-regulated in Transcription
  misc_feature: MA Experiment 20000180 PARAMETER Experiment Name: At_Germinating_Seeds_P Parameter: Age (hr) Value: 24 vs. 0
  misc_feature: MA Experiment 20000180 PARAMETER Experiment Name: At_Germinating_Seeds_P Parameter: Tissue Value: Germinating Seeds
  misc_feature: MA Experiment ID: 20000269 Result: Down-regulated in Transcription
  misc_feature: MA Experiment 20000269 PARAMETER Experiment Name: At_1mM_KNO3_L-vs-H_Roots_P Parameter: Age (day) Value: 7,10,12
  misc_feature: MA Experiment 20000269 PARAMETER Experiment Name: At_1mM_KNO3_L-vs-H_Roots_P Parameter: Organism Value: A. thaliana
  misc_feature: MA Experiment 20000269 PARAMETER Experiment Name: At_1mM_KNO3_L-vs-H_Roots_P Parameter: Plant Line Value: WS
  misc_feature: MA Experiment 20000269 PARAMETER Experiment Name: At_1mM_KNO3_L-vs-H_Roots_P Parameter: Timepoint (day) Value: 7,10,12
  misc_feature: MA Experiment 20000269 PARAMETER Experiment Name: At_1mM_KNO3_L-vs-H_Roots_P Parameter: Tissue Value: Roots
  misc_feature: MA Experiment 20000269 PARAMETER Experiment Name: At_1mM_KNO3_L-vs-H_Roots_P Parameter: Treatment Value: 1mM KNO3 vs. 50mM KNO3
  misc_feature: MA Experiment ID: 20000308 Result: Up-regulated in Transcription
  misc_feature: MA Experiment 20000308 PARAMETER Experiment Name: At_100mM_NaCl__P Parameter: Age (day) Value: 17
  misc_feature: MA Experiment 20000308 PARAMETER Experiment Name: At_100mM_NaCl__P Parameter: Organism Value: A. thaliana
  misc_feature: MA Experiment 20000308 PARAMETER Experiment Name: At_100mM_NaCl__P Parameter: Plant Line Value: WS
  misc_feature: MA Experiment 20000308 PARAMETER Experiment Name: At_100mM_NaCl__P Parameter: Timepoint (hr) Value: 72
  misc_feature: MA Experiment 20000308 PARAMETER Experiment Name: At_100mM_NaCl__P Parameter: Tissue Value: Whole Plant
  misc_feature: MA Experiment 20000308 PARAMETER Experiment Name: At_100mM_NaCl__P Parameter: Treatment Value: 100mM NaCl vs. No Treatment
  misc_feature: MA Experiment ID: 20000436 Result: Down-regulated in Transcription
  misc_feature: MA Experiment 20000436 PARAMETER Experiment Name: At_Drought_P Parameter: Age (day) Value: 7
  misc_feature: MA Experiment 20000436 PARAMETER Experiment Name: At_Drought_P Parameter: Organism Value: A. thaliana
  misc_feature: MA Experiment 20000436 PARAMETER Experiment Name: At_Drought_P Parameter: Plant Line Value: WS
  misc_feature: MA Experiment 20000436 PARAMETER Experiment Name: At_Drought_P Parameter: Timepoint (hr) Value: 12
  misc_feature: MA Experiment 20000436 PARAMETER Experiment Name: At_Drought_P Parameter: Tissue Value: Whole Plant
  misc_feature: MA Experiment 20000436 PARAMETER Experiment Name: At_Drought_P Parameter: Treatment Value: Drought vs. No Drought
  misc_feature: MA Experiment ID: 20000437 Result: Down-regulated in Transcription
  misc_feature: MA Experiment 20000437 PARAMETER Experiment Name: At_Drought_P Parameter: Age (day) Value: 8
  misc_feature: MA Experiment 20000437 PARAMETER Experiment Name: At_Drought_P Parameter: Organism Value: A. thaliana
  misc_feature: MA Experiment 20000437 PARAMETER Experiment Name: At_Drought_P Parameter: Plant Line Value: WS
  misc_feature: MA Experiment 20000437 PARAMETER Experiment Name: At_Drought_P Parameter: Timepoint (hr) Value: 24
  misc_feature: MA Experiment 20000437 PARAMETER Experiment Name: At_Drought_P Parameter: Tissue Value: Whole Plant
  misc_feature: MA Experiment 20000437 PARAMETER Experiment Name: At_Drought_P Parameter: Treatment Value: Drought vs. No Drought
  misc_feature: MA Experiment ID: 20000439 Result: Up-regulated in Transcription
  misc_feature: MA Experiment 20000439 PARAMETER Experiment Name: At_Roots__P Parameter: Age (day) Value: 14 vs. 21
  misc_feature: MA Experiment 20000439 PARAMETER Experiment Name: At_Roots__P Parameter: Organism Value: A. thaliana
  misc_feature: MA Experiment 20000439 PARAMETER Experiment Name: At_Roots__P Parameter: Tissue Value: Roots vs. Whole Plant
  misc_feature: MA Experiment ID: 20000573 Result: Up-regulated in Transcription
  misc_feature: MA Experiment 20000573 PARAMETER Experiment Name: At_100uM_ABA_Mutants__P Parameter: Organism Value: A. thaliana
  misc_feature: MA Experiment 20000573 PARAMETER Experiment Name: At_100uM_ABA_Mutants__P Parameter: Plant Line Value: CS22 vs. Ler wt
  misc_feature: MA Experiment 20000573 PARAMETER Experiment Name: At_100uM_ABA_Mutants__P Parameter: Timepoint (hr) Value: N/A
  misc_feature: MA Experiment 20000573 PARAMETER Experiment Name: At_100uM_ABA_Mutants__P Parameter: Tissue Value: Whole Plant
  misc_feature: MA Experiment 20000573 PARAMETER Experiment Name: At_100uM_ABA_Mutants__P Parameter: Treatment Value: None
  misc_feature: MA Experiment ID: 20000794 Result: Up-regulated in Transcription
  misc_feature: MA Experiment 20000794 PARAMETER Experiment Name: At_Petals_P Parameter: Age (day) Value: 23-25 days
  misc_feature: MA Experiment 20000794 PARAMETER Experiment Name: At_Petals_P Parameter: Plant Line Value: WS
  misc_feature: MA Experiment 20000794 PARAMETER Experiment Name: At_Petals_P Parameter: Tissue Value: Petals vs. Whole plant
gtgtgacttttaggagagtaagaaaatatcgaaggtcagaagaatgagtgaggaaaagaggaaacaacattttgtactagtacatggttcgtgccatggcgcgtggtgctggtacaaggttaagccgctgctagaggcggtgggccaccgcgtaactgctgtggacttagctgcctccggaatagacacaacgaggtcgatcactgacatccccacatgcgaacaatactcggagccattgacgaagctcctgacctcattgccaaatgatgaaaaggttgtgctcgttggtcacagctttggtggcttgaacttagccatagccatggaaaagtttcccgaaaaaatctctgtcgctgtattcttgactgctttcatgccggacaccgaacactcaccatccttcgtcttggacaagtttggaagcaacatgcctcaagaagcatggatgggcaccgaattcgaaccttatggttcagacaattccggactgagtatgttttttagccctgacttcatgaagttgggtctctaccagctttctccagttgaggatcttgaactgggattacttttaatgaggccaggatcgttatttattaacgatttatcgaagatgaaaaacttctcggatgaaggatatgggtctgttcctcgagttttcatagtgtgtaaagaggacaaagcaattccagaagaacgccagagatggatgattgataattttccggtgaatttagtgatggagatggaggagacagatcatatgccaatgttctgcaagcctcagcaactcagtgattacttcctgaaaatcgcggacaaattcgtttaatcaaatcttcatgaaactgtattggatttgatataataaaggtttgttgcaaatgaattaataatgatgaatattttt

SEQ ID NO: 44334 - protein, 263 aa, Arabidopsis thaliana
  peptide (1)..(263): Ceres Seq. ID no. 13503071
  misc_feature (35)..(257): Pfam Name: alpha/beta hydrolase fold Pfam Description: alpha/beta hydrolase fold
  misc_feature (5)..(260): Homolog of NCBI NO: 6651393 NR Description: polyneuridine aldehyde esterase [Rauvolfia
  misc_feature (3)..(262): Homolog of NCBI NO: 15227859 NR Description: hydrolase, alpha/beta fold family [Arabidopsis
  misc_feature (7)..(262): Homolog of NCBI NO: 14279437 NR Description: ethylene-induced esterase [Citrus sinensis]
  misc_feature (5)..(262): Homolog of NCBI NO: 40549303 NR Description: salicylic acid-binding protein 2 [Nicotiana
  misc_feature (1)..(262): Homolog of NCBI NO: 15227865 NR Description: esterase, putative [Arabidopsis thaliana]
  misc_feature (2)..(262): Homolog of NCBI NO: 15227861 NR Description: hydrolase, alpha/beta fold family [Arabidopsis
  misc_feature (1)..(262): Homolog of NCBI NO: 21554666 NR Description: putative acetone-cyanohydrin lyase [Arabidopsis
  misc_feature (1)..(262): Homolog of NCBI NO: 15227863 NR Description: hydrolase, alpha/beta fold family [Arabidopsis
  misc_feature (1)..(263): Homolog of NCBI NO: 27754457 NR Description: putative acetone-cyanohydrin lyase [Arabidopsis
  misc_feature (1)..(263): Homolog of NCBI NO: 15227867 NR Description: esterase, putative [Arabidopsis thaliana]
MSEEKRKQHFVLVHGSCHGAWCWYKVKPLLEAVGHRVTAVDLAASGIDTTRSITDIPTCEQYSEPLTKLLTSLPNDEKVVLVGHSFGGLNLAIAMEKFPEKISVAVFLTAFMPDTEHSPSFVLDKFGSNMPQEAWMGTEFEPYGSDNSGLSMFFSPDFMKLGLYQLSPVEDLELGLLLMRPGSLFINDLSKMKNFSDEGYGSVPRVFIVCKEDKAIPEERQRWMIDNFPVNLVMEMEETDHMPMFCKPQQLSDYFLKIADKFV

SEQ ID NO: 44335 - protein, 169 aa, Arabidopsis thaliana
  peptide (1)..(169): Ceres Seq. ID no. 13503072
  misc_feature (1)..(163): Pfam Name: alpha/beta hydrolase fold Pfam Description: alpha/beta hydrolase fold
  misc_feature (1)..(166): Homolog of NCBI NO: 6651393 NR Description: polyneuridine aldehyde esterase [Rauvolfia
  misc_feature (1)..(168): Homolog of NCBI NO: 15227859 NR Description: hydrolase, alpha/beta fold family [Arabidopsis
  misc_feature (1)..(168): Homolog of NCBI NO: 14279437 NR Description: ethylene-induced esterase [Citrus sinensis]
  misc_feature (1)..(168): Homolog of NCBI NO: 40549303 NR Description: salicylic acid-binding protein 2 [Nicotiana
  misc_feature (1)..(168): Homolog of NCBI NO: 15227865 NR Description: esterase, putative [Arabidopsis thaliana]
  misc_feature (1)..(168): Homolog of NCBI NO: 15227861 NR Description: hydrolase, alpha/beta fold family [Arabidopsis
  misc_feature (1)..(168): Homolog of NCBI NO: 21554666 NR Description: putative acetone-cyanohydrin lyase [Arabidopsis
  misc_feature (1)..(168): Homolog of NCBI NO: 15227863 NR Description: hydrolase, alpha/beta fold family [Arabidopsis
  misc_feature (1)..(169): Homolog of NCBI NO: 27754457 NR Description: putative acetone-cyanohydrin lyase [Arabidopsis
  misc_feature (1)..(169): Homolog of NCBI NO: 15227867 NR Description: esterase, putative [Arabidopsis thaliana]
MEKFPEKISVAVFLTAFMPDTEHSPSFVLDKFGSNMPQEAWMGTEFEPYGSDNSGLSMFFSPDFMKLGLYQLSPVEDLELGLLLMRPGSLFINDLSKMKNFSDEGYGSVPRVFIVCKEDKAIPEERQRWMIDNFPVNLVMEMEETDHMPMFCKPQQLSDYFLKIADKFV

SEQ ID NO: 44336 - protein, 152 aa, Arabidopsis thaliana
  peptide (1)..(152): Ceres Seq. ID no. 13503073
  misc_feature (1)..(146): Pfam Name: alpha/beta hydrolase fold Pfam Description: alpha/beta hydrolase fold
  misc_feature (1)..(149): Homolog of NCBI NO: 6651393 NR Description: polyneuridine aldehyde esterase [Rauvolfia
  misc_feature (1)..(151): Homolog of NCBI NO: 15227859 NR Description: hydrolase, alpha/beta fold family [Arabidopsis
  misc_feature (1)..(151): Homolog of NCBI NO: 14279437 NR Description: ethylene-induced esterase [Citrus sinensis]
  misc_feature (1)..(151): Homolog of NCBI NO: 40549303 NR Description: salicylic acid-binding protein 2 [Nicotiana
  misc_feature (1)..(151): Homolog of NCBI NO: 15227865 NR Description: esterase, putative [Arabidopsis thaliana]
  misc_feature (1)..(151): Homolog of NCBI NO: 15227861 NR Description: hydrolase, alpha/beta fold family [Arabidopsis
  misc_feature (1)..(151): Homolog of NCBI NO: 21554666 NR Description: putative acetone-cyanohydrin lyase [Arabidopsis
  misc_feature (1)..(151): Homolog of NCBI NO: 15227863 NR Description: hydrolase, alpha/beta fold family [Arabidopsis
  misc_feature (1)..(152): Homolog of NCBI NO: 27754457 NR Description: putative acetone-cyanohydrin lyase [Arabidopsis
  misc_feature (1)..(152): Homolog of NCBI NO: 15227867 NR Description: esterase, putative [Arabidopsis thaliana]
MPDTEHSPSFVLDKFGSNMPQEAWMGTEFEPYGSDNSGLSMFFSPDFMKLGLYQLSPVEDLELGLLLMRPGSLFINDLSKMKNFSDEGYGSVPRVFIVCKEDKAIPEERQRWMIDNFPVNLVMEMEETDHMPMFCKPQQLSDYFLKIADKFV

SEQ ID NO: 44337 - DNA, 1401 bp, Arabidopsis thaliana
  misc_feature (1)..(1401): Ceres Seq. ID no. 12488861
  misc_feature: MA Experiment ID: 20000166 Result: Down-regulated in Transcription
  misc_feature: MA Experiment 20000166 PARAMETER Experiment Name: At_100uM_ABA_P Parameter: Age (day) Value: 14
  misc_feature: MA Experiment 20000166 PARAMETER Experiment Name: At_100uM_ABA_P Parameter: Organism Value: A. thaliana
  misc_feature: MA Experiment 20000166 PARAMETER Experiment Name: At_100uM_ABA_P Parameter: Plant Line Value: WS
  misc_feature: MA Experiment 20000166 PARAMETER Experiment Name: At_100uM_ABA_P Parameter: Timepoint (hr) Value: 1
  misc_feature: MA Experiment 20000166 PARAMETER Experiment Name: At_100uM_ABA_P Parameter: Tissue Value: Aerial
  misc_feature: MA Experiment 20000166 PARAMETER Experiment Name: At_100uM_ABA_P Parameter: Treatment Value: 100uM ABA vs. No Treatment
  misc_feature: MA Experiment ID: 20000171 Result: Up-regulated in Transcription
  misc_feature: MA Experiment 20000171 PARAMETER Experiment Name: At_42deg_Heat_P Parameter: Age (day) Value: 14
  misc_feature: MA Experiment 20000171 PARAMETER Experiment Name: At_42deg_Heat_P Parameter: Organism Value: A. thaliana
  misc_feature: MA Experiment 20000171 PARAMETER Experiment Name: At_42deg_Heat_P Parameter: Plant Line Value: WS
  misc_feature: MA Experiment 20000171 PARAMETER Experiment Name: At_42deg_Heat_P Parameter: Temperature (deg C) Value: 42 vs. 22
  misc_feature: MA Experiment 20000171 PARAMETER Experiment Name: At_42deg_Heat_P Parameter: Timepoint (hr) Value: 1
  misc_feature: MA Experiment 20000171 PARAMETER Experiment Name: At_42deg_Heat_P Parameter: Tissue Value: Aerial
  misc_feature: MA Experiment ID: 20000173 Result: Down-regulated in Transcription
  misc_feature: MA Experiment 20000173 PARAMETER Experiment Name: At_42deg_Heat_P Parameter: Age (day) Value: 14
  misc_feature: MA Experiment 20000173 PARAMETER Experiment Name: At_42deg_Heat_P Parameter: Organism Value: A. thaliana
  misc_feature: MA Experiment 20000173 PARAMETER Experiment Name: At_42deg_Heat_P Parameter: Plant Line Value: WS
  misc_feature: MA Experiment 20000173 PARAMETER Experiment Name: At_42deg_Heat_P Parameter: Temperature (deg C) Value: 42 vs. 22
  misc_feature: MA Experiment 20000173 PARAMETER Experiment Name: At_42deg_Heat_P Parameter: Timepoint (hr) Value: 6
  misc_feature: MA Experiment 20000173 PARAMETER Experiment Name: At_42deg_Heat_P Parameter: Tissue Value: Aerial
  misc_feature: MA Experiment ID: 20000185 Result: Down-regulated in Transcription
  misc_feature: MA Experiment 20000185 PARAMETER Experiment Name: At_Roots__P Parameter: Age (day) Value: 7 vs. 21
  misc_feature: MA Experiment 20000185 PARAMETER Experiment Name: At_Roots__P Parameter: Organism Value: A. thaliana
  misc_feature: MA Experiment 20000185 PARAMETER Experiment Name: At_Roots__P Parameter: Tissue Value: Roots vs. Whole Plant
  misc_feature: MA Experiment ID: 20000227 Result: Down-regulated in Transcription
  misc_feature: MA Experiment 20000227 PARAMETER Experiment Name: At_Root-Tips-vs-Tops_P Parameter: Tissue Value: Root Tips vs. Root Tops
  misc_feature: MA Experiment ID: 20000234 Result: Down-regulated in Transcription
  misc_feature: MA Experiment 20000234 PARAMETER Experiment Name: At_Siliques_P Parameter: Age (day) Value: 21
  misc_feature: MA Experiment 20000234 PARAMETER Experiment Name: At_Siliques_P Parameter: Organism Value: A. thaliana
  misc_feature: MA Experiment 20000234 PARAMETER Experiment Name: At_Siliques_P Parameter: Plant Line Value: WS
  misc_feature: MA Experiment 20000234 PARAMETER Experiment Name: At_Siliques_P Parameter: Tissue Value: Less Than 5mm Siliques vs. Whole Plant
  misc_feature: MA Experiment ID: 20000264 Result: Down-regulated in Transcription
  misc_feature: MA Experiment 20000264 PARAMETER Experiment Name: At_Open_Flower_P Parameter: Age (day) Value: 21
  misc_feature: MA Experiment 20000264 PARAMETER Experiment Name: At_Open_Flower_P Parameter: Plant Line Value: WS
  misc_feature: MA Experiment 20000264 PARAMETER Experiment Name: At_Open_Flower_P Parameter: Tissue Value: Open Flower vs. Whole Plant
  misc_feature: MA Experiment ID: 20000265 Result: Down-regulated in Transcription
  misc_feature: MA Experiment 20000265 PARAMETER Experiment Name: At_Open_Flower_P Parameter: Age (day) Value: 21
  misc_feature: MA Experiment 20000265 PARAMETER Experiment Name: At_Open_Flower_P Parameter: Plant Line Value: WS
  misc_feature: MA Experiment 20000265 PARAMETER Experiment Name: At_Open_Flower_P Parameter: Tissue Value: Closed Flower vs. Whole Plant
  misc_feature: MA Experiment ID: 20000268 Result: Down-regulated in Transcription
  misc_feature: MA Experiment 20000268 PARAMETER Experiment Name: At_100mM_NaCl__P Parameter: Age (day) Value: 14
  misc_feature: MA Experiment 20000268 PARAMETER Experiment Name: At_100mM_NaCl__P Parameter: Organism Value: A. thaliana
  misc_feature: MA Experiment 20000268 PARAMETER Experiment Name: At_100mM_NaCl__P Parameter: Plant Line Value: WS
  misc_feature: MA Experiment 20000268 PARAMETER Experiment Name: At_100mM_NaCl__P Parameter: Timepoint (hr) Value: 6
  misc_feature: MA Experiment 20000268 PARAMETER Experiment Name: At_100mM_NaCl__P Parameter: Tissue Value: Whole Plant
  misc_feature: MA Experiment 20000268 PARAMETER Experiment Name: At_100mM_NaCl__P Parameter: Treatment Value: 100mM NaCl vs. No Treatment
  misc_feature: MA Experiment ID: 20000269 Result: Down-regulated in Transcription
  misc_feature: MA Experiment 20000269 PARAMETER Experiment Name: At_1mM_KNO3_L-vs-H_Roots_P Parameter: Age (day) Value: 7,10,12
  misc_feature: MA Experiment 20000269 PARAMETER Experiment Name: At_1mM_KNO3_L-vs-H_Roots_P Parameter: Organism Value: A. thaliana
  misc_feature: MA Experiment 20000269 PARAMETER Experiment Name: At_1mM_KNO3_L-vs-H_Roots_P Parameter: Plant Line Value: WS
  misc_feature: MA Experiment 20000269 PARAMETER Experiment Name: At_1mM_KNO3_L-vs-H_Roots_P Parameter: Timepoint (day) Value: 7,10,12
  misc_feature: MA Experiment 20000269 PARAMETER Experiment Name: At_1mM_KNO3_L-vs-H_Roots_P Parameter: Tissue Value: Roots
  misc_feature: MA Experiment 20000269 PARAMETER Experiment Name: At_1mM_KNO3_L-vs-H_Roots_P Parameter: Treatment Value: 1mM KNO3 vs. 50mM KNO3
  misc_feature: MA Experiment ID: 20000286 Result: Down-regulated in Transcription
  misc_feature: MA Experiment 20000286 PARAMETER Experiment Name: At_Open_Flower_P Parameter: Age (day) Value: 21
  misc_feature: MA Experiment 20000286 PARAMETER Experiment Name: At_Open_Flower_P Parameter: Plant Line Value: WS
  misc_feature: MA Experiment 20000286 PARAMETER Experiment Name: At_Open_Flower_P Parameter: Tissue Value: Half Open vs. Whole Plant
  misc_feature: MA Experiment ID: 20000308 Result: Down-regulated in Transcription
  misc_feature: MA Experiment 20000308 PARAMETER Experiment Name: At_100mM_NaCl__P Parameter: Age (day) Value: 17
  misc_feature: MA Experiment 20000308 PARAMETER Experiment Name: At_100mM_NaCl__P Parameter: Organism Value: A. thaliana
  misc_feature: MA Experiment 20000308 PARAMETER Experiment Name: At_100mM_NaCl__P Parameter: Plant Line Value: WS
  misc_feature: MA Experiment 20000308 PARAMETER Experiment Name: At_100mM_NaCl__P Parameter: Timepoint (hr) Value: 72
  misc_feature: MA Experiment 20000308 PARAMETER Experiment Name: At_100mM_NaCl__P Parameter: Tissue Value: Whole Plant
  misc_feature: MA Experiment 20000308 PARAMETER Experiment Name: At_100mM_NaCl__P Parameter: Treatment Value: 100mM NaCl vs. No Treatment
  misc_feature: MA Experiment ID: 20000436 Result: Down-regulated in Transcription
  misc_feature: MA Experiment 20000436 PARAMETER Experiment Name: At_Drought_P Parameter: Age (day) Value: 7
  misc_feature: MA Experiment 20000436 PARAMETER Experiment Name: At_Drought_P Parameter: Organism Value: A. thaliana
  misc_feature: MA Experiment 20000436 PARAMETER Experiment Name: At_Drought_P Parameter: Plant Line Value: WS
  misc_feature: MA Experiment 20000436 PARAMETER Experiment Name: At_Drought_P Parameter: Timepoint (hr) Value: 12
  misc_feature: MA Experiment 20000436 PARAMETER Experiment Name: At_Drought_P Parameter: Tissue Value: Whole Plant
  misc_feature: MA Experiment 20000436 PARAMETER Experiment Name: At_Drought_P Parameter: Treatment Value: Drought vs. No Drought
  misc_feature: MA Experiment ID: 20000438 Result: Down-regulated in Transcription
  misc_feature: MA Experiment 20000438 PARAMETER Experiment Name: At_Shoots__P Parameter: Age (day) Value: 14
  misc_feature: MA Experiment 20000438 PARAMETER Experiment Name: At_Shoots__P Parameter: Tissue Value: Shoots vs. Whole Plant
  misc_feature: MA Experiment ID: 20000439 Result: Down-regulated in Transcription
  misc_feature: MA Experiment 20000439 PARAMETER Experiment Name: At_Roots__P Parameter: Age (day) Value: 14 vs. 21
  misc_feature: MA Experiment 20000439 PARAMETER Experiment Name: At_Roots__P Parameter: Organism Value: A. thaliana
  misc_feature: MA Experiment 20000439 PARAMETER Experiment Name: At_Roots__P Parameter: Tissue Value: Roots vs. Whole Plant
  misc_feature: MA Experiment ID: 20000443 Result: Down-regulated in Transcription
  misc_feature: MA Experiment 20000443 PARAMETER Experiment Name: At_1uM_BR-BRZ__P Parameter: Tissue Value: Shoot Apices
  misc_feature: MA Experiment 20000443 PARAMETER Experiment Name: At_1uM_BR-BRZ__P Parameter: Treatment Value: 1uM BRZ vs. No Treatment
  misc_feature: MA Experiment ID: 20000451 Result: Down-regulated in Transcription
  misc_feature: MA Experiment 20000451 PARAMETER Experiment Name: At_CS6879_Shoots-Roots_P Parameter: Age (day) Value: 14
  misc_feature: MA Experiment 20000451 PARAMETER Experiment Name: At_CS6879_Shoots-Roots_P Parameter: Organism Value: A. thaliana
  misc_feature: MA Experiment 20000451 PARAMETER Experiment Name: At_CS6879_Shoots-Roots_P Parameter: Plant Line Value: CS6879 vs. WS
  misc_feature: MA Experiment 20000451 PARAMETER Experiment Name: At_CS6879_Shoots-Roots_P Parameter: Tissue Value: Roots
  misc_feature: MA Experiment ID: 20000453 Result: Down-regulated in Transcription
  misc_feature: MA Experiment 20000453 PARAMETER Experiment Name: At_100uM_ABA_P Parameter: Age (day) Value: 15
  misc_feature: MA Experiment 20000453 PARAMETER Experiment Name: At_100uM_ABA_P Parameter: Organism Value: A. thaliana
  misc_feature: MA Experiment 20000453 PARAMETER Experiment Name: At_100uM_ABA_P Parameter: Plant Line Value: WS
  misc_feature: MA Experiment 20000453 PARAMETER Experiment Name: At_100uM_ABA_P Parameter: Timepoint (hr) Value: 24
  misc_feature: MA Experiment 20000453 PARAMETER Experiment Name: At_100uM_ABA_P Parameter: Tissue Value: Aerial
  misc_feature: MA Experiment 20000453 PARAMETER Experiment Name: At_100uM_ABA_P Parameter: Treatment Value: 100uM ABA vs. No Treatment
  misc_feature: MA Experiment ID: 20000527 Result: Up-regulated in Transcription
  misc_feature: MA Experiment 20000527 PARAMETER Experiment Name: At_10percent_PEG_P Parameter: Age (day) Value: 20
  misc_feature: MA Experiment 20000527 PARAMETER Experiment Name: At_10percent_PEG_P Parameter: Organism Value: A. thaliana
  misc_feature: MA Experiment 20000527 PARAMETER Experiment Name: At_10percent_PEG_P Parameter: Plant Line Value: WS
  misc_feature: MA Experiment 20000527 PARAMETER Experiment Name: At_10percent_PEG_P Parameter: Timepoint (day) Value: 20
  misc_feature: MA Experiment 20000527 PARAMETER Experiment Name: At_10percent_PEG_P Parameter: Tissue Value: Whole Plant
  misc_feature: MA Experiment 20000527 PARAMETER Experiment Name: At_10percent_PEG_P Parameter: Treatment Value: 10percent PEG vs. No Treatment
  misc_feature: MA Experiment ID: 20000709 Result: Up-regulated in Transcription
  misc_feature: MA Experiment 20000709 PARAMETER Experiment Name: At_15mM_NH4NO3_L-to-H_P Parameter: Age (hr) Value: 14
  misc_feature: MA Experiment 20000709 PARAMETER Experiment Name: At_15mM_NH4NO3_L-to-H_P Parameter: Organism Value: A. thaliana
  misc_feature: MA Experiment 20000709 PARAMETER Experiment Name: At_15mM_NH4NO3_L-to-H_P Parameter: Plant Line Value: WS
  misc_feature: MA Experiment 20000709 PARAMETER Experiment Name: At_15mM_NH4NO3_L-to-H_P Parameter: Timepoint (hr) Value: 4
  misc_feature: MA Experiment 20000709 PARAMETER Experiment Name: At_15mM_NH4NO3_L-to-H_P Parameter: Tissue Value: Aerial
  misc_feature: MA Experiment 20000709 PARAMETER Experiment Name: At_15mM_NH4NO3_L-to-H_P Parameter: Treatment Value: 15mM NH4NO3 vs. 30mM Mannitol
  misc_feature: MA Experiment ID: 20000794 Result: Down-regulated in Transcription
  misc_feature: MA Experiment 20000794 PARAMETER Experiment Name: At_Petals_P Parameter: Age (day) Value: 23-25 days
  misc_feature: MA Experiment 20000794 PARAMETER Experiment Name: At_Petals_P Parameter: Plant Line Value: WS
  misc_feature: MA Experiment 20000794 PARAMETER Experiment Name: At_Petals_P Parameter: Tissue Value: Petals vs. Whole plant
  misc_feature: MA Experiment ID: 20001247 Result: Up-regulated in Transcription
  misc_feature: MA Experiment 20001247 PARAMETER Experiment Name: At_Far-red-induction_P Parameter: Age (day) Value: 7
  misc_feature: MA Experiment 20001247 PARAMETER Experiment Name: At_Far-red-induction_P Parameter: Light Value: Far-red vs. White
  misc_feature: MA Experiment 20001247 PARAMETER Experiment Name: At_Far-red-induction_P Parameter: Organism Value: A. thaliana
  misc_feature: MA Experiment 20001247 PARAMETER Experiment Name: At_Far-red-induction_P Parameter: Plant Line Value: Columbia
  misc_feature: MA Experiment 20001247 PARAMETER Experiment Name: At_Far-red-induction_P Parameter: Timepoint (hr) Value: 1
  misc_feature: MA Experiment 20001247 PARAMETER Experiment Name: At_Far-red-induction_P Parameter: Tissue Value: Whole Plant
  misc_feature: MA Experiment ID: 20001248 Result: Up-regulated in Transcription
  misc_feature: MA Experiment 20001248 PARAMETER Experiment Name: At_Far-red-induction_P Parameter: Age (day) Value: 7
  misc_feature: MA Experiment 20001248 PARAMETER Experiment Name: At_Far-red-induction_P Parameter: Light Value: Far-red vs. White
  misc_feature: MA Experiment 20001248 PARAMETER Experiment Name: At_Far-red-induction_P Parameter: Organism Value: A. thaliana
  misc_feature: MA Experiment 20001248 PARAMETER Experiment Name: At_Far-red-induction_P Parameter: Plant Line Value: Columbia
  misc_feature: MA Experiment 20001248 PARAMETER Experiment Name: At_Far-red-induction_P Parameter: Timepoint (hr) Value: 4
  misc_feature: MA Experiment 20001248 PARAMETER Experiment Name: At_Far-red-induction_P Parameter: Tissue Value: Whole Plant
  misc_feature: MA Experiment ID: 20001450 Result: Up-regulated in Transcription
  misc_feature: MA Experiment 20001450 PARAMETER Experiment Name: At_Far-red-induction_P Parameter: Age (day) Value: 7
  misc_feature: MA Experiment 20001450 PARAMETER Experiment Name: At_Far-red-induction_P Parameter: Light Value: Far-red vs. White
  misc_feature: MA Experiment 20001450 PARAMETER Experiment Name: At_Far-red-induction_P Parameter: Organism Value: A. thaliana
  misc_feature: MA Experiment 20001450 PARAMETER Experiment Name: At_Far-red-induction_P Parameter: Plant Line Value: Columbia
  misc_feature: MA Experiment 20001450 PARAMETER Experiment Name: At_Far-red-induction_P Parameter: Timepoint (hr) Value: 8
  misc_feature: MA Experiment 20001450 PARAMETER Experiment Name: At_Far-red-induction_P Parameter: Tissue Value: Whole Plant
  misc_feature: MA Experiment ID: 20001554 Result: Down-regulated in Transcription
  misc_feature: MA Experiment 20001554 PARAMETER Experiment Name: At_Drought_Soil_Dry_P Parameter: Age (day) Value: 21
  misc_feature: MA Experiment 20001554 PARAMETER Experiment Name: At_Drought_Soil_Dry_P Parameter: Organism Value: A. thaliana
  misc_feature: MA Experiment 20001554 PARAMETER Experiment Name: At_Drought_Soil_Dry_P Parameter: Plant Line Value: WS
  misc_feature: MA Experiment 20001554 PARAMETER Experiment Name: At_Drought_Soil_Dry_P Parameter: Post Timepoint (hr) Value: None
  misc_feature: MA Experiment 20001554 PARAMETER Experiment Name: At_Drought_Soil_Dry_P Parameter: Post-Treatment Value: None
  misc_feature: MA Experiment 20001554 PARAMETER Experiment Name: At_Drought_Soil_Dry_P Parameter: Timepoint (day) Value: 7
  misc_feature: MA Experiment 20001554 PARAMETER Experiment Name: At_Drought_Soil_Dry_P Parameter: Treatment Value: Drought vs. No Drought
  misc_feature: MA Experiment ID: 20001557 Result: Up-regulated in Transcription
  misc_feature: MA Experiment 20001557 PARAMETER Experiment Name: At_Drought_Soil_Dry_P Parameter: Age (day) Value: 27
  misc_feature: MA Experiment 20001557 PARAMETER Experiment Name: At_Drought_Soil_Dry_P Parameter: Organism Value: A. thaliana
  misc_feature: MA Experiment 20001557 PARAMETER Experiment Name: At_Drought_Soil_Dry_P Parameter: Plant Line Value: WS
  misc_feature: MA Experiment 20001557 PARAMETER Experiment Name: At_Drought_Soil_Dry_P Parameter: Post Timepoint (hr) Value: 3
  misc_feature: MA Experiment 20001557 PARAMETER Experiment Name: At_Drought_Soil_Dry_P Parameter: Post-Treatment Value: Re-Water vs. No Drought
  misc_feature: MA Experiment 20001557 PARAMETER Experiment Name: At_Drought_Soil_Dry_P Parameter: Timepoint (day) Value: 13
  misc_feature: MA Experiment 20001557 PARAMETER Experiment Name: At_Drought_Soil_Dry_P Parameter: Treatment Value: Drought vs. No Drought
  misc_feature: MA Experiment ID: 20001755 Result: Down-regulated in Transcription
  misc_feature: MA Experiment 20001755 PARAMETER Experiment Name: At_50mM_NH4NO3_L-to-H_P Parameter: Timepoint (hr) Value: 2
  misc_feature: MA Experiment 20001755 PARAMETER Experiment Name: At_50mM_NH4NO3_L-to-H_P Parameter: Tissue Value: Leaf
  misc_feature: MA Experiment 20001755 PARAMETER Experiment Name: At_50mM_NH4NO3_L-to-H_P Parameter: Treatment Value: 50mM NH4NO3 vs 100mM Mannitol
  misc_feature: MA Experiment ID: 20001757 Result: Up-regulated in Transcription
  misc_feature: MA Experiment 20001757 PARAMETER Experiment Name: At_50mM_NH4NO3_L-to-H_P Parameter: Timepoint (hr) Value: 6
  misc_feature: MA Experiment 20001757 PARAMETER Experiment Name: At_50mM_NH4NO3_L-to-H_P Parameter: Tissue Value: Leaf
  misc_feature: MA Experiment 20001757 PARAMETER Experiment Name: At_50mM_NH4NO3_L-to-H_P Parameter: Treatment Value: 50mM NH4NO3 vs 100mM Mannitol
  misc_feature: MA Experiment ID: 20001761 Result: Up-regulated in Transcription
  misc_feature: MA Experiment 20001761 PARAMETER Experiment Name: At_50mM_NH4NO3_L-to-H_P Parameter: Timepoint (hr) Value: 4
  misc_feature: MA Experiment 20001761 PARAMETER Experiment Name: At_50mM_NH4NO3_L-to-H_P Parameter: Tissue Value: Siliques
  misc_feature: MA Experiment 20001761 PARAMETER Experiment Name: At_50mM_NH4NO3_L-to-H_P Parameter: Treatment Value: 50mM NH4NO3 vs 100mM Mannitol
  misc_feature: MA Experiment ID: 20001773 Result: Down-regulated in Transcription
  misc_feature: MA Experiment 20001773 PARAMETER Experiment Name: At_Far-red-enriched-adult_P Parameter: Age (day) Value: 30
  misc_feature: MA Experiment 20001773 PARAMETER Experiment Name: At_Far-red-enriched-adult_P Parameter: Light Value: Far-red enriched vs. White
  misc_feature: MA Experiment 20001773 PARAMETER Experiment Name: At_Far-red-enriched-adult_P Parameter: Organism Value: A. thaliana
  misc_feature: MA Experiment 20001773 PARAMETER Experiment Name: At_Far-red-enriched-adult_P Parameter: Plant Line Value: Columbia
  misc_feature: MA Experiment 20001773 PARAMETER Experiment Name: At_Far-red-enriched-adult_P Parameter: Timepoint (hr) Value: 48
  misc_feature: MA Experiment 20001773 PARAMETER Experiment Name: At_Far-red-enriched-adult_P Parameter: Tissue Value: Aerial
  misc_feature: MA Experiment ID: 20001906 Result: Down-regulated in Transcription
  misc_feature: MA Experiment 20001906 PARAMETER Experiment Name: At_Drought_Reproduction_P Parameter: Age (day) Value: 35
  misc_feature: MA Experiment 20001906 PARAMETER Experiment Name: At_Drought_Reproduction_P Parameter: Organism Value: A. thaliana
  misc_feature: MA Experiment 20001906 PARAMETER Experiment Name: At_Drought_Reproduction_P Parameter: Plant Line Value: WS
  misc_feature: MA Experiment 20001906 PARAMETER Experiment Name: At_Drought_Reproduction_P Parameter: Timepoint (day) Value: 5
  misc_feature: MA Experiment 20001906 PARAMETER Experiment Name: At_Drought_Reproduction_P Parameter: Tissue Value: Siliques
  misc_feature: MA Experiment 20001906 PARAMETER Experiment Name: At_Drought_Reproduction_P Parameter: Treatment Value: Drought vs. No Drought
aaactaccaaacctacagaaatctctcttcttcttcttctctacaaaatttcaatggaagctgttcttgtcgcaatgtccgtccccgccacaacggaagacgacggattttcgttaatcaccgataaactttcatataatctaacgccgacgtcggacgttgagatcgttacctccgataaccgtcggattccggcacactccggcgttctggcttcagcttcaccggtactgatgaacatcatgaagaaaccgatgagacgttacagaggctgtggatctaaaagagtcatcaagattcttggcgttccatgcgacgccgtttcggtttttatcaaattcctctactcttctagtttgacggaggatgagatggagagatatggaatccatcttttagcgttgtctcacgtctacatggtcacccagctgaagcaacggtgctcaaaaggcgttgtacaacgtttaactacagagaacgtagtcgacgtcctccagctagctcggctctgcgacgcacccgatgtttgccttcgatctatgcgtctgatccattcgcagtttaagaccgttgagcagactgaaggatggaagtttattcaagaacatgatcctttcctcgagctcgacattctccagttcatcgatgacgccgaatcgaggaagaaaagaaggcgacgacatagaaaggagcaggatctttacatgcaactaagcgaggcaatggagtgcatagagcacatatgcacacaaggttgtacattggtcggtccatcaaacgtagtagataacaacaaaaagtcaatgactgcggaaaagtcagagccttgtaaggcgttttccacgtgttatggtcttcagcttttgatacgtcactttgccgtatgcaagaggaggaataacgataagggttgtcttcgttgcaagcggatgcttcaactctttagactccattctttgatttgtgatcaacccgattcttgtcgcgtccctctctgcaggcaatttaggaaacggggagaacaagacaagaaaatgggtgaagacaccaagtggaagcttctggtgacaagggttgtgtctgcaaaagctatgacgtcgttgtgtcagtcaaagaagaacaaatgtgaacaagcacaaggggtttaatcaaaaccaggaaggagttagttaggtttgaagaagattaagtaagaagctttcttataatttgatatccattctttttgtagtataatagtatttgttagttcgattctttattagaggggtttagtttgtataggagtaaacccttttaaattggctgtataagtaggtcatattcaattgttttgttctatttatctgaaaaatgtcagcatgtaatacaaaacaaataaatgttcaaattaaagggagg

SEQ ID NO: 44338 - protein, 381 aa, Arabidopsis thaliana
  peptide (1)..(381): Ceres Seq. ID no. 12488862
  misc_feature (45)..(155): Pfam Name: BTB/POZ domain Pfam Description: BTB/POZ domain
  misc_feature (41)..(332): Homolog of NCBI NO: 15221235 NR Description: hypothetical protein; protein id: At1g05690.1
  misc_feature (51)..(362): Homolog of NCBI NO: 18420081 NR Description: putative protein
  misc_feature (51)..(362): Homolog of NCBI NO: 26453150 NR Description: unknown protein [Arabidopsis thaliana]
  misc_feature (51)..(362): Homolog of NCBI NO: 7485765 NR Description: hypothetical protein F19F18.100 - Arabidopsis
  misc_feature (41)..(362): Homolog of NCBI NO: 15240763 NR Description: putative protein
  misc_feature (51)..(374): Homolog of NCBI NO: 38345257 NR Description: OSJNBb0011N17.18 [Oryza sativa (japonica
  misc_feature (51)..(377): Homolog of NCBI NO: 20804890 NR Description: P0497A05.15 [Oryza sativa (japonica
  misc_feature (25)..(376): Homolog of NCBI NO: 15242656 NR Description: putative protein; protein id: At5g63160.1
  misc_feature (18)..(381): Homolog of NCBI NO: 7487530 NR Description: hypothetical protein T29H11.120 - Arabidopsis
  misc_feature (18)..(381): Homolog of NCBI NO: 18408618 NR Description: putative protein
TTKPTEISLLLLLYKISMEAVLVAMSVPATTEDDGFSLITDKLSYNLTPTSDVEIVTSDNRRIPAHSGVLASASPVLMNIMKKPMRRYRGCGSKRVIKILGVPCDAVSVFIKFLYSSSLTEDEMERYGIHLLALSHVYMVTQLKQRCSKGVVQRLTTENVVDVLQLARLCDAPDVCLRSMRLIHSQFKTVEQTEGWKFIQEHDPFLELDILQFIDDAESRKKRRRRHRKEQDLYMQLSEAMECIEHICTQGCTLVGPSNVVDNNKKSMTAEKSEPCKAFSTCYGLQLLIRHFAVCKRRNNDKGCLRCKRMLQLFRLHSLICDQPDSCRVPLCRQFRKRGEQDKKMGEDTKWKLLVTRVVSAKAMTSLCQSKKNKCEQAQGV

SEQ ID NO: 44339 - protein, 364 aa, Arabidopsis thaliana
  peptide (1)..(364): Ceres Seq. ID no. 12488863
  misc_feature (28)..(138): Pfam Name: BTB/POZ domain Pfam Description: BTB/POZ domain
  misc_feature (24)..(315): Homolog of NCBI NO: 15221235 NR Description: hypothetical protein; protein id: At1g05690.1
  misc_feature (34)..(345): Homolog of NCBI NO: 18420081 NR Description: putative protein
  misc_feature (34)..(345): Homolog of NCBI NO: 26453150 NR Description: unknown protein [Arabidopsis thaliana]
  misc_feature (34)..(345): Homolog of NCBI NO: 7485765 NR Description: hypothetical protein F19F18.100 - Arabidopsis
  misc_feature (24)..(345): Homolog of NCBI NO: 15240763 NR Description: putative protein
  misc_feature (34)..(357): Homolog of NCBI NO: 38345257 NR Description: OSJNBb0011N17.18 [Oryza sativa (japonica
  misc_feature (34)..(360): Homolog of NCBI NO: 20804890 NR Description: P0497A05.15 [Oryza sativa (japonica
  misc_feature (8)..(359): Homolog of NCBI NO: 15242656 NR Description: putative protein; protein id: At5g63160.1
  misc_feature (1)..(364): Homolog of NCBI NO: 7487530 NR Description: hypothetical protein T29H11.120 - Arabidopsis
  misc_feature (1)..(364): Homolog of NCBI NO: 18408618 NR Description: putative protein
MEAVLVAMSVPATTEDDGFSLITDKLSYNLTPTSDVEIVTSDNRRIPAHSGVLASASPVLMNIMKKPMRRYRGCGSKRVIKILGVPCDAVSVFIKFLYSSSLTEDEMERYGIHLLALSHVYMVTQLKQRCSKGVVQRLTTENVVDVLQLARLCDAPDVCLRSMRLIHSQFKTVEQTEGWKFIQEHDPFLELDILQFIDDAESRKKRRRRHRKEQDLYMQLSEAMECIEHICTQGCTLVGPSNVVDNNKKSMTAEKSEPCKAFSTCYGLQLLIRHFAVCKRRNNDKGCLRCKRMLQLFRLHSLICDQPDSCRVPLCRQFRKRGEQDKKMGEDTKWKLLVTRVVSAKAMTSLCQSKKNKCEQAQGV

SEQ ID NO: 44340 - protein, 357 aa, Arabidopsis thaliana
  peptide (1)..(357): Ceres Seq. ID no. 12488864
  misc_feature (21)..(131): Pfam Name: BTB/POZ domain Pfam Description: BTB/POZ domain
  misc_feature (17)..(308): Homolog of NCBI NO: 15221235 NR Description: hypothetical protein; protein id: At1g05690.1
  misc_feature (27)..(338): Homolog of NCBI NO: 26453150 NR Description: unknown protein [Arabidopsis thaliana]
  misc_feature (27)..(338): Homolog of NCBI NO: 18420081 NR Description: putative protein
  misc_feature (27)..(338): Homolog of NCBI NO: 7485765 NR Description: hypothetical protein F19F18.100 - Arabidopsis
  misc_feature (17)..(338): Homolog of NCBI NO: 15240763 NR Description: putative protein
  misc_feature (27)..(350): Homolog of NCBI NO: 38345257 NR Description: OSJNBb0011N17.18 [Oryza sativa (japonica
  misc_feature (27)..(353): Homolog of NCBI NO: 20804890 NR Description: P0497A05.15 [Oryza sativa (japonica
  misc_feature (1)..(352): Homolog of NCBI NO: 15242656 NR Description: putative protein; protein id: At5g63160.1
  misc_feature (1)..(357): Homolog of NCBI NO: 7487530 NR Description: hypothetical protein T29H11.120 - Arabidopsis
  misc_feature (1)..(357): Homolog of NCBI NO: 18408618 NR Description: putative protein
MSVPATTEDDGFSLITDKLSYNLTPTSDVEIVTSDNRRIPAHSGVLASASPVLMNIMKKPMRRYRGCGSKRVIKILGVPCDAVSVFIKFLYSSSLTEDEMERYGIHLLALSHVYMVTQLKQRCSKGVVQRLTTENVVDVLQLARLCDAPDVCLRSMRLIHSQFKTVEQTEGWKFIQEHDPFLELDILQFIDDAESRKKRRRRHRKEQDLYMQLSEAMECIEHICTQGCTLVGPSNVVDNNKKSMTAEKSEPCKAFSTCYGLQLLIRHFAVCKRRNNDKGCLRCKRMLQLFRLHSLICDQPDSCRVPLCRQFRKRGEQDKKMGEDTKWKLLVTRVVSAKAMTSLCQSKKNKCEQAQGV

SEQ ID NO: 44341 - DNA, 1519 bp, Arabidopsis thaliana
  misc_feature (1)..(1519): Ceres Seq. ID no. 12488865
  misc_feature: MA Experiment ID: 20000182 Result: Up-regulated in Transcription
  misc_feature: MA Experiment 20000182 PARAMETER Experiment Name: At_2mM_SA_P Parameter: Age (day) Value: 14
  misc_feature: MA Experiment 20000182 PARAMETER Experiment Name: At_2mM_SA_P Parameter: Organism Value: A. thaliana
  misc_feature: MA Experiment 20000182 PARAMETER Experiment Name: At_2mM_SA_P Parameter: Plant Line Value: WS
  misc_feature: MA Experiment 20000182 PARAMETER Experiment Name: At_2mM_SA_P Parameter: Timepoint (hr) Value: 6
  misc_feature: MA Experiment 20000182 PARAMETER Experiment Name: At_2mM_SA_P Parameter: Tissue Value: Aerial
  misc_feature: MA Experiment 20000182 PARAMETER Experiment Name: At_2mM_SA_P Parameter: Treatment Value: 2mM SA vs. No Treatment
  misc_feature: MA Experiment ID: 20000265 Result: Down-regulated in Transcription
  misc_feature: MA Experiment 20000265 PARAMETER Experiment Name: At_Open_Flower_P Parameter: Age (day) Value: 21
  misc_feature: MA Experiment 20000265 PARAMETER Experiment Name: At_Open_Flower_P Parameter: Plant Line Value: WS
  misc_feature: MA Experiment 20000265 PARAMETER Experiment Name: At_Open_Flower_P Parameter: Tissue Value: Closed Flower vs. Whole Plant
  misc_feature: MA Experiment ID: 20001911 Result: Up-regulated in Transcription
  misc_feature: MA Experiment 20001911 PARAMETER Experiment Name: At_Drought_Reproduction_P Parameter: Age (day) Value: 40
  misc_feature: MA Experiment 20001911 PARAMETER Experiment Name: At_Drought_Reproduction_P Parameter: Organism Value: A. thaliana
  misc_feature: MA Experiment 20001911 PARAMETER Experiment Name: At_Drought_Reproduction_P Parameter: Plant Line Value: WS
  misc_feature: MA Experiment 20001911 PARAMETER Experiment Name: At_Drought_Reproduction_P Parameter: Timepoint (day) Value: 10
  misc_feature: MA Experiment 20001911 PARAMETER Experiment Name: At_Drought_Reproduction_P Parameter: Tissue Value: Flowers
  misc_feature: MA Experiment 20001911 PARAMETER Experiment Name: At_Drought_Reproduction_P Parameter: Treatment Value: Drought vs. No Drought
gaaaacagtcttctcttctccgatcccaaaaacgcaggaaaacaatgtcgtttaacagctcccacctccttcctccacaagaagaccttcctctccgacacttcaccgatcaatcacagcaacctccgccgcagcgtcacttctctgaaacaccttcgcttgtcaccgccagtttcctcaacctccctaccacccttaccactgcggattccgatctcgctcctccgcaccgcaacggagacaattccgttgctgatacaaacccacgctggctctcctttcattcggagatgcaaaatactggagaagtacgttctgaagttatcgacggagtcaacgccgatggtgaaacgatactcggcgttgtaggaggtgaagattggcggagtgctagctataaggcggcgattttaagacatccgatgtacgagcagcttcttgcggctcacgtggcttgccttagggttgcgactcccgttgaccagattccgaggatcgatgctcagctcagtcagttgcataccgtcgccgcgaaatactccactcttggtgtggttgttgacaacaaggaacttgatcatttcatgtcacattatgttgtcttgttatgttcatttaaagaacaactccaacaccacgtttgtgtccatgcaatggaagccattacggcttgttgggagattgaacaatcactgcaatccctaactggagtttctccaagtgaaagtaatggtaagacaatgtcggatgatgaagatgataatcaagtagagagcgaggtgaacatgtttgatggaagtttggacggttcagattgcttgatggggtttggtcctcttgttccaaccgagagagagagatctttgatggaacgtgtgaagaaagaactgaagcatgagcttaaacagggtttcaaagagaagattgtggacataagagaagagataatgaggaagagaagggcgggaaagttgccaggagatacgacttctgtactcaaagaatggtggcgaactcactcgaaatggccatacccaactgaggaagataaggcaaaactggttcaagaaaccggtttgcagttgaaacagatcaacaattggttcatcaaccagaggaaaagaaactggaacagcaactcttccacgtcatctactctcaccaagaacaaacgtaaacggaccgggaagtcgtaggtgacatagcggctaactagaggatggttctttgccatgtgaattcttgggaaccgtatatgaaagaaacgaatccggttctatgctcgtacagagtgtgttatttgtatagtggataccggttagcctatgaaaccggattctggagtccaaattgttgtttgtaacgacttagtagtttttggaagtgatctgtttcgttggtttgcgtcttgtaacgaacgcttaagcaagtgtgggttttttcttgtaaagtgtcaatatgttcgtttgtaatgaatgtatcaagcaatatttatcataattaaactagcttgaaatgt

SEQ ID NO: 44342 - protein, 397 aa, Arabidopsis thaliana
  peptide (1)..(397): Ceres Seq. ID no. 12488866
  misc_feature (181)..(236): Pfam Name: KNOX2 domain Pfam Description: KNOX2 domain
  misc_feature (127)..(396): Homolog of NCBI NO: 4098244 NR Description: homeobox 1 protein [Lycopersicon esculentum]
  misc_feature (105)..(393): Homolog of NCBI NO: 7446245 NR Description: homeobox protein NTH23 - common tobacco
  misc_feature (31)..(393): Homolog of NCBI NO: 3023961 NR Description: Homeobox protein knotted-1 like 3 (KNAP3)
  misc_feature (101)..(392): Homolog of NCBI NO: 21539535 NR Description: KNAT3 homeodomain protein [Arabidopsis thaliana]
  misc_feature (101)..(392): Homolog of NCBI NO: 21554222 NR Description: KNAT3 homeodomain protein [Arabidopsis thaliana]
  misc_feature (101)..(392): Homolog of NCBI NO: 15238743 NR Description: KNAT3 homeodomain protein
  misc_feature (33)..(392): Homolog of NCBI NO: 30683467 NR Description: HOMEOBOX PROTEIN KNOTTED-1 LIKE 4 (KNAT4)
  misc_feature (33)..(392): Homolog of NCBI NO: 1045044 NR Description: KNAT4 homeobox protein [Arabidopsis thaliana]
  misc_feature (33)..(393): Homolog of NCBI NO: 20141566 NR Description: Homeobox protein knotted-1 like 4 (KNAT4)
  misc_feature (15)..(397): Homolog of NCBI NO: 15236649 NR Description: homeodomain containing protein 1
KQSSLLRSQKRRKTMSFNSSHLLPPQEDLPLRHFTDQSQQPPPQRHFSETPSLVTASFLNLPTTLTTADSDLAPPHRNGDNSVADTNPRWLSFHSEMQNTGEVRSEVIDGVNADGETILGVVGGEDWRSASYKAAILRHPMYEQLLAAHVACLRVATPVDQIPRIDAQLSQLHTVAAKYSTLGVVVDNKELDHFMSHYVVLLCSFKEQLQHHVCVHAMEAITACWEIEQSLQSLTGVSPSESNGKTMSDDEDDNQVESEVNMFDGSLDGSDCLMGFGPLVPTERERSLMERVKKELKHELKQGFKEKIVDIREEIMRKRRAGKLPGDTTSVLKEWWRTHSKWPYPTEEDKAKLVQETGLQLKQINNWFINQRKRNWNSNSSTSSTLTKNKRKRTGKS

SEQ ID NO: 44343 - protein, 383 aa, Arabidopsis thaliana
  peptide (1)..(383): Ceres Seq. ID no. 12488867
  misc_feature (167)..(222): Pfam Name: KNOX2 domain Pfam Description: KNOX2 domain
  misc_feature (113)..(382): Homolog of NCBI NO: 4098244 NR Description: homeobox 1 protein [Lycopersicon esculentum]
  misc_feature (91)..(379): Homolog of NCBI NO: 7446245 NR Description: homeobox protein NTH23 - common tobacco
  misc_feature (17)..(379): Homolog of NCBI NO: 3023961 NR Description: Homeobox protein knotted-1 like 3 (KNAP3)
  misc_feature (87)..(378): Homolog of NCBI NO: 21554222 NR Description: KNAT3 homeodomain protein [Arabidopsis thaliana]
  misc_feature (87)..(378): Homolog of NCBI NO: 21539535 NR Description: KNAT3 homeodomain protein [Arabidopsis thaliana]
  misc_feature (87)..(378): Homolog of NCBI NO: 15238743 NR Description: KNAT3 homeodomain protein
  misc_feature (19)..(378): Homolog of NCBI NO: 30683467 NR Description: HOMEOBOX PROTEIN KNOTTED-1 LIKE 4 (KNAT4)
  misc_feature (19)..(378): Homolog of NCBI NO: 1045044 NR Description: KNAT4 homeobox protein [Arabidopsis thaliana]
  misc_feature (19)..(379): Homolog of NCBI NO: 20141566 NR Description: Homeobox protein knotted-1 like 4 (KNAT4)
  misc_feature (1)..(383): Homolog of NCBI NO: 15236649 NR Description: homeodomain containing protein 1
MSFNSSHLLPPQEDLPLRHFTDQSQQPPPQRHFSETPSLVTASFLNLPTTLTTADSDLAPPHRNGDNSVADTNPRWLSFHSEMQNTGEVRSEVIDGVNADGETILGVVGGEDWRSASYKAAILRHPMYEQLLAAHVACLRVATPVDQIPRIDAQLSQLHTVAAKYSTLGVVVDNKELDHFMSHYVVLLCSFKEQLQHHVCVHAMEAITACWEIEQSLQSLTGVSPSESNGKTMSDDEDDNQVESEVNMFDGSLDGSDCLMGFGPLVPTERERSLMERVKKELKHELKQGFKEKIVDIREEIMRKRRAGKLPGDTTSVLKEWWRTHSKWPYPTEEDKAKLVQETGLQLKQINNWFINQRKRNWNSNSSTSSTLTKNKRKRTGKS

SEQ ID NO: 44344 - protein, 301 aa, Arabidopsis thaliana
  peptide (1)..(301): Ceres Seq. ID no. 12488868
  misc_feature (85)..(140): Pfam Name: KNOX2 domain Pfam Description: KNOX2 domain
  misc_feature (31)..(300): Homolog of NCBI NO: 4098244 NR Description: homeobox 1 protein [Lycopersicon esculentum]
  misc_feature (9)..(297): Homolog of NCBI NO: 7446245 NR Description: homeobox protein NTH23 - common tobacco
  misc_feature (1)..(297): Homolog of NCBI NO: 3023961 NR Description: Homeobox protein knotted-1 like 3 (KNAP3)
  misc_feature (5)..(296): Homolog of NCBI NO: 21554222 NR Description: KNAT3 homeodomain protein [Arabidopsis thaliana]
  misc_feature (5)..(296): Homolog of NCBI NO: 21539535 NR Description: KNAT3 homeodomain protein [Arabidopsis thaliana]
  misc_feature (5)..(296): Homolog of NCBI NO: 15238743 NR Description: KNAT3 homeodomain protein
  misc_feature (1)..(296): Homolog of NCBI NO: 30683467 NR Description: HOMEOBOX PROTEIN KNOTTED-1 LIKE 4 (KNAT4)
  misc_feature (1)..(296): Homolog of NCBI NO: 1045044 NR Description: KNAT4 homeobox protein [Arabidopsis thaliana]
  misc_feature (1)..(297): Homolog of NCBI NO: 20141566 NR Description: Homeobox protein knotted-1 like 4 (KNAT4)
  misc_feature (1)..(301): Homolog of NCBI NO: 15236649 NR Description: homeodomain containing protein 1
MQNTGEVRSEVIDGVNADGETILGVVGGEDWRSASYKAAILRHPMYEQLLAAHVACLRVATPVDQIPRIDAQLSQLHTVAAKYSTLGVVVDNKELDHFMSHYVVLLCSFKEQLQHHVCVHAMEAITACWEIEQSLQSLTGVSPSESNGKTMSDDEDDNQVESEVNMFDGSLDGSDCLMGFGPLVPTERERSLMERVKKELKHELKQGFKEKIVDIREEIMRKRRAGKLPGDTTSVLKEWWRTHSKWPYPTEEDKAKLVQETGLQLKQINNWFINQRKRNWNSNSSTSSTLTKNKRKRTGKS

SEQ ID NO: 44345 - DNA, 1212 bp, Arabidopsis thaliana
  misc_feature (1)..(1212): Ceres Seq. ID no. 12488869
  misc_feature: MA Experiment ID: 20000180 Result: Down-regulated in Transcription
  misc_feature: MA Experiment 20000180 PARAMETER Experiment Name: At_Germinating_Seeds_P Parameter: Age (hr) Value: 24 vs. 0
  misc_feature: MA Experiment 20000180 PARAMETER Experiment Name: At_Germinating_Seeds_P Parameter: Tissue Value: Germinating Seeds
  misc_feature: MA Experiment ID: 20000265 Result: Up-regulated in Transcription
  misc_feature: MA Experiment 20000265 PARAMETER Experiment Name: At_Open_Flower_P Parameter: Age (day) Value: 21
  misc_feature: MA Experiment 20000265 PARAMETER Experiment Name: At_Open_Flower_P Parameter: Plant Line Value: WS
  misc_feature: MA Experiment 20000265 PARAMETER Experiment Name: At_Open_Flower_P Parameter: Tissue Value: Closed Flower vs. Whole Plant
  misc_feature: MA Experiment ID: 20000437 Result: Up-regulated in Transcription
  misc_feature: MA Experiment 20000437 PARAMETER Experiment Name: At_Drought_P Parameter: Age (day) Value: 8
  misc_feature: MA Experiment 20000437 PARAMETER Experiment Name: At_Drought_P Parameter: Organism Value: A. thaliana
  misc_feature: MA Experiment 20000437 PARAMETER Experiment Name: At_Drought_P Parameter: Plant Line Value: WS
  misc_feature: MA Experiment 20000437 PARAMETER Experiment Name: At_Drought_P Parameter: Timepoint (hr) Value: 24
  misc_feature: MA Experiment 20000437 PARAMETER Experiment Name: At_Drought_P Parameter: Tissue Value: Whole Plant
  misc_feature: MA Experiment 20000437 PARAMETER Experiment Name: At_Drought_P Parameter: Treatment Value: Drought vs. No Drought
  misc_feature: MA Experiment ID: 20000443 Result: Up-regulated in Transcription
  misc_feature: MA Experiment 20000443 PARAMETER Experiment Name: At_1uM_BR-BRZ__P Parameter: Tissue Value: Shoot Apices
  misc_feature: MA Experiment 20000443 PARAMETER Experiment Name: At_1uM_BR-BRZ__P Parameter: Treatment Value: 1uM BRZ vs. No Treatment
  misc_feature: MA Experiment ID: 20001248 Result: Down-regulated in Transcription
  misc_feature: MA Experiment 20001248 PARAMETER Experiment Name: At_Far-red-induction_P Parameter: Age (day) Value: 7
  misc_feature: MA Experiment 20001248 PARAMETER Experiment Name: At_Far-red-induction_P Parameter: Light Value: Far-red vs. White
  misc_feature: MA Experiment 20001248 PARAMETER Experiment Name: At_Far-red-induction_P Parameter: Organism Value: A. thaliana
  misc_feature: MA Experiment 20001248 PARAMETER Experiment Name: At_Far-red-induction_P Parameter: Plant Line Value: Columbia
  misc_feature: MA Experiment 20001248 PARAMETER Experiment Name: At_Far-red-induction_P Parameter: Timepoint (hr) Value: 4
  misc_feature: MA Experiment 20001248 PARAMETER Experiment Name: At_Far-red-induction_P Parameter: Tissue Value: Whole Plant
  misc_feature: MA Experiment ID: 20001556 Result: Up-regulated in Transcription
  misc_feature: MA Experiment 20001556 PARAMETER Experiment Name: At_Drought_Soil_Dry_P Parameter: Age (day) Value: 26
  misc_feature: MA Experiment 20001556 PARAMETER Experiment Name: At_Drought_Soil_Dry_P Parameter: Organism Value: A. thaliana
  misc_feature: MA Experiment 20001556 PARAMETER Experiment Name: At_Drought_Soil_Dry_P Parameter: Plant Line Value: WS
  misc_feature: MA Experiment 20001556 PARAMETER Experiment Name: At_Drought_Soil_Dry_P Parameter: Post Timepoint (hr) Value: None
  misc_feature: MA Experiment 20001556 PARAMETER Experiment Name: At_Drought_Soil_Dry_P Parameter: Post-Treatment Value: None
  misc_feature: MA Experiment 20001556 PARAMETER Experiment Name: At_Drought_Soil_Dry_P Parameter: Timepoint (day) Value: 12
  misc_feature: MA Experiment 20001556 PARAMETER Experiment Name: At_Drought_Soil_Dry_P Parameter: Treatment Value: Drought vs. No Drought
  misc_feature: MA Experiment ID: 20001559 Result: Up-regulated in Transcription
  misc_feature: MA Experiment 20001559 PARAMETER Experiment Name: At_Drought_Soil_Dry_P Parameter: Age (day) Value: 28
  misc_feature: MA Experiment 20001559 PARAMETER Experiment Name: At_Drought_Soil_Dry_P Parameter: Organism Value: A. thaliana
  misc_feature: MA Experiment 20001559 PARAMETER Experiment Name: At_Drought_Soil_Dry_P Parameter: Plant Line Value: WS
  misc_feature: MA Experiment 20001559 PARAMETER Experiment Name: At_Drought_Soil_Dry_P Parameter: Post Timepoint (hr) Value: 29
  misc_feature: MA Experiment 20001559 PARAMETER Experiment Name: At_Drought_Soil_Dry_P Parameter: Post-Treatment Value: Re-Water vs. No Drought
  misc_feature: MA Experiment 20001559 PARAMETER Experiment Name: At_Drought_Soil_Dry_P Parameter: Timepoint (day) Value: 14
  misc_feature: MA Experiment 20001559 PARAMETER Experiment Name: At_Drought_Soil_Dry_P Parameter: Treatment Value: Drought vs. No Drought
  misc_feature: MA Experiment ID: 20001904 Result: Up-regulated in Transcription
  misc_feature: MA Experiment 20001904 PARAMETER Experiment Name: At_Drought_Reproduction_P Parameter: Age (day) Value: 37
  misc_feature: MA Experiment 20001904 PARAMETER Experiment Name: At_Drought_Reproduction_P Parameter: Organism Value: A. thaliana
  misc_feature: MA Experiment 20001904 PARAMETER Experiment Name: At_Drought_Reproduction_P Parameter: Plant Line Value: WS
  misc_feature: MA Experiment 20001904 PARAMETER Experiment Name: At_Drought_Reproduction_P Parameter: Timepoint (day) Value: 7
  misc_feature: MA Experiment 20001904 PARAMETER Experiment Name: At_Drought_Reproduction_P Parameter: Tissue Value: Rosettes
  misc_feature: MA Experiment 20001904 PARAMETER Experiment Name: At_Drought_Reproduction_P Parameter: Treatment Value: Drought vs. No Drought
  misc_feature: MA Experiment ID: 20001910 Result: Up-regulated in Transcription
  misc_feature: MA Experiment 20001910 PARAMETER Experiment Name: At_Drought_Reproduction_P Parameter: Age (day) Value: 37
  misc_feature: MA Experiment 20001910 PARAMETER Experiment Name: At_Drought_Reproduction_P Parameter: Organism Value: A. thaliana
  misc_feature: MA Experiment 20001910 PARAMETER Experiment Name: At_Drought_Reproduction_P Parameter: Plant Line Value: WS
  misc_feature: MA Experiment 20001910 PARAMETER Experiment Name: At_Drought_Reproduction_P Parameter: Timepoint (day) Value: 7
  misc_feature: MA Experiment 20001910 PARAMETER Experiment Name: At_Drought_Reproduction_P Parameter: Tissue Value: Flowers
  misc_feature: MA Experiment 20001910 PARAMETER Experiment Name: At_Drought_Reproduction_P Parameter: Treatment Value: Drought vs. No Drought
cacttcgtcaagagtcttatcatcaaacgttacgttctcgttttctcaaattccaaacaataccaagaaacctctacttgaaaagagaagattatcgccgcgtgtgtgcctaagagcgatggcgtctgagaaacaaaaacaacatgcacaacctggcaaagaacatgtcatggaatcaagcccacaattctctagctcagattaccaaccttccaacaagcttcgtggtaaggtggcgttgataactggtggagactctgggattggtcgagccgtgggatactgttttgcatccgaaggagctactgtggctttcacttacgtgaagggtcaagaagaaaaagatgcacaagagaccctacaaatgttgaaggaggtcaaaacctcggactccaaggaacctatcgccattccaacggatttaggatttgacgaaaactgcaaaagggtcgttgatgaggtcgttaatgcttttggccgcatcgatgttttgatcaataacgcagcagagcagtacgagagcagcacaatcgaagagattgatgagcctaggcttgagcgagtcttccgtacaaacatcttttcttacttctttctcacaaggcatgcgttgaagcatatgaaggaaggaagcagcattatcaacaccacttcggtgaatgcctacaagggaaacgcttcacttctcgactacaccgctacaaaaggagcgattgtggcgtttactcgaggacttgcacttcagctagctgagaaaggaatccgtgtcaatggtgtggctcctggtccaatatggacaccccttatcccagcatcattcaatgaggagaagattaagaattttgggtctgaggttccgatgaaaagagcgggtcagccaattgaagtggcaccatcctatgttttcttggcgtgtaaccactgctcttcttacttcactggtcaagttcttcaccctaatggaggagctgtggtaaatgcgtaagcgtggagtggacaagaccggtcttaacgtcttagaccattaaatatgatatgatgatgttgtttgagtttaggggctttttgttatgttggtaatgtgttacgtccgtatatgttggtaatgtgttgcgtccgtaccttctgtagcaaaagtatgtgtttaataaagactttacctcgacaatagtcggggcctgttcccttaaaactaatatagaagttttgtgc

SEQ ID NO: 44346 - protein, 327 aa, Arabidopsis thaliana
  peptide (1)..(327): Ceres Seq. ID no. 12488870
  misc_feature (40)..(327): Homolog of NCBI NO: 12322163 NR Description: dormancy related protein, putative [Arabidopsis
  misc_feature (40)..(327): Homolog of NCBI NO: 18405090 NR Description: dormancy related protein, putative; protein id:
TSSRVLSSNVTFSFSQIPNNTKKPLLEKRRLSPRVCLRAMASEKQKQHAQPGKEHVMESSPQFSSSDYQPSNKLRGKVALITGGDSGIGRAVGYCFASEGATVAFTYVKGQEEKDAQETLQMLKEVKTSDSKEPIAIPTDLGFDENCKRVVDEVVNAFGRIDVLINNAAEQYESSTIEEIDEPRLERVFRTNIFSYFFLTRHALKHMKEGSSIINTTSVNAYKGNASLLDYTATKGAIVAFTRGLALQLAEKGIRVNGVAPGPIWTPLIPASFNEEKIKNFGSEVPMKRAGQPIEVAPSYVFLACNHCSSYFTGQVLHPNGGAVVNA

SEQ ID NO: 44347 - protein, 288 aa, Arabidopsis thaliana
  peptide (1)..(288): Ceres Seq. ID no. 12488871
  misc_feature (1)..(288): Homolog of NCBI NO: 12322163 NR Description: dormancy related protein, putative [Arabidopsis
  misc_feature (1)..(288): Homolog of NCBI NO: 18405090 NR Description: dormancy related protein, putative; protein id:
MASEKQKQHAQPGKEHVMESSPQFSSSDYQPSNKLRGKVALITGGDSGIGRAVGYCFASEGATVAFTYVKGQEEKDAQETLQMLKEVKTSDSKEPIAIPTDLGFDENCKRVVDEVVNAFGRIDVLINNAAEQYESSTIEEIDEPRLERVFRTNIFSYFFLTRHALKHMKEGSSIINTTSVNAYKGNASLLDYTATKGAIVAFTRGLALQLAEKGIRVNGVAPGPIWTPLIPASFNEEKIKNFGSEVPMKRAGQPIEVAPSYVFLACNHCSSYFTGQVLHPNGGAVVNA

SEQ ID NO: 44348 - protein, 271 aa, Arabidopsis thaliana
  peptide (1)..(271): Ceres Seq. ID no. 12488872
  misc_feature (1)..(271): Homolog of NCBI NO: 12322163 NR Description: dormancy related protein, putative [Arabidopsis
  misc_feature (1)..(271): Homolog of NCBI NO: 18405090 NR Description: dormancy related protein, putative; protein id:
MESSPQFSSSDYQPSNKLRGKVALITGGDSGIGRAVGYCFASEGATVAFTYVKGQEEKDAQETLQMLKEVKTSDSKEPIAIPTDLGFDENCKRVVDEVVNAFGRIDVLINNAAEQYESSTIEEIDEPRLERVFRTNIFSYFFLTRHALKHMKEGSSIINTTSVNAYKGNASLLDYTATKGAIVAFTRGLALQLAEKGIRVNGVAPGPIWTPLIPASFNEEKIKNFGSEVPMKRAGQPIEVAPSYVFLACNHCSSYFTGQVLHPNGGAVVNA

SEQ ID NO: 44349 - DNA, 1510 bp, Arabidopsis thaliana
  misc_feature (1)..(1510): Ceres Seq. ID no. 13509710
  misc_feature: MA Experiment ID: 20000180 Result: Down-regulated in Transcription
  misc_feature: MA Experiment 20000180 PARAMETER Experiment Name: At_Germinating_Seeds_P Parameter: Age (hr) Value: 24 vs. 0
  misc_feature: MA Experiment 20000180 PARAMETER Experiment Name: At_Germinating_Seeds_P Parameter: Tissue Value: Germinating Seeds
  misc_feature: MA Experiment ID: 20000453 Result: Down-regulated in Transcription
  misc_feature: MA Experiment 20000453 PARAMETER Experiment Name: At_100uM_ABA_P Parameter: Age (day) Value: 15
  misc_feature: MA Experiment 20000453 PARAMETER Experiment Name: At_100uM_ABA_P Parameter: Organism Value: A. thaliana
  misc_feature: MA Experiment 20000453 PARAMETER Experiment Name: At_100uM_ABA_P Parameter: Plant Line Value: WS
  misc_feature: MA Experiment 20000453 PARAMETER Experiment Name: At_100uM_ABA_P Parameter: Timepoint (hr) Value: 24
  misc_feature: MA Experiment 20000453 PARAMETER Experiment Name: At_100uM_ABA_P Parameter: Tissue Value: Aerial
  misc_feature: MA Experiment 20000453 PARAMETER Experiment Name: At_100uM_ABA_P Parameter: Treatment Value: 100uM ABA vs. No Treatment
  misc_feature: MA Experiment ID: 20000573 Result: Up-regulated in Transcription
  misc_feature: MA Experiment 20000573 PARAMETER Experiment Name: At_100uM_ABA_Mutants__P Parameter: Organism Value: A. thaliana
  misc_feature: MA Experiment 20000573 PARAMETER Experiment Name: At_100uM_ABA_Mutants__P Parameter: Plant Line Value: CS22 vs. Ler wt
  misc_feature: MA Experiment 20000573 PARAMETER Experiment Name: At_100uM_ABA_Mutants__P Parameter: Timepoint (hr) Value: N/A
  misc_feature: MA Experiment 20000573 PARAMETER Experiment Name: At_100uM_ABA_Mutants__P Parameter: Tissue Value: Whole Plant
  misc_feature: MA Experiment 20000573 PARAMETER Experiment Name: At_100uM_ABA_Mutants__P Parameter: Treatment Value: None
  misc_feature: MA Experiment ID: 20000574 Result: Up-regulated in Transcription
  misc_feature: MA Experiment 20000574 PARAMETER Experiment Name: At_100uM_ABA_Mutants__P Parameter: Organism Value: A. thaliana
  misc_feature: MA Experiment 20000574 PARAMETER Experiment Name: At_100uM_ABA_Mutants__P Parameter: Plant Line Value: CS23 vs. Ler wt
  misc_feature: MA Experiment 20000574 PARAMETER Experiment Name: At_100uM_ABA_Mutants__P Parameter: Timepoint (hr) Value: N/A
  misc_feature: MA Experiment 20000574 PARAMETER Experiment Name: At_100uM_ABA_Mutants__P Parameter: Tissue Value: Whole Plant
  misc_feature: MA Experiment 20000574 PARAMETER Experiment Name: At_100uM_ABA_Mutants__P Parameter: Treatment Value: None
  misc_feature: MA Experiment ID: 20001557 Result: Up-regulated in Transcription
  misc_feature: MA Experiment 20001557 PARAMETER Experiment Name: At_Drought_Soil_Dry_P Parameter: Age (day) Value: 27
  misc_feature: MA Experiment 20001557 PARAMETER Experiment Name: At_Drought_Soil_Dry_P Parameter: Organism Value: A. thaliana
  misc_feature: MA Experiment 20001557 PARAMETER Experiment Name: At_Drought_Soil_Dry_P Parameter: Plant Line Value: WS
  misc_feature: MA Experiment 20001557 PARAMETER Experiment Name: At_Drought_Soil_Dry_P Parameter: Post Timepoint (hr) Value: 3
  misc_feature: MA Experiment 20001557 PARAMETER Experiment Name: At_Drought_Soil_Dry_P Parameter: Post-Treatment Value: Re-Water vs. No Drought
  misc_feature: MA Experiment 20001557 PARAMETER Experiment Name: At_Drought_Soil_Dry_P Parameter: Timepoint (day) Value: 13
  misc_feature: MA Experiment 20001557 PARAMETER Experiment Name: At_Drought_Soil_Dry_P Parameter: Treatment Value: Drought vs. No Drought
  misc_feature: MA Experiment ID: 20001558 Result: Up-regulated in Transcription
  misc_feature: MA Experiment 20001558 PARAMETER Experiment Name: At_Drought_Soil_Dry_P Parameter: Age (day) Value: 27
  misc_feature: MA Experiment 20001558 PARAMETER Experiment Name: At_Drought_Soil_Dry_P Parameter: Organism Value: A. thaliana
  misc_feature: MA Experiment 20001558 PARAMETER Experiment Name: At_Drought_Soil_Dry_P Parameter: Plant Line Value: WS
  misc_feature: MA Experiment 20001558 PARAMETER Experiment Name: At_Drought_Soil_Dry_P Parameter: Post Timepoint (hr) Value: 6
  misc_feature: MA Experiment 20001558 PARAMETER Experiment Name: At_Drought_Soil_Dry_P Parameter: Post-Treatment Value: Re-Water vs. No Drought
  misc_feature: MA Experiment 20001558 PARAMETER Experiment Name: At_Drought_Soil_Dry_P Parameter: Timepoint (day) Value: 13
  misc_feature: MA Experiment 20001558 PARAMETER Experiment Name: At_Drought_Soil_Dry_P Parameter: Treatment Value: Drought vs. No Drought
  misc_feature: MA Experiment ID: 20001757 Result: Up-regulated in Transcription
  misc_feature: MA Experiment 20001757 PARAMETER Experiment Name: At_50mM_NH4NO3_L-to-H_P Parameter: Timepoint (hr) Value: 6
  misc_feature: MA Experiment 20001757 PARAMETER Experiment Name: At_50mM_NH4NO3_L-to-H_P Parameter: Tissue Value: Leaf
  misc_feature: MA Experiment 20001757 PARAMETER Experiment Name: At_50mM_NH4NO3_L-to-H_P Parameter: Treatment Value: 50mM NH4NO3 vs 100mM Mannitol
aaaagaagaaaccctagtctctccgactctccgtagacgacgaagttatcttcttcaattcatcgtctcttctctgctctgctttgctctagatcacaaattaaaagacttcattagtcttcctgtctccaccattaccttcttcctttttaactcagccacgacgagcagactattgttctgttttccttgtataaaaatggcgtcgatgatgtttaccgattgctcctccaccacgacgtcgcgtctcatccatttgaaccgaagcagcggtactttcctcctccgtcaatgcgtcggccaactccgtttacagaccactgcttctggccgtggctgctgcattcgctcctcttcttctcccatttcttccatttccgctgatacaaaatcagagggtggcgcaattgtaatagatggaaaggctgtggcaaaaaagattagagatgaaatcacaattgaagtttcaagaatgaaggaatcaattggtgtgattcctggtttagcagtaatccttgttggtgacagaaaagattctgcaacttatgtgaggaacaagaagaaagcttgtgactccgttggaatcaaatcgttcgaagttcgtctagctgaagattcatcagaagaagaggtgttgaaatctgtatcaggattcaatgatgatccttctgtccatggaatccttgttcagttgcctctgccatcgcatatggatgaacagaacatactgaatgcggttagtatagagaaagatgttgacggatttcatccgctaaatattggacggcttgccatgcgtggaagagaacccttattcgttccttgtactccaaaaggatgcattgagttgttgcatagatacaacattgaaatcaaaggaaagagagcggttgttatcggaaggagtaacattgtcggtatgccagctgctcttttactgcagagggaggatgcaaccgttagcattatccattcaagaaccaagaaccctgaagaaatcacaagagaagctgatattataatctcagctgttggacagccaaacatggtcagaggaagctggataaaaccgggcgcagtcctcatcgatgttgggattaatcctgttgaggatccaagtgctgcgcgtggatatcgattggttggagacatttgctacgaggaggctagcaaagttgcatcagccatcacacctgttcctggcggtgtaggaccaatgaccatagccatgcttctatccaacactttaacatcagctaagaggattcacaacttccagtgacgtcacttaaaaagaagattgctggccttttgggaaacaaacaaatcgtactctgttttttgaagccaatgatttactttggtctttaaagaaagttatcgttttgttctatgaaacaaaacatgtagtttttaagtcacataaattgtcttcaacattgtttgtctcttcttggtattttgagtcagaactagttttaacttatcccagctatgatatatcccagcc

SEQ ID NO: 44350 - protein, 426 aa, Arabidopsis thaliana
  peptide (1)..(426): Ceres Seq. ID no. 13509711
  misc_feature (255)..(423): Pfam Name: Tetrahydrofolate dehydrogenase/cyclohydrolase, Pfam Description: Tetrahydrofolate dehydrogenase/cyclohydrolase,
  misc_feature (135)..(421): Homolog of NCBI NO: 9992889 NR Description: C1-THFS protein [Yarrowia lipolytica]
  misc_feature (135)..(421): Homolog of NCBI NO: 12083525 NR Description: similar to Pisum sativum
  misc_feature (135)..(421): Homolog of NCBI NO: 11252953 NR Description: methylenetetrahydrofolate dehydrogenase (NADP)
  misc_feature (129)..(422): Homolog of NCBI NO: 15230449 NR Description: tetrahydrofolate dehydrogenase/cyclohydrolase,
  misc_feature (129)..(422): Homolog of NCBI NO: 21553669 NR Description: 5,10-methylenetetrahydrofolate
  misc_feature (119)..(422): Homolog of NCBI NO: 30687594 NR Description: tetrahydrofolate dehydrogenase/cyclohydrolase,
  misc_feature (119)..(422): Homolog of NCBI NO: 25284864 NR Description: methylenetetrahydrofolate dehydrogenase
  misc_feature (71)..(166): Homolog of NCBI NO: 15236884 NR Description: tetrahydrofolate dehydrogenase/cyclohydrolase,
  misc_feature (172)..(426): Homolog of NCBI NO: 15236884 NR Description: tetrahydrofolate dehydrogenase/cyclohydrolase,
  misc_feature (67)..(426): Homolog of NCBI NO: 15236888 NR Description: tetrahydrofolate dehydrogenase/cyclohydrolase,
KEETLVSPTLRRRRSYLLQFIVSSLLCFALDHKLKDFISLPVSTITFFLFNSATTSRLLFCFPCIKMASMMFTDCSSTTTSRLIHLNRSSGTFLLRQCVGQLRLQTTASGRGCCIRSSSSPISSISADTKSEGGAIVIDGKAVAKKIRDEITIEVSRMKESIGVIPGLAVILVGDRKDSATYVRNKKKACDSVGIKSFEVRLAEDSSEEEVLKSVSGFNDDPSVHGILVQLPLPSHMDEQNILNAVSIEKDVDGFHPLNIGRLAMRGREPLFVPCTPKGCIELLHRYNIEIKGKRAVVIGRSNIVGMPAALLLQREDATVSIIHSRTKNPEEITREADIIISAVGQPNMVRGSWIKPGAVLIDVGINPVEDPSAARGYRLVGDICYEEASKVASAITPVPGGVGPMTIAMLLSNTLTSAKRIHNFQ

SEQ ID NO: 44351 - protein, 360 aa, Arabidopsis thaliana
  peptide (1)..(360): Ceres Seq. ID no. 13509712
  misc_feature (189)..(357): Pfam Name: Tetrahydrofolate dehydrogenase/cyclohydrolase, Pfam Description: Tetrahydrofolate dehydrogenase/cyclohydrolase,
  misc_feature (69)..(355): Homolog of NCBI NO: 9992889 NR Description: C1-THFS protein [Yarrowia lipolytica]
  misc_feature (69)..(355): Homolog of NCBI NO: 12083525 NR Description: similar to Pisum sativum
  misc_feature (69)..(355): Homolog of NCBI NO: 11252953 NR Description: methylenetetrahydrofolate dehydrogenase (NADP)
  misc_feature (63)..(356): Homolog of NCBI NO: 15230449 NR Description: tetrahydrofolate dehydrogenase/cyclohydrolase,
  misc_feature (63)..(356): Homolog of NCBI NO: 21553669 NR Description: 5,10-methylenetetrahydrofolate
  misc_feature (53)..(356): Homolog of NCBI NO: 30687594 NR Description: tetrahydrofolate dehydrogenase/cyclohydrolase,
  misc_feature (53)..(356): Homolog of NCBI NO: 25284864 NR Description: methylenetetrahydrofolate dehydrogenase
  misc_feature (5)..(100): Homolog of NCBI NO: 15236884 NR Description: tetrahydrofolate dehydrogenase/cyclohydrolase,
  misc_feature (106)..(360): Homolog of NCBI NO: 15236884 NR Description: tetrahydrofolate dehydrogenase/cyclohydrolase,
  misc_feature (1)..(360): Homolog of NCBI NO: 15236888 NR Description: tetrahydrofolate dehydrogenase/cyclohydrolase,
MASMMFTDCSSTTTSRLIHLNRSSGTFLLRQCVGQLRLQTTASGRGCCIRSSSSPISSISADTKSEGGAIVIDGKAVAKKIRDEITIEVSRMKESIGVIPGLAVILVGDRKDSATYVRNKKKACDSVGIKSFEVRLAEDSSEEEVLKSVSGFNDDPSVHGILVQLPLPSHMDEQNILNAVSIEKDVDGFHPLNIGRLAMRGREPLFVPCTPKGCIELLHRYNIEIKGKRAVVIGRSNIVGMPAALLLQREDATVSIIHSRTKNPEEITREADIIISAVGQPNMVRGSWIKPGAVLIDVGINPVEDPSAARGYRLVGDICYEEASKVASAITPVPGGVGPMTIAMLLSNTLTSAKRIHNFQ

SEQ ID NO: 44352 - protein, 357 aa, Arabidopsis thaliana
  peptide (1)..(357): Ceres Seq. ID no. 13509713
  misc_feature (186)..(354): Pfam Name: Tetrahydrofolate dehydrogenase/cyclohydrolase, Pfam Description: Tetrahydrofolate dehydrogenase/cyclohydrolase,
  misc_feature (66)..(352): Homolog of NCBI NO: 9992889 NR Description: C1-THFS protein [Yarrowia lipolytica]
  misc_feature (66)..(352): Homolog of NCBI NO: 12083525 NR Description: similar to Pisum sativum
  misc_feature (66)..(352): Homolog of NCBI NO: 11252953 NR Description: methylenetetrahydrofolate dehydrogenase (NADP)
  misc_feature (60)..(353): Homolog of NCBI NO: 15230449 NR Description: tetrahydrofolate dehydrogenase/cyclohydrolase,
  misc_feature (60)..(353): Homolog of NCBI NO: 21553669 NR Description: 5,10-methylenetetrahydrofolate
  misc_feature (50)..(353): Homolog of NCBI NO: 30687594 NR Description: tetrahydrofolate dehydrogenase/cyclohydrolase,
  misc_feature (50)..(353): Homolog of NCBI NO: 25284864 NR Description: methylenetetrahydrofolate dehydrogenase
  misc_feature (2)..(97): Homolog of NCBI NO: 15236884 NR Description: tetrahydrofolate dehydrogenase/cyclohydrolase,
  misc_feature (103)..(357): Homolog of NCBI NO: 15236884 NR Description: tetrahydrofolate dehydrogenase/cyclohydrolase,
  misc_feature (1)..(357): Homolog of NCBI NO: 15236888 NR Description: tetrahydrofolate dehydrogenase/cyclohydrolase,
MMFTDCSSTTTSRLIHLNRSSGTFLLRQCVGQLRLQTTASGRGCCIRSSSSPISSISADTKSEGGAIVIDGKAVAKKIRDEITIEVSRMKESIGVIPGLAVILVGDRKDSATYVRNKKKACDSVGIKSFEVRLAEDSSEEEVLKSVSGFNDDPSVHGILVQLPLPSHMDEQNILNAVSIEKDVDGFHPLNIGRLAMRGREPLFVPCTPKGCIELLHRYNIEIKGKRAVVIGRSNIVGMPAALLLQREDATVSIIHSRTKNPEEITREADIIISAVGQPNMVRGSWIKPGAVLIDVGINPVEDPSAARGYRLVGDICYEEASKVASAITPVPGGVGPMTIAMLLSNTLTSAKRIHNFQ

SEQ ID NO: 44353 - DNA, 845 bp, Arabidopsis thaliana
  misc_feature (1)..(845): Ceres Seq. ID no. 13503794
  misc_feature: MA Experiment ID: 20000173 Result: Down-regulated in Transcription
  misc_feature: MA Experiment 20000173 PARAMETER Experiment Name: At_42deg_Heat_P Parameter: Age (day) Value: 14
  misc_feature: MA Experiment 20000173 PARAMETER Experiment Name: At_42deg_Heat_P Parameter: Organism Value: A. thaliana
  misc_feature: MA Experiment 20000173 PARAMETER Experiment Name: At_42deg_Heat_P Parameter: Plant Line Value: WS
  misc_feature: MA Experiment 20000173 PARAMETER Experiment Name: At_42deg_Heat_P Parameter: Temperature (deg C) Value: 42 vs. 22
  misc_feature: MA Experiment 20000173 PARAMETER Experiment Name: At_42deg_Heat_P Parameter: Timepoint (hr) Value: 6
  misc_feature: MA Experiment 20000173 PARAMETER Experiment Name: At_42deg_Heat_P Parameter: Tissue Value: Aerial
  misc_feature: MA Experiment ID: 20000180 Result: Up-regulated in Transcription
  misc_feature: MA Experiment 20000180 PARAMETER Experiment Name: At_Germinating_Seeds_P Parameter: Age (hr) Value: 24 vs. 0
  misc_feature: MA Experiment 20000180 PARAMETER Experiment Name: At_Germinating_Seeds_P Parameter: Tissue Value: Germinating Seeds
  misc_feature: MA Experiment ID: 20000182 Result: Up-regulated in Transcription
  misc_feature: MA Experiment 20000182 PARAMETER Experiment Name: At_2mM_SA_P Parameter: Age (day) Value: 14
  misc_feature: MA Experiment 20000182 PARAMETER Experiment Name: At_2mM_SA_P Parameter: Organism Value: A. thaliana
  misc_feature: MA Experiment 20000182 PARAMETER Experiment Name: At_2mM_SA_P Parameter: Plant Line Value: WS
  misc_feature: MA Experiment 20000182 PARAMETER Experiment Name: At_2mM_SA_P Parameter: Timepoint (hr) Value: 6
  misc_feature: MA Experiment 20000182 PARAMETER Experiment Name: At_2mM_SA_P Parameter: Tissue Value: Aerial
  misc_feature: MA Experiment 20000182 PARAMETER Experiment Name: At_2mM_SA_P Parameter: Treatment Value: 2mM SA vs. No Treatment
  misc_feature: MA Experiment ID: 20000234 Result: Down-regulated in Transcription
  misc_feature: MA Experiment 20000234 PARAMETER Experiment Name: At_Siliques_P Parameter: Age (day) Value: 21
  misc_feature: MA Experiment 20000234 PARAMETER Experiment Name: At_Siliques_P Parameter: Organism Value: A. thaliana
  misc_feature: MA Experiment 20000234 PARAMETER Experiment Name: At_Siliques_P Parameter: Plant Line Value: WS
  misc_feature: MA Experiment 20000234 PARAMETER Experiment Name: At_Siliques_P Parameter: Tissue Value: Less Than 5mm Siliques vs. Whole Plant
  misc_feature: MA Experiment ID: 20000235 Result: Down-regulated in Transcription
  misc_feature: MA Experiment 20000235 PARAMETER Experiment Name: At_Siliques_P Parameter: Age (day) Value: 21
  misc_feature: MA Experiment 20000235 PARAMETER Experiment Name: At_Siliques_P Parameter: Organism Value: A. thaliana
  misc_feature: MA Experiment 20000235 PARAMETER Experiment Name: At_Siliques_P Parameter: Plant Line Value: WS
  misc_feature: MA Experiment 20000235 PARAMETER Experiment Name: At_Siliques_P Parameter: Tissue Value: 5-10mm Siliques vs. Whole Plant
  misc_feature: MA Experiment ID: 20000264 Result: Down-regulated in Transcription
  misc_feature: MA Experiment 20000264 PARAMETER Experiment Name: At_Open_Flower_P Parameter: Age (day) Value: 21
  misc_feature: MA Experiment 20000264 PARAMETER Experiment Name: At_Open_Flower_P Parameter: Plant Line Value: WS
  misc_feature: MA Experiment 20000264 PARAMETER Experiment Name: At_Open_Flower_P Parameter: Tissue Value: Open Flower vs. Whole Plant
  misc_feature: MA Experiment ID: 20000265 Result: Down-regulated in Transcription
  misc_feature: MA Experiment 20000265 PARAMETER Experiment Name: At_Open_Flower_P Parameter: Age (day) Value: 21
  misc_feature: MA Experiment 20000265 PARAMETER Experiment Name: At_Open_Flower_P Parameter: Plant Line Value: WS
  misc_feature: MA Experiment 20000265 PARAMETER Experiment Name: At_Open_Flower_P Parameter: Tissue Value: Closed Flower vs. Whole Plant
  misc_feature: MA Experiment ID: 20000286 Result: Down-regulated in Transcription
  misc_feature: MA Experiment 20000286 PARAMETER Experiment Name: At_Open_Flower_P Parameter: Age (day) Value: 21
  misc_feature: MA Experiment 20000286 PARAMETER Experiment Name: At_Open_Flower_P Parameter: Plant Line Value: WS
  misc_feature: MA Experiment 20000286 PARAMETER Experiment Name: At_Open_Flower_P Parameter: Tissue Value: Half Open vs. Whole Plant
  misc_feature: MA Experiment ID: 20000794 Result: Down-regulated in Transcription
  misc_feature: MA Experiment 20000794 PARAMETER Experiment Name: At_Petals_P Parameter: Age (day) Value: 23-25 days
  misc_feature: MA Experiment 20000794 PARAMETER Experiment Name: At_Petals_P Parameter: Plant Line Value: WS
  misc_feature: MA Experiment 20000794 PARAMETER Experiment Name: At_Petals_P Parameter: Tissue Value: Petals vs. Whole plant
  misc_feature: MA Experiment ID: 20001248 Result: Up-regulated in Transcription
  misc_feature: MA Experiment 20001248 PARAMETER Experiment Name: At_Far-red-induction_P Parameter: Age (day) Value: 7
  misc_feature: MA Experiment 20001248 PARAMETER Experiment Name: At_Far-red-induction_P Parameter: Light Value: Far-red vs. White
  misc_feature: MA Experiment 20001248 PARAMETER Experiment Name: At_Far-red-induction_P Parameter: Organism Value: A. thaliana
  misc_feature: MA Experiment 20001248 PARAMETER Experiment Name: At_Far-red-induction_P Parameter: Plant Line Value: Columbia
  misc_feature: MA Experiment 20001248 PARAMETER Experiment Name: At_Far-red-induction_P Parameter: Timepoint (hr) Value: 4
  misc_feature: MA Experiment 20001248 PARAMETER Experiment Name: At_Far-red-induction_P Parameter: Tissue Value: Whole Plant
  misc_feature: MA Experiment ID: 20001554 Result: Down-regulated in Transcription
  misc_feature: MA Experiment 20001554 PARAMETER Experiment Name: At_Drought_Soil_Dry_P Parameter: Age (day) Value: 21
  misc_feature: MA Experiment 20001554 PARAMETER Experiment Name: At_Drought_Soil_Dry_P Parameter: Organism Value: A. thaliana
  misc_feature: MA Experiment 20001554 PARAMETER Experiment Name: At_Drought_Soil_Dry_P Parameter: Plant Line Value: WS
  misc_feature: MA Experiment 20001554 PARAMETER Experiment Name: At_Drought_Soil_Dry_P Parameter: Post Timepoint (hr) Value: None
  misc_feature: MA Experiment 20001554 PARAMETER Experiment Name: At_Drought_Soil_Dry_P Parameter: Post-Treatment Value: None
  misc_feature: MA Experiment 20001554 PARAMETER Experiment Name: At_Drought_Soil_Dry_P Parameter: Timepoint (day) Value: 7
  misc_feature: MA Experiment 20001554 PARAMETER Experiment Name: At_Drought_Soil_Dry_P Parameter: Treatment Value: Drought vs. No Drought
  misc_feature: MA Experiment ID: 20001555 Result: Down-regulated in Transcription
  misc_feature: MA Experiment 20001555 PARAMETER Experiment Name: At_Drought_Soil_Dry_P Parameter: Age (day) Value: 24
  misc_feature: MA Experiment 20001555 PARAMETER Experiment Name: At_Drought_Soil_Dry_P Parameter: Organism Value: A. thaliana
  misc_feature: MA Experiment 20001555 PARAMETER Experiment Name: At_Drought_Soil_Dry_P Parameter: Plant Line Value: WS
  misc_feature: MA Experiment 20001555 PARAMETER Experiment Name: At_Drought_Soil_Dry_P Parameter: Post Timepoint (hr) Value: None
  misc_feature: MA Experiment 20001555 PARAMETER Experiment Name: At_Drought_Soil_Dry_P Parameter: Post-Treatment Value: None
  misc_feature: MA Experiment 20001555 PARAMETER Experiment Name: At_Drought_Soil_Dry_P Parameter: Timepoint (day) Value: 10
  misc_feature: MA Experiment 20001555 PARAMETER Experiment Name: At_Drought_Soil_Dry_P Parameter: Treatment Value: Drought vs. No Drought
  misc_feature: MA Experiment ID: 20001556 Result: Down-regulated in Transcription
  misc_feature: MA Experiment 20001556 PARAMETER Experiment Name: At_Drought_Soil_Dry_P Parameter: Age (day) Value: 26
  misc_feature: MA Experiment 20001556 PARAMETER Experiment Name: At_Drought_Soil_Dry_P Parameter: Organism Value: A. thaliana
  misc_feature: MA Experiment 20001556 PARAMETER Experiment Name: At_Drought_Soil_Dry_P Parameter: Plant Line Value: WS
  misc_feature: MA Experiment 20001556 PARAMETER Experiment Name: At_Drought_Soil_Dry_P Parameter: Post Timepoint (hr) Value: None
  misc_feature: MA Experiment 20001556 PARAMETER Experiment Name: At_Drought_Soil_Dry_P Parameter: Post-Treatment Value: None
  misc_feature: MA Experiment 20001556 PARAMETER Experiment Name: At_Drought_Soil_Dry_P Parameter: Timepoint (day) Value: 12
  misc_feature: MA Experiment 20001556 PARAMETER Experiment Name: At_Drought_Soil_Dry_P Parameter: Treatment Value: Drought vs. No Drought
  misc_feature: MA Experiment ID: 20001557 Result: Down-regulated in Transcription
  misc_feature: MA Experiment 20001557 PARAMETER Experiment Name: At_Drought_Soil_Dry_P Parameter: Age (day) Value: 27
  misc_feature: MA Experiment 20001557 PARAMETER Experiment Name: At_Drought_Soil_Dry_P Parameter: Organism Value: A. thaliana
  misc_feature: MA Experiment 20001557 PARAMETER Experiment Name: At_Drought_Soil_Dry_P Parameter: Plant Line Value: WS
  misc_feature: MA Experiment 20001557 PARAMETER Experiment Name: At_Drought_Soil_Dry_P Parameter: Post Timepoint (hr) Value: 3
  misc_feature: MA Experiment 20001557 PARAMETER Experiment Name: At_Drought_Soil_Dry_P Parameter: Post-Treatment Value: Re-Water vs. No Drought
  misc_feature: MA Experiment 20001557 PARAMETER Experiment Name: At_Drought_Soil_Dry_P Parameter: Timepoint (day) Value: 13
  misc_feature: MA Experiment 20001557 PARAMETER Experiment Name: At_Drought_Soil_Dry_P Parameter: Treatment Value: Drought vs. No Drought
  misc_feature: MA Experiment ID: 20001558 Result: Down-regulated in Transcription
  misc_feature: MA Experiment 20001558 PARAMETER Experiment Name: At_Drought_Soil_Dry_P Parameter: Age (day) Value: 27
  misc_feature: MA Experiment 20001558 PARAMETER Experiment Name: At_Drought_Soil_Dry_P Parameter: Organism Value: A. thaliana
  misc_feature: MA Experiment 20001558 PARAMETER Experiment Name: At_Drought_Soil_Dry_P Parameter: Plant Line Value: WS
  misc_feature: MA Experiment 20001558 PARAMETER Experiment Name: At_Drought_Soil_Dry_P Parameter: Post Timepoint (hr) Value: 6
  misc_feature: MA Experiment 20001558 PARAMETER Experiment Name: At_Drought_Soil_Dry_P Parameter: Post-Treatment Value: Re-Water vs. No Drought
  misc_feature: MA Experiment 20001558 PARAMETER Experiment Name: At_Drought_Soil_Dry_P Parameter: Timepoint (day) Value: 13
  misc_feature: MA Experiment 20001558 PARAMETER Experiment Name: At_Drought_Soil_Dry_P Parameter: Treatment Value: Drought vs. No Drought
  misc_feature: MA Experiment ID: 20001559 Result: Down-regulated in Transcription
  misc_feature: MA Experiment 20001559 PARAMETER Experiment Name: At_Drought_Soil_Dry_P Parameter: Age (day) Value: 28
  misc_feature: MA Experiment 20001559 PARAMETER Experiment Name: At_Drought_Soil_Dry_P Parameter: Organism Value: A. thaliana
  misc_feature: MA Experiment 20001559 PARAMETER Experiment Name: At_Drought_Soil_Dry_P Parameter: Plant Line Value: WS
  misc_feature: MA Experiment 20001559 PARAMETER Experiment Name: At_Drought_Soil_Dry_P Parameter: Post Timepoint (hr) Value: 29
  misc_feature: MA Experiment 20001559 PARAMETER Experiment Name: At_Drought_Soil_Dry_P Parameter: Post-Treatment Value: Re-Water vs. No Drought
  misc_feature: MA Experiment 20001559 PARAMETER Experiment Name: At_Drought_Soil_Dry_P Parameter: Timepoint (day) Value: 14
  misc_feature: MA Experiment 20001559 PARAMETER Experiment Name: At_Drought_Soil_Dry_P Parameter: Treatment Value: Drought vs. No Drought
  misc_feature: MA Experiment ID: 20001911 Result: Down-regulated in Transcription
  misc_feature: MA Experiment 20001911 PARAMETER Experiment Name: At_Drought_Reproduction_P Parameter: Age (day) Value: 40
  misc_feature: MA Experiment 20001911 PARAMETER Experiment Name: At_Drought_Reproduction_P Parameter: Organism Value: A. thaliana
  misc_feature: MA Experiment 20001911 PARAMETER Experiment Name: At_Drought_Reproduction_P Parameter: Plant Line Value: WS
  misc_feature: MA Experiment 20001911 PARAMETER Experiment Name: At_Drought_Reproduction_P Parameter: Timepoint (day) Value: 10
  misc_feature: MA Experiment 20001911 PARAMETER Experiment Name: At_Drought_Reproduction_P Parameter: Tissue Value: Flowers
  misc_feature: MA Experiment 20001911 PARAMETER Experiment Name: At_Drought_Reproduction_P Parameter: Treatment Value: Drought vs. No Drought
aataagaaaatcaaaatctttactcgtttgaaatttgtaatccattacctgtcatcgttgacttgtcaagaagaaacaaatcaactctaaaaagaaaaatgttgttcatcgaaatcgaagcttgacagtattcaaaatcagattcgagatgagctgcgacggaggcaaaccggcgccggcgaaactaggcgacgaacaactagcggagctccgggagatattccgatcatttgaccagaacaaggatggaagtttgacggagctcgagttaggctcacttctaagatctctcggtctaaagccgagtcaagaccaactcgacacattgatccagaaagcagatcggaataacaacggactggtcgagttctccgagttcgtcgccctcgtcgagccagatctggtcaagtgtccttacacggatgatcagcttaaagccatctttagaatgtttgaccgcgatggaaacggttacataacggcggcggagttagcccattcgatggcgaagctaggtcacgcgttgacggcggaggagttaacgggaatgatcaaagaagctgatcgagacggcgatggttgtattgatttccaagagtttgttcaagcgattacttcagctgcgtttgataatgcttggggttgaagaaagaaaggtatatatatacatagtttgaaatacttgtgttttgtttttttggcttcatcctcaaatcaaagacatttggaagtatatgtgtgtaggtgcgattccatggaaaatgtgtgttatttattgtttcatattattctttgatgaaattttgatagcttgaagagaaagctatcattgttggttttagggc

SEQ ID NO: 44354 - protein, 165 aa, Arabidopsis thaliana
  peptide (1)..(165): Ceres Seq. ID no. 13503795
  misc_feature (130)..(158): Pfam Name: EF hand Pfam Description: EF hand
  misc_feature (12)..(155): Homolog of NCBI NO: 4959163 NR Description: calmodulin mutant SYNCAM57B [synthetic construct]
  misc_feature (11)..(161): Homolog of NCBI NO: 34912426 NR Description: P0681B11.17 [Oryza sativa (japonica
  misc_feature (12)..(162): Homolog of NCBI NO: 225024 NR Description: calmodulin
  misc_feature (12)..(162): Homolog of NCBI NO: 115506 NR Description: Calmodulin
  misc_feature (15)..(161): Homolog of NCBI NO: 15221797 NR Description: calmodulin, putative [Arabidopsis thaliana]
  misc_feature (16)..(161): Homolog of NCBI NO: 28393082 NR Description: putative calmodulin [Arabidopsis thaliana]
  misc_feature (16)..(161): Homolog of NCBI NO: 15230858 NR Description: calmodulin, putative [Arabidopsis thaliana]
  misc_feature (12)..(165): Homolog of NCBI NO: 15222618 NR Description: calmodulin, putative [Arabidopsis thaliana]
  misc_feature (13)..(162): Homolog of NCBI NO: 13359053 NR Description: P0436D06.14 [Oryza sativa (japonica
  misc_feature (1)..(165): Homolog of NCBI NO: 15228441 NR Description: calmodulin, putative [Arabidopsis thaliana]
MSCDGGKPAPAKLGDEQLAELREIFRSFDQNKDGSLTELELGSLLRSLGLKPSQDQLDTLIQKADRNNNGLVEFSEFVALVEPDLVKCPYTDDQLKAIFRMFDRDGNGYITAAELAHSMAKLGHALTAEELTGMIKEADRDGDGCIDFQEFVQAITSAAFDNAWG

SEQ ID NO: 44355 - DNA, 2034 bp, Arabidopsis thaliana
  misc_feature (1)..(2034): Ceres Seq. ID no. 13509639
  misc_feature: MA Experiment ID: 108434 Result: Up-regulated in Transcription
  misc_feature: MA Experiment 108434 PARAMETER Experiment Name: At_Root_Tips_cDNA_P Parameter: Tissue Value: Root Tips
  misc_feature: MA Experiment ID: 108462 Result: Down-regulated in Transcription
  misc_feature: MA Experiment 108462 PARAMETER Experiment Name: At_Germinating_Seeds_cDNA_P Parameter: Age (day) Value: 2 vs. 0
  misc_feature: MA Experiment 108462 PARAMETER Experiment Name: At_Germinating_Seeds_cDNA_P Parameter: Tissue Value: Germinating Seeds
  misc_feature: MA Experiment ID: 108463 Result: Down-regulated in Transcription
  misc_feature: MA Experiment 108463 PARAMETER Experiment Name: At_Germinating_Seeds_cDNA_P Parameter: Age (day) Value: 3 vs. 0
  misc_feature: MA Experiment 108463 PARAMETER Experiment Name: At_Germinating_Seeds_cDNA_P Parameter: Tissue Value: Germinating Seeds
  misc_feature: MA Experiment ID: 108464 Result: Down-regulated in Transcription
  misc_feature: MA Experiment 108464 PARAMETER Experiment Name: At_Germinating_Seeds_cDNA_P Parameter: Age (day) Value: 4 vs. 0
  misc_feature: MA Experiment 108464 PARAMETER Experiment Name: At_Germinating_Seeds_cDNA_P Parameter: Tissue Value: Germinating Seeds
  misc_feature: MA Experiment ID: 108489 Result: Up-regulated in Transcription
  misc_feature: MA Experiment ID: 108561 Result: Down-regulated in Transcription
  misc_feature: MA Experiment 108561 PARAMETER Experiment Name: At_100uM_ABA_cDNA_P Parameter: Timepoint (hr) Value: 6
  misc_feature: MA Experiment 108561 PARAMETER Experiment Name: At_100uM_ABA_cDNA_P Parameter: Tissue Value: Aerial
  misc_feature: MA Experiment 108561 PARAMETER Experiment Name: At_100uM_ABA_cDNA_P Parameter: Treatment Value: 100uM ABA vs. No Treatment
  misc_feature: MA Experiment ID: 108573 Result: Down-regulated in Transcription
  misc_feature: MA Experiment 108573 PARAMETER Experiment Name: At_Drought_cDNA_P Parameter: Timepoint (hr) Value: 6
  misc_feature: MA Experiment 108573 PARAMETER Experiment Name: At_Drought_cDNA_P Parameter: Tissue Value: Aerial
  misc_feature: MA Experiment 108573 PARAMETER Experiment Name: At_Drought_cDNA_P Parameter: Treatment Value: Drought vs. No Drought
  misc_feature: MA Experiment ID: 108595 Result: Down-regulated in Transcription
  misc_feature: MA Experiment 108595 PARAMETER Experiment Name: At_Ler-pi_Ovule_cDNA_P Parameter: Plant Line Value: null
  misc_feature: MA Experiment ID: 108605 Result: Down-regulated in Transcription
  misc_feature: MA Experiment 108605 PARAMETER Experiment Name: At_100uM_ABA_cDNA_P Parameter: Timepoint (hr) Value: 6
  misc_feature: MA Experiment 108605 PARAMETER Experiment Name: At_100uM_ABA_cDNA_P Parameter: Tissue Value: Aerial
  misc_feature: MA Experiment 108605 PARAMETER Experiment Name: At_100uM_ABA_cDNA_P Parameter: Treatment Value: 100uM ABA vs. No Treatment
  misc_feature: MA Experiment ID: 108609 Result: Down-regulated in Transcription
  misc_feature: MA Experiment 108609 PARAMETER Experiment Name: At_100uM_ABA_cDNA_P Parameter: Timepoint (hr) Value: 24
  misc_feature: MA Experiment 108609 PARAMETER Experiment Name: At_100uM_ABA_cDNA_P Parameter: Tissue Value: Aerial
  misc_feature: MA Experiment 108609 PARAMETER Experiment Name: At_100uM_ABA_cDNA_P Parameter: Treatment Value: 100uM ABA vs. No Treatment
  misc_feature: MA Experiment ID: 20000069 Result: Down-regulated in Transcription
  misc_feature: MA Experiment 20000069 PARAMETER Experiment Name: At_100uM_ABA_Mutants_cDNA_P Parameter: Plant Line Value: CS23
  misc_feature: MA Experiment 20000069 PARAMETER Experiment Name: At_100uM_ABA_Mutants_cDNA_P Parameter: Timepoint (hr) Value: 6
  misc_feature: MA Experiment 20000069 PARAMETER Experiment Name: At_100uM_ABA_Mutants_cDNA_P Parameter: Tissue Value: Aerial
  misc_feature: MA Experiment 20000069 PARAMETER Experiment Name: At_100uM_ABA_Mutants_cDNA_P Parameter: Treatment Value: 100uM ABA vs. No Treatment
  misc_feature: MA Experiment ID: 20000070 Result: Down-regulated in Transcription
  misc_feature: MA Experiment 20000070 PARAMETER Experiment Name: At_100uM_ABA_Mutants_cDNA_P Parameter: Plant Line Value: CS24
  misc_feature: MA Experiment 20000070 PARAMETER Experiment Name: At_100uM_ABA_Mutants_cDNA_P Parameter: Timepoint (hr) Value: 6
  misc_feature: MA Experiment 20000070 PARAMETER Experiment Name: At_100uM_ABA_Mutants_cDNA_P Parameter: Tissue Value: Aerial
  misc_feature: MA Experiment 20000070 PARAMETER Experiment Name: At_100uM_ABA_Mutants_cDNA_P Parameter: Treatment Value: 100uM ABA vs. No Treatment
  misc_feature: MA Experiment ID: 20000071 Result: Down-regulated in Transcription
  misc_feature: MA Experiment 20000071 PARAMETER Experiment Name: At_100uM_ABA_Mutants_cDNA_P Parameter: Plant Line Value: CS8104
  misc_feature: MA Experiment 20000071 PARAMETER Experiment Name: At_100uM_ABA_Mutants_cDNA_P Parameter: Timepoint (hr) Value: 6
  misc_feature: MA Experiment 20000071 PARAMETER Experiment Name: At_100uM_ABA_Mutants_cDNA_P Parameter: Tissue Value: Aerial
  misc_feature: MA Experiment 20000071 PARAMETER Experiment Name: At_100uM_ABA_Mutants_cDNA_P Parameter: Treatment Value: 100uM ABA vs. No Treatment
  misc_feature: MA Experiment ID: 20000087 Result: Down-regulated in Transcription
  misc_feature: MA Experiment 20000087 PARAMETER Experiment Name: At_100uM_ABA_Mutants_cDNA_P Parameter: Plant Line Value: WS
  misc_feature: MA Experiment 20000087 PARAMETER Experiment Name: At_100uM_ABA_Mutants_cDNA_P Parameter: Timepoint (hr) Value: 6
  misc_feature: MA Experiment 20000087 PARAMETER Experiment Name: At_100uM_ABA_Mutants_cDNA_P Parameter: Tissue Value: Aerial
  misc_feature: MA Experiment 20000087 PARAMETER Experiment Name: At_100uM_ABA_Mutants_cDNA_P Parameter: Treatment Value: 100uM ABA vs. No Treatment
  misc_feature: MA Experiment ID: 20000093 Result: Up-regulated in Transcription
  misc_feature: MA Experiment 20000093 PARAMETER Experiment Name: At_42deg_Heat_cDNA_P Parameter: Temperature (deg C) Value: 42 vs. 22
  misc_feature: MA Experiment 20000093 PARAMETER Experiment Name: At_42deg_Heat_cDNA_P Parameter: Timepoint (hr) Value: 0.5
  misc_feature: MA Experiment 20000093 PARAMETER Experiment Name: At_42deg_Heat_cDNA_P Parameter: Tissue Value: Aerial
  misc_feature: MA Experiment ID: 20000117 Result: Down-regulated in Transcription
  misc_feature: MA Experiment 20000117 PARAMETER Experiment Name: At_100uM_ABA_Mutants_cDNA_P Parameter: Plant Line Value: Columbia
  misc_feature: MA Experiment 20000117 PARAMETER Experiment Name: At_100uM_ABA_Mutants_cDNA_P Parameter: Timepoint (hr) Value: 6
  misc_feature: MA Experiment 20000117 PARAMETER Experiment Name: At_100uM_ABA_Mutants_cDNA_P Parameter: Tissue Value: Aerial
  misc_feature: MA Experiment 20000117 PARAMETER Experiment Name: At_100uM_ABA_Mutants_cDNA_P Parameter: Treatment Value: 100uM ABA vs. No Treatment
  misc_feature: MA Experiment ID: 20000169 Result: Down-regulated in Transcription
  misc_feature: MA Experiment 20000169 PARAMETER Experiment Name: At_100uM_ABA_P Parameter: Age (day) Value: 14
  misc_feature: MA Experiment 20000169 PARAMETER Experiment Name: At_100uM_ABA_P Parameter: Organism Value: A. thaliana
  misc_feature: MA Experiment 20000169 PARAMETER Experiment Name: At_100uM_ABA_P Parameter: Plant Line Value: WS
  misc_feature: MA Experiment 20000169 PARAMETER Experiment Name: At_100uM_ABA_P Parameter: Timepoint (hr) Value: 6
  misc_feature: MA Experiment 20000169 PARAMETER Experiment Name: At_100uM_ABA_P Parameter: Tissue Value: Aerial
  misc_feature: MA Experiment 20000169 PARAMETER Experiment Name: At_100uM_ABA_P Parameter: Treatment Value: 100uM ABA vs. No Treatment
  misc_feature: MA Experiment ID: 20000185 Result: Down-regulated in Transcription
  misc_feature: MA Experiment 20000185 PARAMETER Experiment Name: At_Roots__P Parameter: Age (day) Value: 7 vs. 21
  misc_feature: MA Experiment 20000185 PARAMETER Experiment Name: At_Roots__P Parameter: Organism Value: A. thaliana
  misc_feature: MA Experiment 20000185 PARAMETER Experiment Name: At_Roots__P Parameter: Tissue Value: Roots vs. Whole Plant
  misc_feature: MA Experiment ID: 20000224 Result: Up-regulated in Transcription
  misc_feature: MA Experiment ID: 20000234 Result: Up-regulated in Transcription
  misc_feature: MA Experiment 20000234 PARAMETER Experiment Name: At_Siliques_P Parameter: Age (day) Value: 21
  misc_feature: MA Experiment 20000234 PARAMETER Experiment Name: At_Siliques_P Parameter: Organism Value: A. thaliana
  misc_feature: MA Experiment 20000234 PARAMETER Experiment Name: At_Siliques_P Parameter: Plant Line Value: WS
  misc_feature: MA Experiment 20000234 PARAMETER Experiment Name: At_Siliques_P Parameter: Tissue Value: Less Than 5mm Siliques vs. Whole Plant
  misc_feature: MA Experiment ID: 20000436 Result: Down-regulated in Transcription
  misc_feature: MA Experiment 20000436 PARAMETER Experiment Name: At_Drought_P Parameter: Age (day) Value: 7
  misc_feature: MA Experiment 20000436 PARAMETER Experiment Name: At_Drought_P Parameter: Organism Value: A. thaliana
  misc_feature: MA Experiment 20000436 PARAMETER Experiment Name: At_Drought_P Parameter: Plant Line Value: WS
  misc_feature: MA Experiment 20000436 PARAMETER Experiment Name: At_Drought_P Parameter: Timepoint (hr) Value: 12
  misc_feature: MA Experiment 20000436 PARAMETER Experiment Name: At_Drought_P Parameter: Tissue Value: Whole Plant
  misc_feature: MA Experiment 20000436 PARAMETER Experiment Name: At_Drought_P Parameter: Treatment Value: Drought vs. No Drought
  misc_feature: MA Experiment ID: 20000437 Result: Down-regulated in Transcription
  misc_feature: MA Experiment 20000437 PARAMETER Experiment Name: At_Drought_P Parameter: Age (day) Value: 8
  misc_feature: MA Experiment 20000437 PARAMETER Experiment Name: At_Drought_P Parameter: Organism Value: A. thaliana
  misc_feature: MA Experiment 20000437 PARAMETER Experiment Name: At_Drought_P Parameter: Plant Line Value: WS
  misc_feature: MA Experiment 20000437 PARAMETER Experiment Name: At_Drought_P Parameter: Timepoint (hr) Value: 24
  misc_feature: MA Experiment 20000437 PARAMETER Experiment Name: At_Drought_P Parameter: Tissue Value: Whole Plant
  misc_feature: MA Experiment 20000437 PARAMETER Experiment Name: At_Drought_P Parameter: Treatment Value: Drought vs. No Drought
  misc_feature: MA Experiment ID: 20000439 Result: Down-regulated in Transcription
  misc_feature: MA Experiment 20000439 PARAMETER Experiment Name: At_Roots__P Parameter: Age (day) Value: 14 vs. 21
  misc_feature: MA Experiment 20000439 PARAMETER Experiment Name: At_Roots__P Parameter: Organism Value: A. thaliana
  misc_feature: MA Experiment 20000439 PARAMETER Experiment Name: At_Roots__P Parameter: Tissue Value: Roots vs. Whole Plant
  misc_feature: MA Experiment ID: 20000453 Result: Down-regulated in Transcription
  misc_feature: MA Experiment 20000453 PARAMETER Experiment Name: At_100uM_ABA_P Parameter: Age (day) Value: 15
  misc_feature: MA Experiment 20000453 PARAMETER Experiment Name: At_100uM_ABA_P Parameter: Organism Value: A. thaliana
  misc_feature: MA Experiment 20000453 PARAMETER Experiment Name: At_100uM_ABA_P Parameter: Plant Line Value: WS
  misc_feature: MA Experiment 20000453 PARAMETER Experiment Name: At_100uM_ABA_P Parameter: Timepoint (hr) Value: 24
  misc_feature: MA Experiment 20000453 PARAMETER Experiment Name: At_100uM_ABA_P Parameter: Tissue Value: Aerial
  misc_feature: MA Experiment 20000453 PARAMETER Experiment Name: At_100uM_ABA_P Parameter: Treatment Value: 100uM ABA vs. No Treatment
  misc_feature: MA Experiment ID: 20000794 Result: Down-regulated in Transcription
  misc_feature: MA Experiment 20000794 PARAMETER Experiment Name: At_Petals_P Parameter: Age (day) Value: 23-25 days
  misc_feature: MA Experiment 20000794 PARAMETER Experiment Name: At_Petals_P Parameter: Plant Line Value: WS
  misc_feature: MA Experiment 20000794 PARAMETER Experiment Name: At_Petals_P Parameter: Tissue Value: Petals vs. Whole plant
  misc_feature: MA Experiment ID: 20001450 Result: Down-regulated in Transcription
  misc_feature: MA Experiment 20001450 PARAMETER Experiment Name: At_Far-red-induction_P Parameter: Age (day) Value: 7
  misc_feature: MA Experiment 20001450 PARAMETER Experiment Name: At_Far-red-induction_P Parameter: Light Value: Far-red vs. White
  misc_feature: MA Experiment 20001450 PARAMETER Experiment Name: At_Far-red-induction_P Parameter: Organism Value: A. thaliana
  misc_feature: MA Experiment 20001450 PARAMETER Experiment Name: At_Far-red-induction_P Parameter: Plant Line Value: Columbia
  misc_feature: MA Experiment 20001450 PARAMETER Experiment Name: At_Far-red-induction_P Parameter: Timepoint (hr) Value: 8
  misc_feature: MA Experiment 20001450 PARAMETER Experiment Name: At_Far-red-induction_P Parameter: Tissue Value: Whole Plant
  misc_feature: MA Experiment ID: 20001451 Result: Down-regulated in Transcription
  misc_feature: MA Experiment 20001451 PARAMETER Experiment Name: At_Far-red-induction_P Parameter: Age (day) Value: 7
  misc_feature: MA Experiment 20001451 PARAMETER Experiment Name: At_Far-red-induction_P Parameter: Light Value: Far-red vs. White
  misc_feature: MA Experiment 20001451 PARAMETER Experiment Name: At_Far-red-induction_P Parameter: Organism Value: A. thaliana
  misc_feature: MA Experiment 20001451 PARAMETER Experiment Name: At_Far-red-induction_P Parameter: Plant Line Value: Columbia
  misc_feature: MA Experiment 20001451 PARAMETER Experiment Name: At_Far-red-induction_P Parameter: Timepoint (hr) Value: 24
  misc_feature: MA Experiment 20001451 PARAMETER Experiment Name: At_Far-red-induction_P Parameter: Tissue Value: Whole Plant
  misc_feature: MA Experiment ID: 20001458 Result: Up-regulated in Transcription
  misc_feature: MA Experiment 20001458 PARAMETER Experiment Name: At_50mM_NH4NO3_L-to-H_P Parameter: Age (day) Value: Undefined
  misc_feature: MA Experiment 20001458 PARAMETER Experiment Name: At_50mM_NH4NO3_L-to-H_P Parameter: Organism Value: Undefined
  misc_feature: MA Experiment 20001458 PARAMETER Experiment Name: At_50mM_NH4NO3_L-to-H_P Parameter: Plant Line Value: Undefined
  misc_feature: MA Experiment 20001458 PARAMETER Experiment Name: At_50mM_NH4NO3_L-to-H_P Parameter: Timepoint (hr) Value: 2
  misc_feature: MA Experiment 20001458 PARAMETER Experiment Name: At_50mM_NH4NO3_L-to-H_P Parameter: Tissue Value: Siliques
  misc_feature: MA Experiment 20001458 PARAMETER Experiment Name: At_50mM_NH4NO3_L-to-H_P Parameter: Treatment Value: 50mM NH4NO3 vs. 100mM Manitol
  misc_feature: MA Experiment ID: 20001556 Result: Up-regulated in Transcription
  misc_feature: MA Experiment 20001556 PARAMETER Experiment Name: At_Drought_Soil_Dry_P Parameter: Age (day) Value: 26
  misc_feature: MA Experiment 20001556 PARAMETER Experiment Name: At_Drought_Soil_Dry_P Parameter: Organism Value: A. thaliana
  misc_feature: MA Experiment 20001556 PARAMETER Experiment Name: At_Drought_Soil_Dry_P Parameter: Plant Line Value: WS
  misc_feature: MA Experiment 20001556 PARAMETER Experiment Name: At_Drought_Soil_Dry_P Parameter: Post Timepoint (hr) Value: None
  misc_feature: MA Experiment 20001556 PARAMETER Experiment Name: At_Drought_Soil_Dry_P Parameter: Post-Treatment Value: None
  misc_feature: MA Experiment 20001556 PARAMETER Experiment Name: At_Drought_Soil_Dry_P Parameter: Timepoint (day) Value: 12
  misc_feature: MA Experiment 20001556 PARAMETER Experiment Name: At_Drought_Soil_Dry_P Parameter: Treatment Value: Drought vs. No Drought
  misc_feature: MA Experiment ID: 20001558 Result: Up-regulated in Transcription
  misc_feature: MA Experiment 20001558 PARAMETER Experiment Name: At_Drought_Soil_Dry_P Parameter: Age (day) Value: 27
  misc_feature: MA Experiment 20001558 PARAMETER Experiment Name: At_Drought_Soil_Dry_P Parameter: Organism Value: A. thaliana
  misc_feature: MA Experiment 20001558 PARAMETER Experiment Name: At_Drought_Soil_Dry_P Parameter: Plant Line Value: WS
  misc_feature: MA Experiment 20001558 PARAMETER Experiment Name: At_Drought_Soil_Dry_P Parameter: Post Timepoint (hr) Value: 6
  misc_feature: MA Experiment 20001558 PARAMETER Experiment Name: At_Drought_Soil_Dry_P Parameter: Post-Treatment Value: Re-Water vs. No Drought
  misc_feature: MA Experiment 20001558 PARAMETER Experiment Name: At_Drought_Soil_Dry_P Parameter: Timepoint (day) Value: 13
  misc_feature: MA Experiment 20001558 PARAMETER Experiment Name: At_Drought_Soil_Dry_P Parameter: Treatment Value: Drought vs. No Drought
  misc_feature: MA Experiment ID: 20001757 Result: Up-regulated in Transcription
  misc_feature: MA Experiment 20001757 PARAMETER Experiment Name: At_50mM_NH4NO3_L-to-H_P Parameter: Timepoint (hr) Value: 6
  misc_feature: MA Experiment 20001757 PARAMETER Experiment Name: At_50mM_NH4NO3_L-to-H_P Parameter: Tissue Value: Leaf
  misc_feature: MA Experiment 20001757 PARAMETER Experiment Name: At_50mM_NH4NO3_L-to-H_P Parameter: Treatment Value: 50mM NH4NO3 vs 100mM Mannitol
  misc_feature: MA Experiment ID: 20001905 Result: Down-regulated in Transcription
  misc_feature: MA Experiment 20001905 PARAMETER Experiment Name: At_Drought_Reproduction_P Parameter: Age (day) Value: 40
  misc_feature: MA Experiment 20001905 PARAMETER Experiment Name: At_Drought_Reproduction_P Parameter: Organism Value: A. thaliana
  misc_feature: MA Experiment 20001905 PARAMETER Experiment Name: At_Drought_Reproduction_P Parameter: Plant Line Value: WS
  misc_feature: MA Experiment 20001905 PARAMETER Experiment Name: At_Drought_Reproduction_P Parameter: Timepoint (day) Value: 10
  misc_feature: MA Experiment 20001905 PARAMETER Experiment Name: At_Drought_Reproduction_P Parameter: Tissue Value: Rosettes
  misc_feature: MA Experiment 20001905 PARAMETER Experiment Name: At_Drought_Reproduction_P Parameter: Treatment Value: Drought vs. No Drought
  misc_feature: MA Experiment ID: 20001906 Result: Down-regulated in Transcription
  misc_feature: MA Experiment 20001906 PARAMETER Experiment Name: At_Drought_Reproduction_P Parameter: Age (day) Value: 35
  misc_feature: MA Experiment 20001906 PARAMETER Experiment Name: At_Drought_Reproduction_P Parameter: Organism Value: A. thaliana
  misc_feature: MA Experiment 20001906 PARAMETER Experiment Name: At_Drought_Reproduction_P Parameter: Plant Line Value: WS
  misc_feature: MA Experiment 20001906 PARAMETER Experiment Name: At_Drought_Reproduction_P Parameter: Timepoint (day) Value: 5
  misc_feature: MA Experiment 20001906 PARAMETER Experiment Name: At_Drought_Reproduction_P Parameter: Tissue Value: Siliques
  misc_feature: MA Experiment 20001906 PARAMETER Experiment Name: At_Drought_Reproduction_P Parameter: Treatment Value: Drought vs. No Drought
aaaacctacttcctttccttgcttcagctccccttttcttatccggaaaccaaaaacttccggtgataaaacctccttcgtcatctctctacttcttggataaaatggcgtcaactttcactgccacatcttctattggttcaatggttgctccgaatggtcacaaatctgataagaaacttatcagcaagttgtcttcaagctcatttggaaggagacaaagtgtgtgtcctagacccagaagatccagttctgcaattgtgtgcgcagcaaaggaattacatttcaacaaagatgggactaccattaggagacttcaagctggtgtcaacaagctcgcagatcttgttggtgttacacttggacccaaaggacgaaatgttgttcttgagagcaagtatggatcaccacgaattgttaatgatggtgtgactgttgcaagagaggttgagttggaagacccggttgagaacattggcgctaagcttgtgaggcaagcggctgccaaaaccaatgacttggctggtgacggtacaacaacatctgttgttcttgcacaaggttttatcgctgagggtgtcaaggtggtagctgctggtgcaaaccctgttttgatcaccagaggtattgagaagacagcaaaggctttggttaccgagctcaagaaaatgtctaaggaggttgaagacagtgaacttgcagatgttgcagctgttagtgcgggtaacaacgacgaaattggaaatatgattgctgaagcaatgagcaaagtgggcaggaaaggtgtggtgacccttgaggagggtaaaagtgccgagaacaacctctacgtcgtagaaggaatgcaatttgaccgtggttatatctctccttactttgtgacagacagcgagaaaatgtccgtcgagttcgacaattgcaagttacttctcgttgacaagaaaattaccaatgcaagggatcttgttggtgttttggaggatgcaattagaggcggatacccaatattaattattgctgaagacattgaacaagaagctttagcgactcttgttgtaaacaagcttagaggtacactgaagatagcagctctcagagctccagggtttggagagcgcaagagccaataccttgatgatattgccattctaactggagcaactgtgatccgtgaggaagttggtctttcacttgacaaagctggaaaagaggttcttggtaatgcttcaaaggttgtcctcacaaaggagacctcgaccatagtgggtgatggaagcacacaggatgcagtgaaaaagcgtgttacacagattaaaaatcttattgagcaagcggagcaagattacgagaaggagaaactcaatgagagaattgcaaagctctctggtggagttgctgtgattcaggttggagcacaaactgagacagaactcaaagagaagaagttgagagttgaagatgctcttaatgcaacaaaggccgctgtcgaggaaggtattgttgttggtggtggttgcactctgcttcgtcttgcttccaaggttgatgccattaaagccacgcttgataatgatgaagaaaaggttggagcggatatagttaaaagagcactaagttaccccctaaaactaatcgccaagaatgctggtgttaatggaagtgtagttagcgagaaggtgctttccaacgataacgtgaaattcggttacaatgctgcaaccggcaagtacgaggatttgatggctgcaggaatcatcgatccaacaaaggttgtgagatgttgcttggaacacgcagcttcggttgcaaagactttcttgatgtcggactgcgttgttgttgagatcaaggaacctgaaccagttcccgtcggcaacccaatggacaactcaggatatggatactaagaggagataggctaatattgaaacggattactttagcttgcgagtgtaatgattttgaacaagagaatgtgtaatgtgaaactgaaattttgaattaatcatcatatgaataaatcatgattccccc

SEQ ID NO: 44356 - protein, 634 aa, Arabidopsis thaliana
  peptide (1)..(634): Ceres Seq. ID no. 13509640
  misc_feature (89)..(626): Homolog of NCBI NO: 15222666 NR Description: chaperonin, putative [Arabidopsis thaliana]
  misc_feature (136)..(634): Homolog of NCBI NO: 2493650 NR Description: RUBISCO SUBUNIT BINDING-PROTEIN BETA SUBUNIT (60
  misc_feature (35)..(633): Homolog of NCBI NO: 2506277 NR Description: RuBisCO subunit binding-protein beta subunit,
  misc_feature (35)..(634): Homolog of NCBI NO: 34897924 NR Description: ESTs C99033(E4350),C99032(E4350),D46006(S10372), correspond to a region of the predicted gene.~Similar to
  misc_feature (35)..(634): Homolog of NCBI NO: 7443855 NR Description: probable chaperonin 60 beta chain precursor,
  misc_feature (35)..(634): Homolog of NCBI NO: 30696748 NR Description: chaperonin, putative [Arabidopsis thaliana]
  misc_feature (35)..(634): Homolog of NCBI NO: 15231255 NR Description: chaperonin, putative [Arabidopsis thaliana]
  misc_feature (35)..(622): Homolog of NCBI NO: 134104 NR Description: RuBisCO subunit binding-protein beta subunit,
  misc_feature (35)..(634): Homolog of NCBI NO: 81601 NR Description: chaperonin 60 beta precursor - Arabidopsis
  misc_feature (35)..(634): Homolog of NCBI NO: 15222729 NR Description: RuBisCo subunit binding-protein beta subunit/60
  misc_feature (89)..(626): Homolog of NCBI NO: 15222666 NR Description: chaperonin, putative [Arabidopsis thaliana]
  misc_feature (136)..(634): Homolog of NCBI NO: 2493650 NR Description: RUBISCO SUBUNIT BINDING-PROTEIN BETA SUBUNIT (60
  misc_feature (35)..(633): Homolog of NCBI NO: 2506277 NR Description: RuBisCO subunit binding-protein beta subunit,
  misc_feature (35)..(634): Homolog of NCBI NO: 34897924 NR Description: ESTs C99033(E4350),C99032(E4350),D46006(S10372), correspond to a region of the predicted gene.~Similar to
  misc_feature (35)..(634): Homolog of NCBI NO: 7443855 NR Description: probable chaperonin 60 beta chain precursor,
  misc_feature (35)..(634): Homolog of NCBI NO: 30696748 NR Description: chaperonin, putative [Arabidopsis thaliana]
  misc_feature (35)..(634): Homolog of NCBI NO: 15231255 NR Description: chaperonin, putative [Arabidopsis thaliana]
  misc_feature (35)..(622): Homolog of NCBI NO: 134104 NR Description: RuBisCO subunit binding-protein beta subunit,
  misc_feature (35)..(634): Homolog of NCBI NO: 81601 NR Description: chaperonin 60 beta precursor - Arabidopsis
  misc_feature (35)..(634): Homolog of NCBI NO: 15222729 NR Description: RuBisCo subunit binding-protein beta subunit/60
NLLPFLASAPLFLSGNQKLPVIKPPSSSLYFLDKMASTFTATSSIGSMVAPNGHKSDKKLISKLSSSSFGRRQSVCPRPRRSSSAIVCAAKELHFNKDGTTIRRLQAGVNKLADLVGVTLGPKGRNVVLESKYGSPRIVNDGVTVAREVELEDPVENIGAKLVRQAAAKTNDLAGDGTTTSVVLAQGFIAEGVKVVAAGANPVLITRGIEKTAKALVTELKKMSKEVEDSELADVAAVSAGNNDEIGNMIAEAMSKVGRKGVVTLEEGKSAENNLYVVEGMQFDRGYISPYFVTDSEKMSVEFDNCKLLLVDKKITNARDLVGVLEDAIRGGYPILIIAEDIEQEALATLVVNKLRGTLKIAALRAPGFGERKSQYLDDIAILTGATVIREEVGLSLDKAGKEVLGNASKVVLTKETSTIVGDGSTQDAVKKRVTQIKNLIEQAEQDYEKEKLNERIAKLSGGVAVIQVGAQTETELKEKKLRVEDALNATKAAVEEGIVVGGGCTLLRLASKVDAIKATLDNDEEKVGADIVKRALSYPLKLIAKNAGVNGSVVSEKVLSNDNVKFGYNAATGKYEDLMAAGIIDPTKVVRCCLEHAASVAKTFLMSDCVVVEIKEPEPVPVGNPMDNSGYGY

SEQ ID NO: 44357 - protein, 600 aa, Arabidopsis thaliana
  peptide (1)..(600): Ceres Seq. ID no. 13509641
  misc_feature (55)..(592): Homolog of NCBI NO: 15222666 NR Description: chaperonin, putative [Arabidopsis thaliana]
  misc_feature (102)..(600): Homolog of NCBI NO: 2493650 NR Description: RUBISCO SUBUNIT BINDING-PROTEIN BETA SUBUNIT (60
  misc_feature (1)..(599): Homolog of NCBI NO: 2506277 NR Description: RuBisCO subunit binding-protein beta subunit,
  misc_feature (1)..(600): Homolog of NCBI NO: 34897924 NR Description: ESTs C99033(E4350),C99032(E4350),D46006(S10372), correspond to a region of the predicted gene.~Similar to
  misc_feature (1)..(600): Homolog of NCBI NO: 7443855 NR Description: probable chaperonin 60 beta chain precursor,
  misc_feature (1)..(600): Homolog of NCBI NO: 30696748 NR Description: chaperonin, putative [Arabidopsis thaliana]
  misc_feature (1)..(600): Homolog of NCBI NO: 15231255 NR Description: chaperonin, putative [Arabidopsis thaliana]
  misc_feature (1)..(588): Homolog of NCBI NO: 134104 NR Description: RuBisCO subunit binding-protein beta subunit,
  misc_feature (1)..(600): Homolog of NCBI NO: 81601 NR Description: chaperonin 60 beta precursor - Arabidopsis
  misc_feature (1)..(600): Homolog of NCBI NO: 15222729 NR Description: RuBisCo subunit binding-protein beta subunit/60
  misc_feature (55)..(592): Homolog of NCBI NO: 15222666 NR Description: chaperonin, putative [Arabidopsis thaliana]
  misc_feature (102)..(600): Homolog of NCBI NO: 2493650 NR Description: RUBISCO SUBUNIT BINDING-PROTEIN BETA SUBUNIT (60
  misc_feature (1)..(599): Homolog of NCBI NO: 2506277 NR Description: RuBisCO subunit binding-protein beta subunit,
  misc_feature (1)..(600): Homolog of NCBI NO: 34897924 NR Description: ESTs C99033(E4350),C99032(E4350),D46006(S10372), correspond to a region of the predicted gene.~Similar to
  misc_feature (1)..(600): Homolog of NCBI NO: 7443855 NR Description: probable chaperonin 60 beta chain precursor,
  misc_feature (1)..(600): Homolog of NCBI NO: 30696748 NR Description: chaperonin, putative [Arabidopsis thaliana]
  misc_feature (1)..(600): Homolog of NCBI NO: 15231255 NR Description: chaperonin, putative [Arabidopsis thaliana]
  misc_feature (1)..(588): Homolog of NCBI NO: 134104 NR Description: RuBisCO subunit binding-protein beta subunit,
  misc_feature (1)..(600): Homolog of NCBI NO: 81601 NR Description: chaperonin 60 beta precursor - Arabidopsis
  misc_feature (1)..(600): Homolog of NCBI NO: 15222729 NR Description: RuBisCo subunit binding-protein beta subunit/60
MASTFTATSSIGSMVAPNGHKSDKKLISKLSSSSFGRRQSVCPRPRRSSSAIVCAAKELHFNKDGTTIRRLQAGVNKLADLVGVTLGPKGRNVVLESKYGSPRIVNDGVTVAREVELEDPVENIGAKLVRQAAAKTNDLAGDGTTTSVVLAQGFIAEGVKVVAAGANPVLITRGIEKTAKALVTELKKMSKEVEDSELADVAAVSAGNNDEIGNMIAEAMSKVGRKGVVTLEEGKSAENNLYVVEGMQFDRGYISPYFVTDSEKMSVEFDNCKLLLVDKKITNARDLVGVLEDAIRGGYPILIIAEDIEQEALATLVVNKLRGTLKIAALRAPGFGERKSQYLDDIAILTGATVIREEVGLSLDKAGKEVLGNASKVVLTKETSTIVGDGSTQDAVKKRVTQIKNLIEQAEQDYEKEKLNERIAKLSGGVAVIQVGAQTETELKEKKLRVEDALNATKAAVEEGIVVGGGCTLLRLASKVDAIKATLDNDEEKVGADIVKRALSYPLKLIAKNAGVNGSVVSEKVLSNDNVKFGYNAATGKYEDLMAAGIIDPTKVVRCCLEHAASVAKTFLMSDCVVVEIKEPEPVPVGNPMDNSGYGY

SEQ ID NO: 44358 - protein, 587 aa, Arabidopsis thaliana
  peptide (1)..(587): Ceres Seq. ID no. 13509642
  misc_feature (42)..(579): Homolog of NCBI NO: 15222666 NR Description: chaperonin, putative [Arabidopsis thaliana]
  misc_feature (89)..(587): Homolog of NCBI NO: 2493650 NR Description: RUBISCO SUBUNIT BINDING-PROTEIN BETA SUBUNIT (60
  misc_feature (1)..(586): Homolog of NCBI NO: 2506277 NR Description: RuBisCO subunit binding-protein beta subunit,
  misc_feature (1)..(587): Homolog of NCBI NO: 34897924 NR Description: ESTs C99033(E4350),C99032(E4350),D46006(S10372), correspond to a region of the predicted gene.~Similar to
  misc_feature (1)..(587): Homolog of NCBI NO: 7443855 NR Description: probable chaperonin 60 beta chain precursor,
  misc_feature (1)..(587): Homolog of NCBI NO: 30696748 NR Description: chaperonin, putative [Arabidopsis thaliana]
  misc_feature (1)..(587): Homolog of NCBI NO: 15231255 NR Description: chaperonin, putative [Arabidopsis thaliana]
  misc_feature (1)..(575): Homolog of NCBI NO: 134104 NR Description: RuBisCO subunit binding-protein beta subunit,
  misc_feature (1)..(587): Homolog of NCBI NO: 81601 NR Description: chaperonin 60 beta precursor - Arabidopsis
  misc_feature (1)..(587): Homolog of NCBI NO: 15222729 NR Description: RuBisCo subunit binding-protein beta subunit/60
  misc_feature (42)..(579): Homolog of NCBI NO: 15222666 NR Description: chaperonin, putative [Arabidopsis thaliana]
  misc_feature (89)..(587): Homolog of NCBI NO: 2493650 NR Description: RUBISCO SUBUNIT BINDING-PROTEIN BETA SUBUNIT (60
  misc_feature (1)..(586): Homolog of NCBI NO: 2506277 NR Description: RuBisCO subunit binding-protein beta subunit,
  misc_feature (1)..(587): Homolog of NCBI NO: 34897924 NR Description: ESTs C99033(E4350),C99032(E4350),D46006(S10372), correspond to a region of the predicted gene.~Similar to
  misc_feature (1)..(587): Homolog of NCBI NO: 7443855 NR Description: probable chaperonin 60 beta chain precursor,
  misc_feature (1)..(587): Homolog of NCBI NO: 30696748 NR Description: chaperonin, putative [Arabidopsis thaliana]
  misc_feature (1)..(587): Homolog of NCBI NO: 15231255 NR Description: chaperonin, putative [Arabidopsis thaliana]
  misc_feature (1)..(575): Homolog of NCBI NO: 134104 NR Description: RuBisCO subunit binding-protein beta subunit,
  misc_feature (1)..(587): Homolog of NCBI NO: 81601 NR Description: chaperonin 60 beta precursor - Arabidopsis
  misc_feature (1)..(587): Homolog of NCBI NO: 15222729 NR Description: RuBisCo subunit binding-protein beta subunit/60
MVAPNGHKSDKKLISKLSSSSFGRRQSVCPRPRRSSSAIVCAAKELHFNKDGTTIRRLQAGVNKLADLVGVTLGPKGRNVVLESKYGSPRIVNDGVTVAREVELEDPVENIGAKLVRQAAAKTNDLAGDGTTTSVVLAQGFIAEGVKVVAAGANPVLITRGIEKTAKALVTELKKMSKEVEDSELADVAAVSAGNNDEIGNMIAEAMSKVGRKGVVTLEEGKSAENNLYVVEGMQFDRGYISPYFVTDSEKMSVEFDNCKLLLVDKKITNARDLVGVLEDAIRGGYPILIIAEDIEQEALATLVVNKLRGTLKIAALRAPGFGERKSQYLDDIAILTGATVIREEVGLSLDKAGKEVLGNASKVVLTKETSTIVGDGSTQDAVKKRVTQIKNLIEQAEQDYEKEKLNERIAKLSGGVAVIQVGAQTETELKEKKLRVEDALNATKAAVEEGIVVGGGCTLLRLASKVDAIKATLDNDEEKVGADIVKRALSYPLKLIAKNAGVNGSVVSEKVLSNDNVKFGYNAATGKYEDLMAAGIIDPTKVVRCCLEHAASVAKTFLMSDCVVVEIKEPEPVPVGNPMDNSGYGY

SEQ ID NO: 44359 - DNA, 960 bp, Arabidopsis thaliana; identical to SEQ ID NO: 24238
  misc_feature (1)..(960): Ceres Seq. ID no. 12466073
  misc_feature: MA Experiment ID: 108434 Result: Up-regulated in Transcription
  misc_feature: MA Experiment 108434 PARAMETER Experiment Name: At_Root_Tips_cDNA_P Parameter: Tissue Value: Root Tips
  misc_feature: MA Experiment ID: 108462 Result: Down-regulated in Transcription
  misc_feature: MA Experiment 108462 PARAMETER Experiment Name: At_Germinating_Seeds_cDNA_P Parameter: Age (day) Value: 2 vs. 0
  misc_feature: MA Experiment 108462 PARAMETER Experiment Name: At_Germinating_Seeds_cDNA_P Parameter: Tissue Value: Germinating Seeds
  misc_feature: MA Experiment ID: 108463 Result: Down-regulated in Transcription
  misc_feature: MA Experiment 108463 PARAMETER Experiment Name: At_Germinating_Seeds_cDNA_P Parameter: Age (day) Value: 3 vs. 0
  misc_feature: MA Experiment 108463 PARAMETER Experiment Name: At_Germinating_Seeds_cDNA_P Parameter: Tissue Value: Germinating Seeds
  misc_feature: MA Experiment ID: 108464 Result: Down-regulated in Transcription
  misc_feature: MA Experiment 108464 PARAMETER Experiment Name: At_Germinating_Seeds_cDNA_P Parameter: Age (day) Value: 4 vs. 0
  misc_feature: MA Experiment 108464 PARAMETER Experiment Name: At_Germinating_Seeds_cDNA_P Parameter: Tissue Value: Germinating Seeds
  misc_feature: MA Experiment ID: 108488 Result: Up-regulated in Transcription
  misc_feature: MA Experiment ID: 108573 Result: Down-regulated in Transcription
  misc_feature: MA Experiment 108573 PARAMETER Experiment Name: At_Drought_cDNA_P Parameter: Timepoint (hr) Value: 6
  misc_feature: MA Experiment 108573 PARAMETER Experiment Name: At_Drought_cDNA_P Parameter: Tissue Value: Aerial
  misc_feature: MA Experiment 108573 PARAMETER Experiment Name: At_Drought_cDNA_P Parameter: Treatment Value: Drought vs. No Drought
  misc_feature: MA Experiment ID: 108577 Result: Up-regulated in Transcription
  misc_feature: MA Experiment 108577 PARAMETER Experiment Name: At_42deg_Heat_cDNA_P Parameter: Temperature (deg C) Value: 42 vs. 22
  misc_feature: MA Experiment 108577 PARAMETER Experiment Name: At_42deg_Heat_cDNA_P Parameter: Timepoint (hr) Value: 6
  misc_feature: MA Experiment 108577 PARAMETER Experiment Name: At_42deg_Heat_cDNA_P Parameter: Tissue Value: Aerial
  misc_feature: MA Experiment ID: 108595 Result: Down-regulated in Transcription
  misc_feature: MA Experiment 108595 PARAMETER Experiment Name: At_Ler-pi_Ovule_cDNA_P Parameter: Plant Line Value: null
  misc_feature: MA Experiment ID: 20000069 Result: Down-regulated in Transcription
  misc_feature: MA Experiment 20000069 PARAMETER Experiment Name: At_100uM_ABA_Mutants_cDNA_P Parameter: Plant Line Value: CS23
  misc_feature: MA Experiment 20000069 PARAMETER Experiment Name: At_100uM_ABA_Mutants_cDNA_P Parameter: Timepoint (hr) Value: 6
  misc_feature: MA Experiment 20000069 PARAMETER Experiment Name: At_100uM_ABA_Mutants_cDNA_P Parameter: Tissue Value: Aerial
  misc_feature: MA Experiment 20000069 PARAMETER Experiment Name: At_100uM_ABA_Mutants_cDNA_P Parameter: Treatment Value: 100uM ABA vs. No Treatment
  misc_feature: MA Experiment ID: 20000070 Result: Down-regulated in Transcription
  misc_feature: MA Experiment 20000070 PARAMETER Experiment Name: At_100uM_ABA_Mutants_cDNA_P Parameter: Plant Line Value: CS24
  misc_feature: MA Experiment 20000070 PARAMETER Experiment Name: At_100uM_ABA_Mutants_cDNA_P Parameter: Timepoint (hr) Value: 6
  misc_feature: MA Experiment 20000070 PARAMETER Experiment Name: At_100uM_ABA_Mutants_cDNA_P Parameter: Tissue Value: Aerial
  misc_feature: MA Experiment 20000070 PARAMETER Experiment Name: At_100uM_ABA_Mutants_cDNA_P Parameter: Treatment Value: 100uM ABA vs. No Treatment
  misc_feature: MA Experiment ID: 20000071 Result: Down-regulated in Transcription
  misc_feature: MA Experiment 20000071 PARAMETER Experiment Name: At_100uM_ABA_Mutants_cDNA_P Parameter: Plant Line Value: CS8104
  misc_feature: MA Experiment 20000071 PARAMETER Experiment Name: At_100uM_ABA_Mutants_cDNA_P Parameter: Timepoint (hr) Value: 6
  misc_feature: MA Experiment 20000071 PARAMETER Experiment Name: At_100uM_ABA_Mutants_cDNA_P Parameter: Tissue Value: Aerial
  misc_feature: MA Experiment 20000071 PARAMETER Experiment Name: At_100uM_ABA_Mutants_cDNA_P Parameter: Treatment Value: 100uM ABA vs. No Treatment
  misc_feature: MA Experiment ID: 20000072 Result: Down-regulated in Transcription
  misc_feature: MA Experiment 20000072 PARAMETER Experiment Name: At_100uM_ABA_Mutants_cDNA_P Parameter: Plant Line Value: CS8105
  misc_feature: MA Experiment 20000072 PARAMETER Experiment Name: At_100uM_ABA_Mutants_cDNA_P Parameter: Timepoint (hr) Value: 6
  misc_feature: MA Experiment 20000072 PARAMETER Experiment Name: At_100uM_ABA_Mutants_cDNA_P Parameter: Tissue Value: Aerial
  misc_feature: MA Experiment 20000072 PARAMETER Experiment Name: At_100uM_ABA_Mutants_cDNA_P Parameter: Treatment Value: 100uM ABA vs. No Treatment
  misc_feature: MA Experiment ID: 20000086 Result: Down-regulated in Transcription
  misc_feature: MA Experiment 20000086 PARAMETER Experiment Name: At_100uM_ABA_Mutants_cDNA_P Parameter: Plant Line Value: CS22
  misc_feature: MA Experiment 20000086 PARAMETER Experiment Name: At_100uM_ABA_Mutants_cDNA_P Parameter: Timepoint (hr) Value: 6
  misc_feature: MA Experiment 20000086 PARAMETER Experiment Name: At_100uM_ABA_Mutants_cDNA_P Parameter: Tissue Value: Aerial
  misc_feature: MA Experiment 20000086 PARAMETER Experiment Name: At_100uM_ABA_Mutants_cDNA_P Parameter: Treatment Value: 100uM ABA vs. No Treatment
  misc_feature: MA Experiment ID: 20000087 Result: Down-regulated in Transcription
  misc_feature: MA Experiment 20000087 PARAMETER Experiment Name: At_100uM_ABA_Mutants_cDNA_P Parameter: Plant Line Value: WS
  misc_feature: MA Experiment 20000087 PARAMETER Experiment Name: At_100uM_ABA_Mutants_cDNA_P Parameter: Timepoint (hr) Value: 6
  misc_feature: MA Experiment 20000087 PARAMETER Experiment Name: At_100uM_ABA_Mutants_cDNA_P Parameter: Tissue Value: Aerial
  misc_feature: MA Experiment 20000087 PARAMETER Experiment Name: At_100uM_ABA_Mutants_cDNA_P Parameter: Treatment Value: 100uM ABA vs. No Treatment
  misc_feature: MA Experiment ID: 20000093 Result: Up-regulated in Transcription
  misc_feature: MA Experiment 20000093 PARAMETER Experiment Name: At_42deg_Heat_cDNA_P Parameter: Temperature (deg C) Value: 42 vs. 22
  misc_feature: MA Experiment 20000093 PARAMETER Experiment Name: At_42deg_Heat_cDNA_P Parameter: Timepoint (hr) Value: 0.5
  misc_feature: MA Experiment 20000093 PARAMETER Experiment Name: At_42deg_Heat_cDNA_P Parameter: Tissue Value: Aerial
  misc_feature: MA Experiment ID: 20000111 Result: Up-regulated in Transcription
  misc_feature: MA Experiment 20000111 PARAMETER Experiment Name: At_42deg_Heat_cDNA_P Parameter: Temperature (deg C) Value: 42 vs. 22
  misc_feature: MA Experiment 20000111 PARAMETER Experiment Name: At_42deg_Heat_cDNA_P Parameter: Timepoint (hr) Value: 6
  misc_feature: MA Experiment 20000111 PARAMETER Experiment Name: At_42deg_Heat_cDNA_P Parameter: Tissue Value: Aerial
  misc_feature: MA Experiment ID: 20000112 Result: Up-regulated in Transcription
  misc_feature: MA Experiment 20000112 PARAMETER Experiment Name: At_42deg_Heat_cDNA_P Parameter: Temperature (deg C) Value: 42 vs. 22
  misc_feature: MA Experiment 20000112 PARAMETER Experiment Name: At_42deg_Heat_cDNA_P Parameter: Timepoint (hr) Value: 2
  misc_feature: MA Experiment 20000112 PARAMETER Experiment Name: At_42deg_Heat_cDNA_P Parameter: Tissue Value: Aerial
  misc_feature: MA Experiment ID: 20000113 Result: Up-regulated in Transcription
  misc_feature: MA Experiment 20000113 PARAMETER Experiment Name: At_42deg_Heat_cDNA_P Parameter: Temperature (deg C) Value: 42 vs. 22
  misc_feature: MA Experiment 20000113 PARAMETER Experiment Name: At_42deg_Heat_cDNA_P Parameter: Timepoint (hr) Value: 8
  misc_feature: MA Experiment 20000113 PARAMETER Experiment Name: At_42deg_Heat_cDNA_P Parameter: Tissue Value: Aerial
  misc_feature: MA Experiment ID: 20000117 Result: Down-regulated in Transcription
  misc_feature: MA Experiment 20000117 PARAMETER Experiment Name: At_100uM_ABA_Mutants_cDNA_P Parameter: Plant Line Value: Columbia
  misc_feature: MA Experiment 20000117 PARAMETER Experiment Name: At_100uM_ABA_Mutants_cDNA_P Parameter: Timepoint (hr) Value: 6
  misc_feature: MA Experiment 20000117 PARAMETER Experiment Name: At_100uM_ABA_Mutants_cDNA_P Parameter: Tissue Value: Aerial
  misc_feature: MA Experiment 20000117 PARAMETER Experiment Name: At_100uM_ABA_Mutants_cDNA_P Parameter: Treatment Value: 100uM ABA vs. No Treatment
  misc_feature: MA Experiment ID: 20000144 Result: Up-regulated in Transcription
  misc_feature: MA Experiment 20000144 PARAMETER Experiment Name: At_42deg_Heat_cDNA_P Parameter: Temperature (deg C) Value: 42 vs. 22
  misc_feature: MA Experiment 20000144 PARAMETER Experiment Name: At_42deg_Heat_cDNA_P Parameter: Timepoint (hr) Value: 1
  misc_feature: MA Experiment 20000144 PARAMETER Experiment Name: At_42deg_Heat_cDNA_P Parameter: Tissue Value: Aerial
  misc_feature: MA Experiment ID: 20000171 Result: Up-regulated in Transcription
  misc_feature: MA Experiment 20000171 PARAMETER Experiment Name: At_42deg_Heat_P Parameter: Age (day) Value: 14
  misc_feature: MA Experiment 20000171 PARAMETER Experiment Name: At_42deg_Heat_P Parameter: Organism Value: A. thaliana
  misc_feature: MA Experiment 20000171 PARAMETER Experiment Name: At_42deg_Heat_P Parameter: Plant Line Value: WS
  misc_feature: MA Experiment 20000171 PARAMETER Experiment Name: At_42deg_Heat_P Parameter: Temperature (deg C) Value: 42 vs. 22
  misc_feature: MA Experiment 20000171 PARAMETER Experiment Name: At_42deg_Heat_P Parameter: Timepoint (hr) Value: 1
  misc_feature: MA Experiment 20000171 PARAMETER Experiment Name: At_42deg_Heat_P Parameter: Tissue Value: Aerial
  misc_feature: MA Experiment ID: 20000173 Result: Up-regulated in Transcription
  misc_feature: MA Experiment 20000173 PARAMETER Experiment Name: At_42deg_Heat_P Parameter: Age (day) Value: 14
  misc_feature: MA Experiment 20000173 PARAMETER Experiment Name: At_42deg_Heat_P Parameter: Organism Value: A. thaliana
  misc_feature: MA Experiment 20000173 PARAMETER Experiment Name: At_42deg_Heat_P Parameter: Plant Line Value: WS
  misc_feature: MA Experiment 20000173 PARAMETER Experiment Name: At_42deg_Heat_P Parameter: Temperature (deg C) Value: 42 vs. 22
  misc_feature: MA Experiment 20000173 PARAMETER Experiment Name: At_42deg_Heat_P Parameter: Timepoint (hr) Value: 6
  misc_feature: MA Experiment 20000173 PARAMETER Experiment Name: At_42deg_Heat_P Parameter: Tissue Value: Aerial
  misc_feature: MA Experiment ID: 20000234 Result: Up-regulated in Transcription
  misc_feature: MA Experiment 20000234 PARAMETER Experiment Name: At_Siliques_P Parameter: Age (day) Value: 21
  misc_feature: MA Experiment 20000234 PARAMETER Experiment Name: At_Siliques_P Parameter: Organism Value: A. thaliana
  misc_feature: MA Experiment 20000234 PARAMETER Experiment Name: At_Siliques_P Parameter: Plant Line Value: WS
  misc_feature: MA Experiment 20000234 PARAMETER Experiment Name: At_Siliques_P Parameter: Tissue Value: Less Than 5mm Siliques vs. Whole Plant
  misc_feature: MA Experiment ID: 20000437 Result: Down-regulated in Transcription
  misc_feature: MA Experiment 20000437 PARAMETER Experiment Name: At_Drought_P Parameter: Age (day) Value: 8
  misc_feature: MA Experiment 20000437 PARAMETER Experiment Name: At_Drought_P Parameter: Organism Value: A. thaliana
  misc_feature: MA Experiment 20000437 PARAMETER Experiment Name: At_Drought_P Parameter: Plant Line Value: WS
  misc_feature: MA Experiment 20000437 PARAMETER Experiment Name: At_Drought_P Parameter: Timepoint (hr) Value: 24
  misc_feature: MA Experiment 20000437 PARAMETER Experiment Name: At_Drought_P Parameter: Tissue Value: Whole Plant
  misc_feature: MA Experiment 20000437 PARAMETER Experiment Name: At_Drought_P Parameter: Treatment Value: Drought vs. No Drought
  misc_feature: MA Experiment ID: 20000794 Result: Down-regulated in Transcription
  misc_feature: MA Experiment 20000794 PARAMETER Experiment Name: At_Petals_P Parameter: Age (day) Value: 23-25 days
  misc_feature: MA Experiment 20000794 PARAMETER Experiment Name: At_Petals_P Parameter: Plant Line Value: WS
  misc_feature: MA Experiment 20000794 PARAMETER Experiment Name: At_Petals_P Parameter: Tissue Value: Petals vs. Whole plant
  misc_feature: MA Experiment ID: 20001248 Result: Down-regulated in Transcription
  misc_feature: MA Experiment 20001248 PARAMETER Experiment Name: At_Far-red-induction_P Parameter: Age (day) Value: 7
  misc_feature: MA Experiment 20001248 PARAMETER Experiment Name: At_Far-red-induction_P Parameter: Light Value: Far-red vs. White
  misc_feature: MA Experiment 20001248 PARAMETER Experiment Name: At_Far-red-induction_P Parameter: Organism Value: A. thaliana
  misc_feature: MA Experiment 20001248 PARAMETER Experiment Name: At_Far-red-induction_P Parameter: Plant Line Value: Columbia
  misc_feature: MA Experiment 20001248 PARAMETER Experiment Name: At_Far-red-induction_P Parameter: Timepoint (hr) Value: 4
  misc_feature: MA Experiment 20001248 PARAMETER Experiment Name: At_Far-red-induction_P Parameter: Tissue Value: Whole Plant
  misc_feature: MA Experiment ID: 20001450 Result: Down-regulated in Transcription
  misc_feature: MA Experiment 20001450 PARAMETER Experiment Name: At_Far-red-induction_P Parameter: Age (day) Value: 7
  misc_feature: MA Experiment 20001450 PARAMETER Experiment Name: At_Far-red-induction_P Parameter: Light Value: Far-red vs. White
  misc_feature: MA Experiment 20001450 PARAMETER Experiment Name: At_Far-red-induction_P Parameter: Organism Value: A. thaliana
  misc_feature: MA Experiment 20001450 PARAMETER Experiment Name: At_Far-red-induction_P Parameter: Plant Line Value: Columbia
  misc_feature: MA Experiment 20001450 PARAMETER Experiment Name: At_Far-red-induction_P Parameter: Timepoint (hr) Value: 8
  misc_feature: MA Experiment 20001450 PARAMETER Experiment Name: At_Far-red-induction_P Parameter: Tissue Value: Whole Plant
  misc_feature: MA Experiment ID: 20001451 Result: Down-regulated in Transcription
  misc_feature: MA Experiment 20001451 PARAMETER Experiment Name: At_Far-red-induction_P Parameter: Age (day) Value: 7
  misc_feature: MA Experiment 20001451 PARAMETER Experiment Name: At_Far-red-induction_P Parameter: Light Value: Far-red vs. White
  misc_feature: MA Experiment 20001451 PARAMETER Experiment Name: At_Far-red-induction_P Parameter: Organism Value: A. thaliana
  misc_feature: MA Experiment 20001451 PARAMETER Experiment Name: At_Far-red-induction_P Parameter: Plant Line Value: Columbia
  misc_feature: MA Experiment 20001451 PARAMETER Experiment Name: At_Far-red-induction_P Parameter: Timepoint (hr) Value: 24
  misc_feature: MA Experiment 20001451 PARAMETER Experiment Name: At_Far-red-induction_P Parameter: Tissue Value: Whole Plant
  misc_feature: MA Experiment ID: 20001558 Result: Up-regulated in Transcription
  misc_feature: MA Experiment 20001558 PARAMETER Experiment Name: At_Drought_Soil_Dry_P Parameter: Age (day) Value: 27
  misc_feature: MA Experiment 20001558 PARAMETER Experiment Name: At_Drought_Soil_Dry_P Parameter: Organism Value: A. thaliana
  misc_feature: MA Experiment 20001558 PARAMETER Experiment Name: At_Drought_Soil_Dry_P Parameter: Plant Line Value: WS
  misc_feature: MA Experiment 20001558 PARAMETER Experiment Name: At_Drought_Soil_Dry_P Parameter: Post Timepoint (hr) Value: 6
  misc_feature: MA Experiment 20001558 PARAMETER Experiment Name: At_Drought_Soil_Dry_P Parameter: Post-Treatment Value: Re-Water vs. No Drought
  misc_feature: MA Experiment 20001558 PARAMETER Experiment Name: At_Drought_Soil_Dry_P Parameter: Timepoint (day) Value: 13
  misc_feature: MA Experiment 20001558 PARAMETER Experiment Name: At_Drought_Soil_Dry_P Parameter: Treatment Value: Drought vs. No Drought
  misc_feature: MA Experiment ID: 20001560 Result: Up-regulated in Transcription
  misc_feature: MA Experiment 20001560 PARAMETER Experiment Name: At_Drought_Soil_Dry_P Parameter: Age (day) Value: 28
  misc_feature: MA Experiment 20001560 PARAMETER Experiment Name: At_Drought_Soil_Dry_P Parameter: Organism Value: A. thaliana
  misc_feature: MA Experiment 20001560 PARAMETER Experiment Name: At_Drought_Soil_Dry_P Parameter: Plant Line Value: WS
  misc_feature: MA Experiment 20001560 PARAMETER Experiment Name: At_Drought_Soil_Dry_P Parameter: Post Timepoint (hr) Value: None
  misc_feature: MA Experiment 20001560 PARAMETER Experiment Name: At_Drought_Soil_Dry_P Parameter: Post-Treatment Value: None
  misc_feature: MA Experiment 20001560 PARAMETER Experiment Name: At_Drought_Soil_Dry_P Parameter: Timepoint (day) Value: 14
  misc_feature: MA Experiment 20001560 PARAMETER Experiment Name: At_Drought_Soil_Dry_P Parameter: Treatment Value: Drought vs. No Drought
  misc_feature: MA Experiment ID: 20001905 Result: Down-regulated in Transcription
  misc_feature: MA Experiment 20001905 PARAMETER Experiment Name: At_Drought_Reproduction_P Parameter: Age (day) Value: 40
  misc_feature: MA Experiment 20001905 PARAMETER Experiment Name: At_Drought_Reproduction_P Parameter: Organism Value: A. thaliana
  misc_feature: MA Experiment 20001905 PARAMETER Experiment Name: At_Drought_Reproduction_P Parameter: Plant Line Value: WS
  misc_feature: MA Experiment 20001905 PARAMETER Experiment Name: At_Drought_Reproduction_P Parameter: Timepoint (day) Value: 10
  misc_feature: MA Experiment 20001905 PARAMETER Experiment Name: At_Drought_Reproduction_P Parameter: Tissue Value: Rosettes
  misc_feature: MA Experiment 20001905 PARAMETER Experiment Name: At_Drought_Reproduction_P Parameter: Treatment Value: Drought vs. No Drought

SEQ ID NO: 44360 - protein, 253 aa, Arabidopsis thaliana; identical to SEQ ID NO: 24239
  peptide (1)..(253): Ceres Seq. ID no. 12466074
  misc_feature (158)..(253): Pfam Name: Chaperonin 10 Kd subunit Pfam Description: Chaperonin 10 Kd subunit
  misc_feature (158)..(253): Pfam Name: Chaperonin 10 Kd subunit Pfam Description: Chaperonin 10 Kd subunit
  misc_feature (61)..(153): Homolog of NCBI NO: 23474135 NR Description: hypothetical protein [Desulfovibrio desulfuricans
  misc_feature (154)..(253): Homolog of NCBI NO: 11467285 NR Description: GroES [Cyanophora paradoxa]
  misc_feature (62)..(153): Homolog of NCBI NO: 2493659 NR Description: 10 kDa chaperonin (Protein Cpn10) (groES protein)
  misc_feature (159)..(253): Homolog of NCBI NO: 3599923 NR Description: GroES/HSP10 homolog [Lawsonia intracellularis]
  misc_feature (157)..(252): Homolog of NCBI NO: 22297730 NR Description: 10kD chaperonin [Thermosynechococcus elongatus
  misc_feature (1)..(253): Homolog of NCBI NO: 25453528 NR Description: chaperonin 10 [imported] - Arabidopsis thaliana
  misc_feature (154)..(253): Homolog of NCBI NO: 11467285 NR Description: GroES [Cyanophora paradoxa]
  misc_feature (1)..(253): Homolog of NCBI NO: 21780187 NR Description: cp10-like protein [Gossypium hirsutum]
  misc_feature (1)..(253): Homolog of NCBI NO: 7331143 NR Description: chaperonin 21 precursor [Lycopersicon esculentum]
  misc_feature (1)..(253): Homolog of NCBI NO: 399241 NR Description: 20 kDa chaperonin, chloroplast precursor (Protein (Chloroplast protein Cpn10) (Chloroplast chaperonin 10)
  misc_feature (157)..(252): Homolog of NCBI NO: 22297730 NR Description: 10kD chaperonin [Thermosynechococcus elongatus
  misc_feature (159)..(253): Homolog of NCBI NO: 3599923 NR Description: GroES/HSP10 homolog [Lawsonia intracellularis]
  misc_feature (62)..(153): Homolog of NCBI NO: 2493659 NR Description: 10 kDa chaperonin (Protein Cpn10) (groES protein)
  misc_feature (61)..(153): Homolog of NCBI NO: 23474135 NR Description: hypothetical protein [Desulfovibrio desulfuricans
  misc_feature (1)..(253): Homolog of NCBI NO: 15242045 NR Description: chloroplast Cpn21 protein
  misc_feature (1)..(253): Homolog of NCBI NO: 399241 NR Description: 20 kDa chaperonin, chloroplast precursor (Protein (Chloroplast protein Cpn10) (Chloroplast chaperonin 10)
  misc_feature (1)..(253): Homolog of NCBI NO: 7331143 NR Description: chaperonin 21 precursor [Lycopersicon esculentum]
  misc_feature (1)..(253): Homolog of NCBI NO: 21780187 NR Description: cp10-like protein [Gossypium hirsutum]
  misc_feature (1)..(253): Homolog of NCBI NO: 25453528 NR Description: chaperonin 10 [imported] - Arabidopsis thaliana
  misc_feature (1)..(253): Homolog of NCBI NO: 15242045 NR Description: chloroplast Cpn21 protein

SEQ ID NO: 44361 - protein, 241 aa, Arabidopsis thaliana; identical to SEQ ID NO: 24240
  peptide (1)..(241): Ceres Seq. ID no. 12466075
  misc_feature (146)..(241): Pfam Name: Chaperonin 10 Kd subunit Pfam Description: Chaperonin 10 Kd subunit
  misc_feature (146)..(241): Pfam Name: Chaperonin 10 Kd subunit Pfam Description: Chaperonin 10 Kd subunit
  misc_feature (49)..(141): Homolog of NCBI NO: 23474135 NR Description: hypothetical protein [Desulfovibrio desulfuricans
  misc_feature (142)..(241): Homolog of NCBI NO: 11467285 NR Description: GroES [Cyanophora paradoxa]
  misc_feature (50)..(141): Homolog of NCBI NO: 2493659 NR Description: 10 kDa chaperonin (Protein Cpn10) (groES protein)
  misc_feature (147)..(241): Homolog of NCBI NO: 3599923 NR Description: GroES/HSP10 homolog [Lawsonia intracellularis]
  misc_feature (145)..(240): Homolog of NCBI NO: 22297730 NR Description: 10kD chaperonin [Thermosynechococcus elongatus
  misc_feature (49)..(141): Homolog of NCBI NO: 23474135 NR Description: hypothetical protein [Desulfovibrio desulfuricans
  misc_feature (50)..(141): Homolog of NCBI NO: 2493659 NR Description: 10 kDa chaperonin (Protein Cpn10) (groES protein)
  misc_feature (145)..(240): Homolog of NCBI NO: 22297730 NR Description: 10kD chaperonin [Thermosynechococcus elongatus
  misc_feature (1)..(241): Homolog of NCBI NO: 15242045 NR Description: chloroplast Cpn21 protein
  misc_feature (1)..(241): Homolog of NCBI NO: 25453528 NR Description: chaperonin 10 [imported] - Arabidopsis thaliana
  misc_feature (1)..(241): Homolog of NCBI NO: 21780187 NR Description: cp10-like protein [Gossypium hirsutum]
  misc_feature (1)..(241): Homolog of NCBI NO: 7331143 NR Description: chaperonin 21 precursor [Lycopersicon esculentum]
  misc_feature (1)..(241): Homolog of NCBI NO: 399241 NR Description: 20 kDa chaperonin, chloroplast precursor (Protein (Chloroplast protein Cpn10) (Chloroplast chaperonin 10)
  misc_feature (147)..(241): Homolog of NCBI NO: 3599923 NR Description: GroES/HSP10 homolog [Lawsonia intracellularis]
  misc_feature (142)..(241): Homolog of NCBI NO: 11467285 NR Description: GroES [Cyanophora paradoxa]
  misc_feature (1)..(241): Homolog of NCBI NO: 399241 NR Description: 20 kDa chaperonin, chloroplast precursor (Protein (Chloroplast protein Cpn10) (Chloroplast chaperonin 10)
  misc_feature (1)..(241): Homolog of NCBI NO: 7331143 NR Description: chaperonin 21 precursor [Lycopersicon esculentum]
  misc_feature (1)..(241): Homolog of NCBI NO: 21780187 NR Description: cp10-like protein [Gossypium hirsutum]
  misc_feature (1)..(241): Homolog of NCBI NO: 25453528 NR Description: chaperonin 10 [imported] - Arabidopsis thaliana
  misc_feature (1)..(241): Homolog of NCBI NO: 15242045 NR Description: chloroplast Cpn21 protein

SEQ ID NO: 44362 - DNA, 2194 bp, Arabidopsis thaliana
  misc_feature (1)..(2194): Ceres Seq. ID no. 13509478
  misc_feature: MA Experiment ID: 20000179 Result: Up-regulated in Transcription
  misc_feature: MA Experiment 20000179 PARAMETER Experiment Name: At_Germinating_Seeds_P Parameter: Age (hr) Value: 6 vs. 0
  misc_feature: MA Experiment 20000179 PARAMETER Experiment Name: At_Germinating_Seeds_P Parameter: Tissue Value: Germinating Seeds
  misc_feature: MA Experiment ID: 20000180 Result: Up-regulated in Transcription
  misc_feature: MA Experiment 20000180 PARAMETER Experiment Name: At_Germinating_Seeds_P Parameter: Age (hr) Value: 24 vs. 0
  misc_feature: MA Experiment 20000180 PARAMETER Experiment Name: At_Germinating_Seeds_P Parameter: Tissue Value: Germinating Seeds
  misc_feature: MA Experiment ID: 20001247 Result: Up-regulated in Transcription
  misc_feature: MA Experiment 20001247 PARAMETER Experiment Name: At_Far-red-induction_P Parameter: Age (day) Value: 7
  misc_feature: MA Experiment 20001247 PARAMETER Experiment Name: At_Far-red-induction_P Parameter: Light Value: Far-red vs. White
  misc_feature: MA Experiment 20001247 PARAMETER Experiment Name: At_Far-red-induction_P Parameter: Organism Value: A. thaliana
  misc_feature: MA Experiment 20001247 PARAMETER Experiment Name: At_Far-red-induction_P Parameter: Plant Line Value: Columbia
  misc_feature: MA Experiment 20001247 PARAMETER Experiment Name: At_Far-red-induction_P Parameter: Timepoint (hr) Value: 1
  misc_feature: MA Experiment 20001247 PARAMETER Experiment Name: At_Far-red-induction_P Parameter: Tissue Value: Whole Plant
  misc_feature: MA Experiment ID: 20001557 Result: Up-regulated in Transcription
  misc_feature: MA Experiment 20001557 PARAMETER Experiment Name: At_Drought_Soil_Dry_P Parameter: Age (day) Value: 27
  misc_feature: MA Experiment 20001557 PARAMETER Experiment Name: At_Drought_Soil_Dry_P Parameter: Organism Value: A. thaliana
  misc_feature: MA Experiment 20001557 PARAMETER Experiment Name: At_Drought_Soil_Dry_P Parameter: Plant Line Value: WS
  misc_feature: MA Experiment 20001557 PARAMETER Experiment Name: At_Drought_Soil_Dry_P Parameter: Post Timepoint (hr) Value: 3
  misc_feature: MA Experiment 20001557 PARAMETER Experiment Name: At_Drought_Soil_Dry_P Parameter: Post-Treatment Value: Re-Water vs. No Drought
  misc_feature: MA Experiment 20001557 PARAMETER Experiment Name: At_Drought_Soil_Dry_P Parameter: Timepoint (day) Value: 13
  misc_feature: MA Experiment 20001557 PARAMETER Experiment Name: At_Drought_Soil_Dry_P Parameter: Treatment Value: Drought vs. No Drought
  misc_feature: MA Experiment ID: 20001558 Result: Up-regulated in Transcription
  misc_feature: MA Experiment 20001558 PARAMETER Experiment Name: At_Drought_Soil_Dry_P Parameter: Age (day) Value: 27
  misc_feature: MA Experiment 20001558 PARAMETER Experiment Name: At_Drought_Soil_Dry_P Parameter: Organism Value: A. thaliana
  misc_feature: MA Experiment 20001558 PARAMETER Experiment Name: At_Drought_Soil_Dry_P Parameter: Plant Line Value: WS
  misc_feature: MA Experiment 20001558 PARAMETER Experiment Name: At_Drought_Soil_Dry_P Parameter: Post Timepoint (hr) Value: 6
  misc_feature: MA Experiment 20001558 PARAMETER Experiment Name: At_Drought_Soil_Dry_P Parameter: Post-Treatment Value: Re-Water vs. No Drought
  misc_feature: MA Experiment 20001558 PARAMETER Experiment Name: At_Drought_Soil_Dry_P Parameter: Timepoint (day) Value: 13
  misc_feature: MA Experiment 20001558 PARAMETER Experiment Name: At_Drought_Soil_Dry_P Parameter: Treatment Value: Drought vs. No Drought
aaccctaaaataaaagattctaacaccaaaagagagaagcaaatctcaaattcttcccctattattatatgtgactgttgttgtttttctctcttttaccatctttggcctgaagaaaaaaaaaaggaatccttcttaatggatttggtaaatcaattaagaaagcattacacaaaataaaaaaggaaagttttttaataagcttcattgagagagagatatagagagagaaaagagagagaggccatattttgataagagaagaagaacccttatagagaaagagaaagagagagacagagagagtggatggatgtcttatagaatgaacaaaacatcctctgtttctcttgtccttgtccctttttccagatcttaaggttttccacattttatcatctgggtcctctccttaatgatttgaagacactcaattcctatttgatcggggactagaatttggattctgtttcagacaaaagtagatttccctgtctctttcccgtttgattttcaataagatgaatccggaggagcaaaagatggaatctgcatcggatctgggcaagctcttcattggcgggatttcatgggacacagatgaagaacgactgcaagagtattttggcaagtatggagatttggttgaagctgtgatcatgagagaccgtactaccggacgtgcccgtggctttgggtttatcgtttttgcagatccttctgttgccgagagagtcatcatggacaaacacatcattgatggccgcacggtcgaggcgaagaaagctgtcccgcgggatgatcagcaagtgctaaaacgacacgccagtccaatgcaccttatctcacctagccatggtggtaatggtggtggagcacggacaaagaagatctttgttggaggtttaccgtctagcattactgaggccgagttcaagaactactttgatcagtttggtacaattgctgatgttgtggtaatgtatgatcataatacacagaggccaagaggctttggcttcatcacttttgattccgaagagtctgttgatatggttctccacaagacctttcatgagctaaacggaaaaatggttgaggttaaaagagcagtgccaaaggagctctcctcgactactcctaaccgaagcccacttattgggtatggtaacaactatggagtagtccctaataggtcttctgctaatagctacttcaatagttttcctcctggttataataataataatctaggctctgctggccggtttagtcctattggtagcggtagaaatgctttctctagcttcgggctcggattgaatcaagaactgaatttgaattcaaactttgatggaaacactcttgggtatagccggatccctggcaaccaatacttcaacagtgcttcaccaaaccgttacaactctccaattgggtacaacagaggagactctgcttacaacccgagcaacagagacttgtggggaaacagaagcgattcctctggtccaggttggaacttgggagtttcggttggtaacaacagaggaaactggggactttcttctgtggtgagcgataacaatggctatggaagaagctatggggctggttctggactttcggggttatcattcgcgggtaatacaaacggttttgatggctctataggggaattgtatagaggcagctcagtttatagcgactcaacatggcagcagtcaatgcctcatcatcagtcttctaatgagttagacggcttgtctcgctcttatggctttggtattgacaatgtaggctcagacccatcagccaatgcctcagaaggatactccggaaactacaatgtcggaaatagacaaacacatagaggtattgaagcatagaaagaaatcgacgaagagaagtgagaattgtagatcaagaagaacagccatttccgttgcagagtttgaagagttgttatttcgatatcaagtagagaaagaaaccaactttcttcatcacagtgagtttcttgttttgtttttttcgtcgttagcatcacaaacacaaaaaagagaagtttatttttactttaaaaattcttacataagataagatcagattggtagctgcaaagatacaacatggatgataaaaaaagatttggtttcgtctccatagcaataaccagagatcgttgattctc

SEQ ID NO: 44363 - protein, 455 aa, Arabidopsis thaliana
  peptide (1)..(455): Ceres Seq. ID no. 13509479
  misc_feature (124)..(194): Pfam Name: RNA recognition motif. (a.k.a. RRM, RBD, or RNP domain) Pfam Description: RNA recognition motif. (a.k.a. RRM, RBD, or RNP
  misc_feature (12)..(451): Homolog of NCBI NO: 18398061 NR Description: heterogeneous nuclear ribonucleoprotein (hnRNP),
  misc_feature (12)..(451): Homolog of NCBI NO: 30680456 NR Description: heterogeneous nuclear ribonucleoprotein (hnRNP),
  misc_feature (12)..(451): Homolog of NCBI NO: 6648193 NR Description: putative RNA-binding protein [Arabidopsis
  misc_feature (12)..(454): Homolog of NCBI NO: 9758187 NR Description: RNA-binding protein-like [Arabidopsis thaliana]
  misc_feature (12)..(455): Homolog of NCBI NO: 22531168 NR Description: RNA-binding protein-like [Arabidopsis thaliana]
  misc_feature (12)..(452): Homolog of NCBI NO: 18423760 NR Description: RNA recognition motif (RRM)-containing protein
  misc_feature (12)..(455): Homolog of NCBI NO: 30696616 NR Description: RNA recognition motif (RRM)-containing protein
  misc_feature (74)..(440): Homolog of NCBI NO: 2582639 NR Description: hnRNP-like protein [Arabidopsis thaliana]
  misc_feature (1)..(455): Homolog of NCBI NO: 18416794 NR Description: heterogeneous nuclear ribonucleoprotein (hnRNP),
  misc_feature (8)..(455): Homolog of NCBI NO: 7487039 NR Description: hypothetical protein T15N24.100 - Arabidopsis
MNPEEQKMESASDLGKLFIGGISWDTDEERLQEYFGKYGDLVEAVIMRDRTTGRARGFGFIVFADPSVAERVIMDKHIIDGRTVEAKKAVPRDDQQVLKRHASPMHLISPSHGGNGGGARTKKIFVGGLPSSITEAEFKNYFDQFGTIADVVVMYDHNTQRPRGFGFITFDSEESVDMVLHKTFHELNGKMVEVKRAVPKELSSTTPNRSPLIGYGNNYGVVPNRSSANSYFNSFPPGYNNNNLGSAGRFSPIGSGRNAFSSFGLGLNQELNLNSNFDGNTLGYSRIPGNQYFNSASPNRYNSPIGYNRGDSAYNPSNRDLWGNRSDSSGPGWNLGVSVGNNRGNWGLSSVVSDNNGYGRSYGAGSGLSGLSFAGNTNGFDGSIGELYRGSSVYSDSTWQQSMPHHQSSNELDGLSRSYGFGIDNVGSDPSANASEGYSGNYNVGNRQTHRGIEA

SEQ ID NO: 44364 - protein, 448 aa, Arabidopsis thaliana
  peptide (1)..(448): Ceres Seq. ID no. 13509480
  misc_feature (117)..(187): Pfam Name: RNA recognition motif. (a.k.a. RRM, RBD, or RNP domain) Pfam Description: RNA recognition motif. (a.k.a. RRM, RBD, or RNP
  misc_feature (5)..(444): Homolog of NCBI NO: 18398061 NR Description: heterogeneous nuclear ribonucleoprotein (hnRNP),
  misc_feature (5)..(444): Homolog of NCBI NO: 30680456 NR Description: heterogeneous nuclear ribonucleoprotein (hnRNP),
  misc_feature (5)..(444): Homolog of NCBI NO: 6648193 NR Description: putative RNA-binding protein [Arabidopsis
  misc_feature (5)..(447): Homolog of NCBI NO: 9758187 NR Description: RNA-binding protein-like [Arabidopsis thaliana]
  misc_feature (5)..(448): Homolog of NCBI NO: 22531168 NR Description: RNA-binding protein-like [Arabidopsis thaliana]
  misc_feature (5)..(445): Homolog of NCBI NO: 18423760 NR Description: RNA recognition motif (RRM)-containing protein
  misc_feature (5)..(448): Homolog of NCBI NO: 30696616 NR Description: RNA recognition motif (RRM)-containing protein
  misc_feature (67)..(433): Homolog of NCBI NO: 2582639 NR Description: hnRNP-like protein [Arabidopsis thaliana]
  misc_feature (1)..(448): Homolog of NCBI NO: 18416794 NR Description: heterogeneous nuclear ribonucleoprotein (hnRNP),
  misc_feature (1)..(448): Homolog of NCBI NO: 7487039 NR Description: hypothetical protein T15N24.100 - Arabidopsis
MESASDLGKLFIGGISWDTDEERLQEYFGKYGDLVEAVIMRDRTTGRARGFGFIVFADPSVAERVIMDKHIIDGRTVEAKKAVPRDDQQVLKRHASPMHLISPSHGGNGGGARTKKIFVGGLPSSITEAEFKNYFDQFGTIADVVVMYDHNTQRPRGFGFITFDSEESVDMVLHKTFHELNGKMVEVKRAVPKELSSTTPNRSPLIGYGNNYGVVPNRSSANSYFNSFPPGYNNNNLGSAGRFSPIGSGRNAFSSFGLGLNQELNLNSNFDGNTLGYSRIPGNQYFNSASPNRYNSPIGYNRGDSAYNPSNRDLWGNRSDSSGPGWNLGVSVGNNRGNWGLSSVVSDNNGYGRSYGAGSGLSGLSFAGNTNGFDGSIGELYRGSSVYSDSTWQQSMPHHQSSNELDGLSRSYGFGIDNVGSDPSANASEGYSGNYNVGNRQTHRGIEA

SEQ ID NO: 44365 - protein, 409 aa, Arabidopsis thaliana
  peptide (1)..(409): Ceres Seq. ID no. 13509481
  misc_feature (78)..(148): Pfam Name: RNA recognition motif. (a.k.a. RRM, RBD, or RNP domain) Pfam Description: RNA recognition motif. (a.k.a. RRM, RBD, or RNP
  misc_feature (1)..(405): Homolog of NCBI NO: 30680456 NR Description: heterogeneous nuclear ribonucleoprotein (hnRNP),
  misc_feature (1)..(405): Homolog of NCBI NO: 18398061 NR Description: heterogeneous nuclear ribonucleoprotein (hnRNP),
  misc_feature (1)..(405): Homolog of NCBI NO: 6648193 NR Description: putative RNA-binding protein [Arabidopsis
  misc_feature (1)..(408): Homolog of NCBI NO: 9758187 NR Description: RNA-binding protein-like [Arabidopsis thaliana]
  misc_feature (1)..(409): Homolog of NCBI NO: 22531168 NR Description: RNA-binding protein-like [Arabidopsis thaliana]
  misc_feature (1)..(406): Homolog of NCBI NO: 18423760 NR Description: RNA recognition motif (RRM)-containing protein
  misc_feature (1)..(409): Homolog of NCBI NO: 30696616 NR Description: RNA recognition motif (RRM)-containing protein
  misc_feature (28)..(394): Homolog of NCBI NO: 2582639 NR Description: hnRNP-like protein [Arabidopsis thaliana]
  misc_feature (1)..(409): Homolog of NCBI NO: 18416794 NR Description: heterogeneous nuclear ribonucleoprotein (hnRNP),
  misc_feature (1)..(409): Homolog of NCBI NO: 7487039 NR Description: hypothetical protein T15N24.100 - Arabidopsis
MRDRTTGRARGFGFIVFADPSVAERVIMDKHIIDGRTVEAKKAVPRDDQQVLKRHASPMHLISPSHGGNGGGARTKKIFVGGLPSSITEAEFKNYFDQFGTIADVVVMYDHNTQRPRGFGFITFDSEESVDMVLHKTFHELNGKMVEVKRAVPKELSSTTPNRSPLIGYGNNYGVVPNRSSANSYFNSFPPGYNNNNLGSAGRFSPIGSGRNAFSSFGLGLNQELNLNSNFDGNTLGYSRIPGNQYFNSASPNRYNSPIGYNRGDSAYNPSNRDLWGNRSDSSGPGWNLGVSVGNNRGNWGLSSVVSDNNGYGRSYGAGSGLSGLSFAGNTNGFDGSIGELYRGSSVYSDSTWQQSMPHHQSSNELDGLSRSYGFGIDNVGSDPSANASEGYSGNYNVGNRQTHRGIEA

SEQ ID NO: 44366 - DNA, 846 bp, Arabidopsis thaliana
  misc_feature (1)..(846): Ceres Seq. ID no. 12466069
  misc_feature: MA Experiment ID: 20000169 Result: Up-regulated in Transcription
  misc_feature: MA Experiment 20000169 PARAMETER Experiment Name: At_100uM_ABA_P Parameter: Age (day) Value: 14
  misc_feature: MA Experiment 20000169 PARAMETER Experiment Name: At_100uM_ABA_P Parameter: Organism Value: A. thaliana
  misc_feature: MA Experiment 20000169 PARAMETER Experiment Name: At_100uM_ABA_P Parameter: Plant Line Value: WS
  misc_feature: MA Experiment 20000169 PARAMETER Experiment Name: At_100uM_ABA_P Parameter: Timepoint (hr) Value: 6
  misc_feature: MA Experiment 20000169 PARAMETER Experiment Name: At_100uM_ABA_P Parameter: Tissue Value: Aerial
  misc_feature: MA Experiment 20000169 PARAMETER Experiment Name: At_100uM_ABA_P Parameter: Treatment Value: 100uM ABA vs. No Treatment
  misc_feature: MA Experiment ID: 20000173 Result: Down-regulated in Transcription
  misc_feature: MA Experiment 20000173 PARAMETER Experiment Name: At_42deg_Heat_P Parameter: Age (day) Value: 14
  misc_feature: MA Experiment 20000173 PARAMETER Experiment Name: At_42deg_Heat_P Parameter: Organism Value: A. thaliana
  misc_feature: MA Experiment 20000173 PARAMETER Experiment Name: At_42deg_Heat_P Parameter: Plant Line Value: WS
  misc_feature: MA Experiment 20000173 PARAMETER Experiment Name: At_42deg_Heat_P Parameter: Temperature (deg C) Value: 42 vs. 22
  misc_feature: MA Experiment 20000173 PARAMETER Experiment Name: At_42deg_Heat_P Parameter: Timepoint (hr) Value: 6
  misc_feature: MA Experiment 20000173 PARAMETER Experiment Name: At_42deg_Heat_P Parameter: Tissue Value: Aerial
  misc_feature: MA Experiment ID: 20000182 Result: Up-regulated in Transcription
  misc_feature: MA Experiment 20000182 PARAMETER Experiment Name: At_2mM_SA_P Parameter: Age (day) Value: 14
  misc_feature: MA Experiment 20000182 PARAMETER Experiment Name: At_2mM_SA_P Parameter: Organism Value: A. thaliana
  misc_feature: MA Experiment 20000182 PARAMETER Experiment Name: At_2mM_SA_P Parameter: Plant Line Value: WS
  misc_feature: MA Experiment 20000182 PARAMETER Experiment Name: At_2mM_SA_P Parameter: Timepoint (hr) Value: 6
  misc_feature: MA Experiment 20000182 PARAMETER Experiment Name: At_2mM_SA_P Parameter: Tissue Value: Aerial
  misc_feature: MA Experiment 20000182 PARAMETER Experiment Name: At_2mM_SA_P Parameter: Treatment Value: 2mM SA vs. No Treatment
  misc_feature: MA Experiment ID: 20000234 Result: Down-regulated in Transcription
  misc_feature: MA Experiment 20000234 PARAMETER Experiment Name: At_Siliques_P Parameter: Age (day) Value: 21
  misc_feature: MA Experiment 20000234 PARAMETER Experiment Name: At_Siliques_P Parameter: Organism Value: A. thaliana
  misc_feature: MA Experiment 20000234 PARAMETER Experiment Name: At_Siliques_P Parameter: Plant Line Value: WS
  misc_feature: MA Experiment 20000234 PARAMETER Experiment Name: At_Siliques_P Parameter: Tissue Value: Less Than 5mm Siliques vs. Whole Plant
  misc_feature: MA Experiment ID: 20000235 Result: Down-regulated in Transcription
  misc_feature: MA Experiment 20000235 PARAMETER Experiment Name: At_Siliques_P Parameter: Age (day) Value: 21
  misc_feature: MA Experiment 20000235 PARAMETER Experiment Name: At_Siliques_P Parameter: Organism Value: A. thaliana
  misc_feature: MA Experiment 20000235 PARAMETER Experiment Name: At_Siliques_P Parameter: Plant Line Value: WS
  misc_feature: MA Experiment 20000235 PARAMETER Experiment Name: At_Siliques_P Parameter: Tissue Value: 5-10mm Siliques vs. Whole Plant
  misc_feature: MA Experiment ID: 20000286 Result: Down-regulated in Transcription
  misc_feature: MA Experiment 20000286 PARAMETER Experiment Name: At_Open_Flower_P Parameter: Age (day) Value: 21
  misc_feature: MA Experiment 20000286 PARAMETER Experiment Name: At_Open_Flower_P Parameter: Plant Line Value: WS
  misc_feature: MA Experiment 20000286 PARAMETER Experiment Name: At_Open_Flower_P Parameter: Tissue Value: Half Open vs. Whole Plant
  misc_feature: MA Experiment ID: 20000453 Result: Up-regulated in Transcription
  misc_feature: MA Experiment 20000453 PARAMETER Experiment Name: At_100uM_ABA_P Parameter: Age (day) Value: 15
  misc_feature: MA Experiment 20000453 PARAMETER Experiment Name: At_100uM_ABA_P Parameter: Organism Value: A. thaliana
  misc_feature: MA Experiment 20000453 PARAMETER Experiment Name: At_100uM_ABA_P Parameter: Plant Line Value: WS
  misc_feature: MA Experiment 20000453 PARAMETER Experiment Name: At_100uM_ABA_P Parameter: Timepoint (hr) Value: 24
  misc_feature: MA Experiment 20000453 PARAMETER Experiment Name: At_100uM_ABA_P Parameter: Tissue Value: Aerial
  misc_feature: MA Experiment 20000453 PARAMETER Experiment Name: At_100uM_ABA_P Parameter: Treatment Value: 100uM ABA vs. No Treatment
  misc_feature: MA Experiment ID: 20000456 Result: Up-regulated in Transcription
  misc_feature: MA Experiment 20000456 PARAMETER Experiment Name: At_100uM_BA_P Parameter: Age (day) Value: 14
  misc_feature: MA Experiment 20000456 PARAMETER Experiment Name: At_100uM_BA_P Parameter: Organism Value: A. thaliana
  misc_feature: MA Experiment 20000456 PARAMETER Experiment Name: At_100uM_BA_P Parameter: Plant Line Value: WS
  misc_feature: MA Experiment 20000456 PARAMETER Experiment Name: At_100uM_BA_P Parameter: Timepoint (hr) Value: 6
  misc_feature: MA Experiment 20000456 PARAMETER Experiment Name: At_100uM_BA_P Parameter: Tissue Value: Aerial
  misc_feature: MA Experiment 20000456 PARAMETER Experiment Name: At_100uM_BA_P Parameter: Treatment Value: 100uM BA vs. No Treatment
  misc_feature: MA Experiment ID: 20000527 Result: Down-regulated in Transcription
  misc_feature: MA Experiment 20000527 PARAMETER Experiment Name: At_10percent_PEG_P Parameter: Age (day) Value: 20
  misc_feature: MA Experiment 20000527 PARAMETER Experiment Name: At_10percent_PEG_P Parameter: Organism Value: A. thaliana
  misc_feature: MA Experiment 20000527 PARAMETER Experiment Name: At_10percent_PEG_P Parameter: Plant Line Value: WS
  misc_feature: MA Experiment 20000527 PARAMETER Experiment Name: At_10percent_PEG_P Parameter: Timepoint (day) Value: 20
  misc_feature: MA Experiment 20000527 PARAMETER Experiment Name: At_10percent_PEG_P Parameter: Tissue Value: Whole Plant
  misc_feature: MA Experiment 20000527 PARAMETER Experiment Name: At_10percent_PEG_P Parameter: Treatment Value: 10percent PEG vs. No Treatment
  misc_feature: MA Experiment ID: 20000709 Result: Up-regulated in Transcription
  misc_feature: MA Experiment 20000709 PARAMETER Experiment Name: At_15mM_NH4NO3_L-to-H_P Parameter: Age (hr) Value: 14
  misc_feature: MA Experiment 20000709 PARAMETER Experiment Name: At_15mM_NH4NO3_L-to-H_P Parameter: Organism Value: A. thaliana
  misc_feature: MA Experiment 20000709 PARAMETER Experiment Name: At_15mM_NH4NO3_L-to-H_P Parameter: Plant Line Value: WS
  misc_feature: MA Experiment 20000709 PARAMETER Experiment Name: At_15mM_NH4NO3_L-to-H_P Parameter: Timepoint (hr) Value: 4
  misc_feature: MA Experiment 20000709 PARAMETER Experiment Name: At_15mM_NH4NO3_L-to-H_P Parameter: Tissue Value: Aerial
  misc_feature: MA Experiment 20000709 PARAMETER Experiment Name: At_15mM_NH4NO3_L-to-H_P Parameter: Treatment Value: 15mM NH4NO3 vs. 30mM Mannitol
  misc_feature: MA Experiment ID: 20001554 Result: Down-regulated in Transcription
  misc_feature: MA Experiment 20001554 PARAMETER Experiment Name: At_Drought_Soil_Dry_P Parameter: Age (day) Value: 21
  misc_feature: MA Experiment 20001554 PARAMETER Experiment Name: At_Drought_Soil_Dry_P Parameter: Organism Value: A. thaliana
  misc_feature: MA Experiment 20001554 PARAMETER Experiment Name: At_Drought_Soil_Dry_P Parameter: Plant Line Value: WS
  misc_feature: MA Experiment 20001554 PARAMETER Experiment Name: At_Drought_Soil_Dry_P Parameter: Post Timepoint (hr) Value: None
  misc_feature: MA Experiment 20001554 PARAMETER Experiment Name: At_Drought_Soil_Dry_P Parameter: Post-Treatment Value: None
  misc_feature: MA Experiment 20001554 PARAMETER Experiment Name: At_Drought_Soil_Dry_P Parameter: Timepoint (day) Value: 7
  misc_feature: MA Experiment 20001554 PARAMETER Experiment Name: At_Drought_Soil_Dry_P Parameter: Treatment Value: Drought vs. No Drought
  misc_feature: MA Experiment ID: 20001904 Result: Up-regulated in Transcription
  misc_feature: MA Experiment 20001904 PARAMETER Experiment Name: At_Drought_Reproduction_P Parameter: Age (day) Value: 37
  misc_feature: MA Experiment 20001904 PARAMETER Experiment Name: At_Drought_Reproduction_P Parameter: Organism Value: A. thaliana
  misc_feature: MA Experiment 20001904 PARAMETER Experiment Name: At_Drought_Reproduction_P Parameter: Plant Line Value: WS
  misc_feature: MA Experiment 20001904 PARAMETER Experiment Name: At_Drought_Reproduction_P Parameter: Timepoint (day) Value: 7
  misc_feature: MA Experiment 20001904 PARAMETER Experiment Name: At_Drought_Reproduction_P Parameter: Tissue Value: Rosettes
  misc_feature: MA Experiment 20001904 PARAMETER Experiment Name: At_Drought_Reproduction_P Parameter: Treatment Value: Drought vs. No Drought
  misc_feature: MA Experiment ID: 20001905 Result: Up-regulated in Transcription
  misc_feature: MA Experiment 20001905 PARAMETER Experiment Name: At_Drought_Reproduction_P Parameter: Age (day) Value: 40
  misc_feature: MA Experiment 20001905 PARAMETER Experiment Name: At_Drought_Reproduction_P Parameter: Organism Value: A. thaliana
  misc_feature: MA Experiment 20001905 PARAMETER Experiment Name: At_Drought_Reproduction_P Parameter: Plant Line Value: WS
  misc_feature: MA Experiment 20001905 PARAMETER Experiment Name: At_Drought_Reproduction_P Parameter: Timepoint (day) Value: 10
  misc_feature: MA Experiment 20001905 PARAMETER Experiment Name: At_Drought_Reproduction_P Parameter: Tissue Value: Rosettes
  misc_feature: MA Experiment 20001905 PARAMETER Experiment Name: At_Drought_Reproduction_P Parameter: Treatment Value: Drought vs. No Drought
aaagattagttaaataaaaaataaaaaagagggaaagagattgattattcaatggccgagaaagaagagggtgtgaagcttatagggtcttgggcaagcccattcagtcgtagagtcgagatggctctcaagcttaaaggcgtgccgtacgattacttggacgaagattatttggttgtcaagagcccgttgctacttcaactcaacccggtttacaaaaaagtccctgttttggttcacaatggtaaaatattacccgagtcacaactgatccttgaatacatcgaccaaacatggacaaacaatcctattctaccgcaaagtccatatgacaaagccatggctcgattctgggccaaatttgtcgatgaacaagtcacaatgatagggctcaggtcactggtgaaatcagagaagagaattgacgttgcaatcgaagaagttcaagaactaattatgttgcttgagaatcaaatcacgggaaaaaaattattcggcggagagacgataggattcttggacatggtcgtgggaagtatgatcccgttttgtctagctcgggcttgggaaggtatgggaattgatatgattccagaagaaaagtttccagagctaaacagatggatcaagaatttgaaagaaattgagatcgtgagggaatgcattcctgatagagagaaacatattgagcacatgatgaaaattgtaggacgaatcaaagcggtctaagagacaacatgatactctttgatccagtgatgttaagttgttaactaaatttgtattgtcttgttatttaaaagttttatgaacaatctactaaataaagatgagtgtgatacatgt

SEQ ID NO: 44367 - protein, 225 aa, Arabidopsis thaliana
  peptide (1)..(225): Ceres Seq. ID no. 12466070
  misc_feature (4)..(222): Homolog of NCBI NO: 15232628 NR Description: glutathione transferase, putative
  misc_feature (8)..(220): Homolog of NCBI NO: 7595790 NR Description: glutathione S-transferase [Euphorbia esula]
  misc_feature (1)..(215): Homolog of NCBI NO: 15227082 NR Description: glutathione transferase, putative
  misc_feature (4)..(224): Homolog of NCBI NO: 15227084 NR Description: glutathione transferase, putative
  misc_feature (1)..(224): Homolog of NCBI NO: 15227085 NR Description: glutathione transferase (103-1A)
  misc_feature (1)..(224): Homolog of NCBI NO: 15227550 NR Description: glutathione transferase, putative
  misc_feature (1)..(224): Homolog of NCBI NO: 15227551 NR Description: glutathione transferase, putative
  misc_feature (1)..(224): Homolog of NCBI NO: 14423534 NR Description: putative glutathione S-transferase [Arabidopsis
  misc_feature (1)..(224): Homolog of NCBI NO: 15227086 NR Description: glutathione transferase, putative
  misc_feature (1)..(225): Homolog of NCBI NO: 15227087 NR Description: glutathione transferase, putative
MAEKEEGVKLIGSWASPFSRRVEMALKLKGVPYDYLDEDYLVVKSPLLLQLNPVYKKVPVLVHNGKILPESQLILEYIDQTWTNNPILPQSPYDKAMARFWAKFVDEQVTMIGLRSLVKSEKRIDVAIEEVQELIMLLENQITGKKLFGGETIGFLDMVVGSMIPFCLARAWEGMGIDMIPEEKFPELNRWIKNLKEIEIVRECIPDREKHIEHMMKIVGRIKAV

SEQ ID NO: 44368 - protein, 202 aa, Arabidopsis thaliana
  peptide (1)..(202): Ceres Seq. ID no. 12466071
  misc_feature (1)..(199): Homolog of NCBI NO: 15232628 NR Description: glutathione transferase, putative
  misc_feature (1)..(197): Homolog of NCBI NO: 7595790 NR Description: glutathione S-transferase [Euphorbia esula]
  misc_feature (1)..(192): Homolog of NCBI NO: 15227082 NR Description: glutathione transferase, putative
  misc_feature (1)..(201): Homolog of NCBI NO: 15227084 NR Description: glutathione transferase, putative
  misc_feature (1)..(201): Homolog of NCBI NO: 15227085 NR Description: glutathione transferase (103-1A)
  misc_feature (1)..(201): Homolog of NCBI NO: 15227550 NR Description: glutathione transferase, putative
  misc_feature (1)..(201): Homolog of NCBI NO: 15227551 NR Description: glutathione transferase, putative
  misc_feature (1)..(201): Homolog of NCBI NO: 14423534 NR Description: putative glutathione S-transferase [Arabidopsis
  misc_feature (1)..(201): Homolog of NCBI NO: 15227086 NR Description: glutathione transferase, putative
  misc_feature (1)..(202): Homolog of NCBI NO: 15227087 NR Description: glutathione transferase, putative
MALKLKGVPYDYLDEDYLVVKSPLLLQLNPVYKKVPVLVHNGKILPESQLILEYIDQTWTNNPILPQSPYDKAMARFWAKFVDEQVTMIGLRSLVKSEKRIDVAIEEVQELIMLLENQITGKKLFGGETIGFLDMVVGSMIPFCLARAWEGMGIDMIPEEKFPELNRWIKNLKEIEIVRECIPDREKHIEHMMKIVGRIKAV

SEQ ID NO: 44369 - protein, 129 aa, Arabidopsis thaliana
  peptide (1)..(129): Ceres Seq. ID no. 12466072
  misc_feature (1)..(126): Homolog of NCBI NO: 15232628 NR Description: glutathione transferase, putative
  misc_feature (1)..(124): Homolog of NCBI NO: 7595790 NR Description: glutathione S-transferase [Euphorbia esula]
  misc_feature (1)..(119): Homolog of NCBI NO: 15227082 NR Description: glutathione transferase, putative
  misc_feature (1)..(128): Homolog of NCBI NO: 15227084 NR Description: glutathione transferase, putative
  misc_feature (1)..(128): Homolog of NCBI NO: 15227085 NR Description: glutathione transferase (103-1A)
  misc_feature (1)..(128): Homolog of NCBI NO: 15227550 NR Description: glutathione transferase, putative
  misc_feature (1)..(128): Homolog of NCBI NO: 15227551 NR Description: glutathione transferase, putative
  misc_feature (1)..(128): Homolog of NCBI NO: 14423534 NR Description: putative glutathione S-transferase [Arabidopsis
  misc_feature (1)..(128): Homolog of NCBI NO: 15227086 NR Description: glutathione transferase, putative
  misc_feature (1)..(129): Homolog of NCBI NO: 15227087 NR Description: glutathione transferase, putative
MARFWAKFVDEQVTMIGLRSLVKSEKRIDVAIEEVQELIMLLENQITGKKLFGGETIGFLDMVVGSMIPFCLARAWEGMGIDMIPEEKFPELNRWIKNLKEIEIVRECIPDREKHIEHMMKIVGRIKAV

SEQ ID NO: 44370 - DNA, 1640 bp, Arabidopsis thaliana
  misc_feature (1)..(1640): Ceres Seq. ID no. 14311211
  misc_feature: MA Experiment ID: 108434 Result: Up-regulated in Transcription
  misc_feature: MA Experiment 108434 PARAMETER Experiment Name: At_Root_Tips_cDNA_P Parameter: Tissue Value: Root Tips
  misc_feature: MA Experiment ID: 108435 Result: Up-regulated in Transcription
  misc_feature: MA Experiment 108435 PARAMETER Experiment Name: At_stm_Mutants_cDNA_P Parameter: Plant Line Value: wt Landsburg vs stm
  misc_feature: MA Experiment 108435 PARAMETER Experiment Name: At_stm_Mutants_cDNA_P Parameter: Tissue Value: Shoot Apical Meristem Region
  misc_feature: MA Experiment ID: 108461 Result: Down-regulated in Transcription
  misc_feature: MA Experiment 108461 PARAMETER Experiment Name: At_Germinating_Seeds_cDNA_P Parameter: Age (day) Value: 1 vs. 0
  misc_feature: MA Experiment 108461 PARAMETER Experiment Name: At_Germinating_Seeds_cDNA_P Parameter: Tissue Value: Germinating Seeds
  misc_feature: MA Experiment ID: 108462 Result: Down-regulated in Transcription
  misc_feature: MA Experiment 108462 PARAMETER Experiment Name: At_Germinating_Seeds_cDNA_P Parameter: Age (day) Value: 2 vs. 0
  misc_feature: MA Experiment 108462 PARAMETER Experiment Name: At_Germinating_Seeds_cDNA_P Parameter: Tissue Value: Germinating Seeds
  misc_feature: MA Experiment ID: 108463 Result: Down-regulated in Transcription
  misc_feature: MA Experiment 108463 PARAMETER Experiment Name: At_Germinating_Seeds_cDNA_P Parameter: Age (day) Value: 3 vs. 0
  misc_feature: MA Experiment 108463 PARAMETER Experiment Name: At_Germinating_Seeds_cDNA_P Parameter: Tissue Value: Germinating Seeds
  misc_feature: MA Experiment ID: 108464 Result: Down-regulated in Transcription
  misc_feature: MA Experiment 108464 PARAMETER Experiment Name: At_Germinating_Seeds_cDNA_P Parameter: Age (day) Value: 4 vs. 0
  misc_feature: MA Experiment 108464 PARAMETER Experiment Name: At_Germinating_Seeds_cDNA_P Parameter: Tissue Value: Germinating Seeds
  misc_feature: MA Experiment ID: 20000180 Result: Down-regulated in Transcription
  misc_feature: MA Experiment 20000180 PARAMETER Experiment Name: At_Germinating_Seeds_P Parameter: Age (hr) Value: 24 vs. 0
  misc_feature: MA Experiment 20000180 PARAMETER Experiment Name: At_Germinating_Seeds_P Parameter: Tissue Value: Germinating Seeds
  misc_feature: MA Experiment ID: 20001558 Result: Up-regulated in Transcription
  misc_feature: MA Experiment 20001558 PARAMETER Experiment Name: At_Drought_Soil_Dry_P Parameter: Age (day) Value: 27
  misc_feature: MA Experiment 20001558 PARAMETER Experiment Name: At_Drought_Soil_Dry_P Parameter: Organism Value: A. thaliana
  misc_feature: MA Experiment 20001558 PARAMETER Experiment Name: At_Drought_Soil_Dry_P Parameter: Plant Line Value: WS
  misc_feature: MA Experiment 20001558 PARAMETER Experiment Name: At_Drought_Soil_Dry_P Parameter: Post Timepoint (hr) Value: 6
  misc_feature: MA Experiment 20001558 PARAMETER Experiment Name: At_Drought_Soil_Dry_P Parameter: Post-Treatment Value: Re-Water vs. No Drought
  misc_feature: MA Experiment 20001558 PARAMETER Experiment Name: At_Drought_Soil_Dry_P Parameter: Timepoint (day) Value: 13
  misc_feature: MA Experiment 20001558 PARAMETER Experiment Name: At_Drought_Soil_Dry_P Parameter: Treatment Value: Drought vs. No Drought
  misc_feature: Phenotype: WHOLE PLANT Color-Yellow-Green Viable 1
  misc_feature: Phenotype: WHOLE PLANT Size-Small
  misc_feature: Phenotype: WHOLE PLANT Size-Small
  misc_feature: Phenotype: FERTILITY Fertility-Reduced
  misc_feature: Phenotype: INFLORESCENCE Height-Short
  misc_feature: Phenotype: INFLORESCENCE Height-Tall
  misc_feature: Phenotype: FERTILITY Fertility-Reduced
  misc_feature: Phenotype: WHOLE PLANT Color-Yellow-Green Viable 1
  misc_feature: Phenotype: WHOLE PLANT Size-Small
  misc_feature: Phenotype: WHOLE PLANT Size-Small
  misc_feature: Phenotype: FERTILITY Fertility-Reduced
  misc_feature: Phenotype: WHOLE PLANT Color-Dark Green
  misc_feature: Phenotype: WHOLE PLANT Size-Small
gattcattctcttcagtcagagatttcgaaaccctagtcgatttcgagatccaaccaactctgctccttatctcagcttgttgaatttgcgaagtatgggagacgctagagacaacgaagcctacgaggaggagctcttggactatgaagaagaagacgagaaggtcccagattctggaaacaaagttaacggtgaagccgtgaaaaaagggtacgtgggaatacacagttctggattcagagacttccttttaaaaccggagcttctcagagctattgttgactctggatttgaacatccatctgaagtgcaacatgaatgtatccctcaagctatcttgggcatggatgtcatctgccaagcaaagtctggtatggggaagactgctgtgtttgtcctgtctactctacaacagattgaaccatctcctggccaggtttctgcacttgtcttgtgccatacaagagagctagcttaccagatctgcaatgagtttgtgcgattcagtacctatctgcctgatacaaaggtttcggtgttctatggtggagtcaacattaaaattcacaaagacttgctgaagaatgaatgtcctcacattgttgttggtacccctggtcgggtgcttgcacttgccagggagaaagatctctctttgaagaatgtgaggcattttattcttgatgaatgtgataaaatgctcgagtcacttgacatgcgaagggatgtgcaggagattttcaagatgactcctcatgacaaacaagtaatgatgttctcagcaacgctcagcaaagagatacgcccagtctgcaaaaaatttatgcaagatccaatggaaatatatgtcgatgatgaagccaagttgactcttcatgggcttgtccagcactacatcaaactgagcgagatggagaaaaaccggaagttgaatgaccttcttgatgcgttggacttcaatcaagttgtcatttttgtgaagagcgtgagcagggctgctgagctgaacaagttactggtggaatgcaatttcccctcaatatgcatccactctggaatgtctcaagaagagaggttgactcgatacaaaagtttcaaggaagggcacaaaaggatccttgtggcgactgacttggtaggaagagggattgacattgagcgtgtcaacattgtcatcaactatgacatgccagattctgctgatacctatcttcacagggttggcagagctggtagatttggaaccaagggtcttgcaatcacatttgttgcatctgcttcagattcagaggttcttaaccaggtacaagagaggtttgaggttgatataaaggaacttccggagcagattgatacttcaacctacatgccttcttaaacaagtagcacgtccctcaggaaagaagctcttcagatttcaaccttgtaggtgttcgaagggtgatgggggttcacaactatctctcgctccgtttgttttagtgttttctatgacgacatttttttccatatgtttagaacgtctgttgtactctttaaaggagattcgagtcactctccaaatcgcacagttaaaagctgtccagttttttgtacaagagattattatgtttgaaatatcaggatttagtctcgactc

SEQ ID NO: 44371 - protein, 458 aa, Arabidopsis thaliana; identical to SEQ ID NO: 20809
  peptide (1)..(458): Ceres Seq. ID no. 14311212
  misc_feature (90)..(297): Pfam Name: DEAD/DEAH box helicase Pfam Description: DEAD/DEAH box helicase
  misc_feature (42)..(458): Homolog of NCBI NO: 2500533 NR Description: Probable ATP-dependent RNA helicase p47 homolog
  misc_feature (42)..(456): Homolog of NCBI NO: 16758334 NR Description: nuclear RNA helicase, DECD variant of DEAD box
  misc_feature (37)..(456): Homolog of NCBI NO: 28278325 NR Description: Unknown (protein for MGC:55433) [Danio rerio]
  misc_feature (115)..(458): Homolog of NCBI NO: 30683509 NR Description: DEAD/DEAH box helicase, putative [Arabidopsis
  misc_feature (34)..(458): Homolog of NCBI NO: 34913862 NR Description: putative DEAD BOX RNA helicase
  misc_feature (32)..(455): Homolog of NCBI NO: 8953379 NR Description: DEAD BOX RNA helicase RH15-like protein
  misc_feature (32)..(455): Homolog of NCBI NO: 8953382 NR Description: DEAD BOX RNA helicase RH15 [Arabidopsis thaliana]
  misc_feature (32)..(458): Homolog of NCBI NO: 18416486 NR Description: DEAD/DEAH box helicase, putative [Arabidopsis
  misc_feature (32)..(458): Homolog of NCBI NO: 18416493 NR Description: DEAD/DEAH box helicase, putative [Arabidopsis
  misc_feature (8)..(458): Homolog of NCBI NO: 11358797 NR Description: RNA helicase RH15 [imported] - Arabidopsis

SEQ ID NO: 44372 - protein, 427 aa, Arabidopsis thaliana; identical to SEQ ID NO: 20810
  peptide (1)..(427): Ceres Seq. ID no. 14311213
  misc_feature (59)..(266): Pfam Name: DEAD/DEAH box helicase Pfam Description: DEAD/DEAH box helicase
  misc_feature (11)..(427): Homolog of NCBI NO: 2500533 NR Description: Probable ATP-dependent RNA helicase p47 homolog
  misc_feature (11)..(425): Homolog of NCBI NO: 16758334 NR Description: nuclear RNA helicase, DECD variant of DEAD box
  misc_feature (6)..(425): Homolog of NCBI NO: 28278325 NR Description: Unknown (protein for MGC:55433) [Danio rerio]
  misc_feature (84)..(427): Homolog of NCBI NO: 30683509 NR Description: DEAD/DEAH box helicase, putative [Arabidopsis
  misc_feature (3)..(427): Homolog of NCBI NO: 34913862 NR Description: putative DEAD BOX RNA helicase
  misc_feature (1)..(424): Homolog of NCBI NO: 8953379 NR Description: DEAD BOX RNA helicase RH15-like protein
  misc_feature (1)..(424): Homolog of NCBI NO: 8953382 NR Description: DEAD BOX RNA helicase RH15 [Arabidopsis thaliana]
  misc_feature (1)..(427): Homolog of NCBI NO: 18416486 NR Description: DEAD/DEAH box helicase, putative [Arabidopsis
  misc_feature (1)..(427): Homolog of NCBI NO: 18416493 NR Description: DEAD/DEAH box helicase, putative [Arabidopsis
  misc_feature (1)..(427): Homolog of NCBI NO: 11358797 NR Description: RNA helicase RH15 [imported] - Arabidopsis

SEQ ID NO: 44373 - protein, 344 aa, Arabidopsis thaliana; identical to SEQ ID NO: 20811
  peptide (1)..(344): Ceres Seq. ID no. 14311214
  misc_feature (1)..(183): Pfam Name: DEAD/DEAH box helicase Pfam Description: DEAD/DEAH box helicase
  misc_feature (1)..(344): Homolog of NCBI NO: 2500533 NR Description: Probable ATP-dependent RNA helicase p47 homolog
  misc_feature (1)..(342): Homolog of NCBI NO: 16758334 NR Description: nuclear RNA helicase, DECD variant of DEAD box
  misc_feature (1)..(342): Homolog of NCBI NO: 28278325 NR Description: Unknown (protein for MGC:55433) [Danio rerio]
  misc_feature (1)..(344): Homolog of NCBI NO: 30683509 NR Description: DEAD/DEAH box helicase, putative [Arabidopsis
  misc_feature (1)..(344): Homolog of NCBI NO: 34913862 NR Description: putative DEAD BOX RNA helicase
  misc_feature (1)..(341): Homolog of NCBI NO: 8953379 NR Description: DEAD BOX RNA helicase RH15-like protein
  misc_feature (1)..(341): Homolog of NCBI NO: 8953382 NR Description: DEAD BOX RNA helicase RH15 [Arabidopsis thaliana]
  misc_feature (1)..(344): Homolog of NCBI NO: 18416486 NR Description: DEAD/DEAH box helicase, putative [Arabidopsis
  misc_feature (1)..(344): Homolog of NCBI NO: 18416493 NR Description: DEAD/DEAH box helicase, putative [Arabidopsis
  misc_feature (1)..(344): Homolog of NCBI NO: 11358797 NR Description: RNA helicase RH15 [imported] - Arabidopsis

SEQ ID NO: 44374 - DNA, 987 bp, Arabidopsis thaliana
  misc_feature (1)..(987): Ceres Seq. ID no. 13580550
  misc_feature: MA Experiment ID: 20000173 Result: Up-regulated in Transcription
  misc_feature: MA Experiment 20000173 PARAMETER Experiment Name: At_42deg_Heat_P Parameter: Age (day) Value: 14
  misc_feature: MA Experiment 20000173 PARAMETER Experiment Name: At_42deg_Heat_P Parameter: Organism Value: A. thaliana
  misc_feature: MA Experiment 20000173 PARAMETER Experiment Name: At_42deg_Heat_P Parameter: Plant Line Value: WS
  misc_feature: MA Experiment 20000173 PARAMETER Experiment Name: At_42deg_Heat_P Parameter: Temperature (deg C) Value: 42 vs. 22
  misc_feature: MA Experiment 20000173 PARAMETER Experiment Name: At_42deg_Heat_P Parameter: Timepoint (hr) Value: 6
  misc_feature: MA Experiment 20000173 PARAMETER Experiment Name: At_42deg_Heat_P Parameter: Tissue Value: Aerial
  misc_feature: MA Experiment ID: 20000794 Result: Down-regulated in Transcription
  misc_feature: MA Experiment 20000794 PARAMETER Experiment Name: At_Petals_P Parameter: Age (day) Value: 23-25 days
  misc_feature: MA Experiment 20000794 PARAMETER Experiment Name: At_Petals_P Parameter: Plant Line Value: WS
  misc_feature: MA Experiment 20000794 PARAMETER Experiment Name: At_Petals_P Parameter: Tissue Value: Petals vs. Whole plant
  misc_feature: MA Experiment ID: 20001558 Result: Up-regulated in Transcription
  misc_feature: MA Experiment 20001558 PARAMETER Experiment Name: At_Drought_Soil_Dry_P Parameter: Age (day) Value: 27
  misc_feature: MA Experiment 20001558 PARAMETER Experiment Name: At_Drought_Soil_Dry_P Parameter: Organism Value: A. thaliana
  misc_feature: MA Experiment 20001558 PARAMETER Experiment Name: At_Drought_Soil_Dry_P Parameter: Plant Line Value: WS
  misc_feature: MA Experiment 20001558 PARAMETER Experiment Name: At_Drought_Soil_Dry_P Parameter: Post Timepoint (hr) Value: 6
  misc_feature: MA Experiment 20001558 PARAMETER Experiment Name: At_Drought_Soil_Dry_P Parameter: Post-Treatment Value: Re-Water vs. No Drought
  misc_feature: MA Experiment 20001558 PARAMETER Experiment Name: At_Drought_Soil_Dry_P Parameter: Timepoint (day) Value: 13
  misc_feature: MA Experiment 20001558 PARAMETER Experiment Name: At_Drought_Soil_Dry_P Parameter: Treatment Value: Drought vs. No Drought
  misc_feature: MA Experiment ID: 20001757 Result: Up-regulated in Transcription
  misc_feature: MA Experiment 20001757 PARAMETER Experiment Name: At_50mM_NH4NO3_L-to-H_P Parameter: Timepoint (hr) Value: 6
  misc_feature: MA Experiment 20001757 PARAMETER Experiment Name: At_50mM_NH4NO3_L-to-H_P Parameter: Tissue Value: Leaf
  misc_feature: MA Experiment 20001757 PARAMETER Experiment Name: At_50mM_NH4NO3_L-to-H_P Parameter: Treatment Value: 50mM NH4NO3 vs 100mM Mannitol
atttaaccacacaattttatcatttcactcctaacgcactctcttctccgaatctagggtttttgtctctagcctcctcaagctttgcaaacaatcatggcgacccagatcagcaagaagagaaagttcgtagccgatggtgtgttttacgctgaactcaatgaggttctaaccagagagcttgctgaggatggttactctggtgttgaggttcgcgtcactcctatgcgtactgagatcatcattagagccactcgtactcaaaacgttctcggtgagaagggaaggaggattagggaattgacatctcttgtacaaaagagattcaaatttcctcaggacagtgttgagctttatgctgagaaggttgctaacagaggtctttgtgctattgctcaggctgagtctcttcgttacaagcttcttggtggtcttgctgttcgtagggcgtgctatggtgttttaaggtttgttatggagagtggagctaaaggatgcgaagtcattgtgagtggaaaactccgtgctgcacgtgctaagtcgatgaagttcaaggatggttacatggtttcctcaggtcagccaaccaaggaatacattgatgctgcagttaggcatgttcttcttagacagggtgtgcttggtctcaaggtgaagatcatgcttgactgggaccccaagggcaaacaaggaccgatgacaccattgcctgatgttgtgatcatccatacaccgaaagaagatgatgtatacattgcacctgctcaggttgttactcaagctgcttttgtaccggaagctccattaaccaccacagattatccagcaatgccagttgcttagagagccttttcgttttctggtttaaaacccaatggggatggttctttttttgggacagtactagttttctcatgttattctaagttaatacttaaagttctggaggttgaattacatcaaggatatgaatgtatgtttttcgtt

SEQ ID NO: 44375 - protein, 248 aa, Arabidopsis thaliana
  peptide (1)..(248): Ceres Seq. ID no. 13580551
  misc_feature (104)..(188): Pfam Name: Ribosomal protein S3, C-terminal domain Pfam Description: Ribosomal protein S3, C-terminal domain
  misc_feature (1)..(248): Homolog of NCBI NO: 28374213 NR Description: similar to 40S ribosomal protein S3 [Danio rerio]
  misc_feature (1)..(246): Homolog of NCBI NO: 38512247 NR Description: Ribosomal protein S3 [Silurana tropicalis]
  misc_feature (1)..(248): Homolog of NCBI NO: 22001962 NR Description: 40S ribosomal protein S3
  misc_feature (1)..(248): Homolog of NCBI NO: 37595356 NR Description: ribosomal protein S3 [Danio rerio]
  misc_feature (1)..(246): Homolog of NCBI NO: 133940 NR Description: 40S ribosomal protein S3A (S1A)
  misc_feature (3)..(222): Homolog of NCBI NO: 14192875 NR Description: Putative 40S ribosomal protein; contains
  misc_feature (1)..(225): Homolog of NCBI NO: 22204124 NR Description: putative 40S ribosomal protein S3 [Triticum
  misc_feature (1)..(248): Homolog of NCBI NO: 15232352 NR Description: 40S ribosomal protein S3 (RPS3B) [Arabidopsis
  misc_feature (1)..(248): Homolog of NCBI NO: 15225107 NR Description: 40S ribosomal protein S3 (RPS3A) [Arabidopsis
  misc_feature (1)..(248): Homolog of NCBI NO: 15238533 NR Description: 40S ribosomal protein S3 (RPS3C) [Arabidopsis
MATQISKKRKFVADGVFYAELNEVLTRELAEDGYSGVEVRVTPMRTEIIIRATRTQNVLGEKGRRIRELTSLVQKRFKFPQDSVELYAEKVANRGLCAIAQAESLRYKLLGGLAVRRACYGVLRFVMESGAKGCEVIVSGKLRAARAKSMKFKDGYMVSSGQPTKEYIDAAVRHVLLRQGVLGLKVKIMLDWDPKGKQGPMTPLPDVVIIHTPKEDDVYIAPAQVVTQAAFVPEAPLTTTDYPAMPVA

SEQ ID NO: 44376 - protein, 205 aa, Arabidopsis thaliana
  peptide (1)..(205): Ceres Seq. ID no. 13580552
  misc_feature (61)..(145): Pfam Name: Ribosomal protein S3, C-terminal domain Pfam Description: Ribosomal protein S3, C-terminal domain
  misc_feature (1)..(205): Homolog of NCBI NO: 28374213 NR Description: similar to 40S ribosomal protein S3 [Danio rerio]
  misc_feature (1)..(203): Homolog of NCBI NO: 38512247 NR Description: Ribosomal protein S3 [Silurana tropicalis]
  misc_feature (1)..(205): Homolog of NCBI NO: 22001962 NR Description: 40S ribosomal protein S3
  misc_feature (1)..(205): Homolog of NCBI NO: 37595356 NR Description: ribosomal protein S3 [Danio rerio]
  misc_feature (1)..(203): Homolog of NCBI NO: 133940 NR Description: 40S ribosomal protein S3A (S1A)
  misc_feature (1)..(179): Homolog of NCBI NO: 14192875 NR Description: Putative 40S ribosomal protein; contains
  misc_feature (1)..(182): Homolog of NCBI NO: 22204124 NR Description: putative 40S ribosomal protein S3 [Triticum
  misc_feature (1)..(205): Homolog of NCBI NO: 15232352 NR Description: 40S ribosomal protein S3 (RPS3B) [Arabidopsis
  misc_feature (1)..(205): Homolog of NCBI NO: 15225107 NR Description: 40S ribosomal protein S3 (RPS3A) [Arabidopsis
  misc_feature (1)..(205): Homolog of NCBI NO: 15238533 NR Description: 40S ribosomal protein S3 (RPS3C) [Arabidopsis
MRTEIIIRATRTQNVLGEKGRRIRELTSLVQKRFKFPQDSVELYAEKVANRGLCAIAQAESLRYKLLGGLAVRRACYGVLRFVMESGAKGCEVIVSGKLRAARAKSMKFKDGYMVSSGQPTKEYIDAAVRHVLLRQGVLGLKVKIMLDWDPKGKQGPMTPLPDVVIIHTPKEDDVYIAPAQVVTQAAFVPEAPLTTTDYPAMPVA

SEQ ID NO: 44377 - DNA, 1890 bp, Arabidopsis thaliana
  misc_feature (1)..(1890): Ceres Seq. ID no. 12488902
  misc_feature: MA Experiment ID: 20000184 Result: Up-regulated in Transcription
  misc_feature: MA Experiment 20000184 PARAMETER Experiment Name: At_Shoots__P Parameter: Age (day) Value: 7
  misc_feature: MA Experiment 20000184 PARAMETER Experiment Name: At_Shoots__P Parameter: Tissue Value: Shoots vs. Whole Plant
gcagcgaagagaaagaagatggtcggttgagctatttttgcttctcccgacaaaattctcagatccgaatacttccaccatcatcattcatttataagatctgggttttacacagctctgcgagtacagtaactatgagaaggagaggaggggatagtttccggagagctggacggaggaagatctcgaatgtggtatggtgggttctctctggtattgccctcctgctcttctttctcattctctccaaagctggtcatattgaacctagaccctctattcctaagcgacgttaccgtaatgacaaatttgtagagggtatgaatatgactgaggaaatgttgagtcctacttccgttgctcgtcaagttaatgatcagattgctcttgctaaagcttttgttgtcattgctaaagaaagtaagaatcttcagtttgcttgggacttaagtgctcagatccgtaactctcagttgcttttatcgagtgctgctactaggagaagtcccttgactgtcttggaatctgagtctactattcgtgacatggctgttttgttatatcaagctcagcagcttcactatgatagtgctactatgattatgaggcttaaggcctcgattcaggctcttgaagaacaaatgagttccgttagcgagaagagttccaagtatggacagattgctgctgaggaagtgcctaagagtctttactgtcttggtgttcgtctcactaccgaatggtttcagaatttagacttacagagaactcttaaggaaaggagtcgtgttgattcgaaactcacggataacagtctctaccatttctgtgtgttttccgataacattattgctacttctgttgtggttaattctactgctctcaattccaaggcccctgagaaagttgtgtttcatcttgtgactaatgagatcaactatgctgcaatgaaggcttggttcgccattaatatggacaacctcagaggagtcactgtggaggttcagaagttcgaggatttctcatggctgaatgcttcctatgttccggtcctcaagcagctgcaagactctgatacgcaaagctattatttctctggacacaacgatgatgggcgcactccaatcaaattcaggaaccccaagtatctttccatgctcaaccatcttaggttctacatccctgaagtgtttcctgcgctgaagaaggtggtctttcttgatgatgatgttgtagttcagaaggatctttcatctctcttttcgatcgatttaaacaaaaatgtgaacggggctgttgagacctgcatggagaccttccaccgctaccacaagtacttgaactattctcatcctctcatacgctcccactttgatccagatgcgtgtgggtgggcgtttggaatgaacgtctttgatttagttgagtggaggaagagaaatgtgaccggcatataccactactggcaagaaaaaaacgtggaccggaccttatggaaactgggaacactacctccaggacttctgacattttacgggttaacagaggcactagaggcgtcctggcatatcctgggattgggatacacgaatgtggatgctcgtgtgatagagaaaggagctgttcttcacttcaatgggaacttaaagccatggttgaagatcgggatagagaagtacaaacctttgtgggagagatacgttgattacacttctccttttatgcaacaatgcaattttcattgatatcttagggtccatagttttacttccacttctagacagctatatcttccacatttggttacagagacacttgcaagagttttgtatgctctagcaccatcacttactgtattttgtgaatgtgatattcaaaattcaatgaagc

SEQ ID NO: 44378 - protein, 580 aa, Arabidopsis thaliana
  peptide (1)..(580): Ceres Seq. ID no. 12488903
  misc_feature (197)..(465): Homolog of NCBI NO: 30908792 NR Description: glycosyl transferase protein A [Populus alba]
  misc_feature (121)..(580): Homolog of NCBI NO: 15233046 NR Description: putative protein
  misc_feature (118)..(577): Homolog of NCBI NO: 7271113 NR Description: 68 kDa protein [Cicer arietinum]
  misc_feature (197)..(465): Homolog of NCBI NO: 33868589 NR Description: glycosyltransferase protein A [Prunus persica]
  misc_feature (110)..(580): Homolog of NCBI NO: 18422837 NR Description: putative protein
  misc_feature (110)..(580): Homolog of NCBI NO: 10177914 NR Description: emb|CAB71043.1~gene_id:MCA23.10~strong similarity
  misc_feature (45)..(577): Homolog of NCBI NO: 15293067 NR Description: unknown protein [Arabidopsis thaliana]
  misc_feature (91)..(580): Homolog of NCBI NO: 32492171 NR Description: OSJNBb0034I13.1 [Oryza sativa (japonica
  misc_feature (107)..(562): Homolog of NCBI NO: 25411994 NR Description: hypothetical protein At2g20810 [imported] -
  misc_feature (45)..(580): Homolog of NCBI NO: 18399484 NR Description: Expressed protein
SEEKEDGRLSYFCFSRQNSQIRILPPSSFIYKIWVLHSSASTVTMRRRGGDSFRRAGRRKISNVVWWVLSGIALLLFFLILSKAGHIEPRPSIPKRRYRNDKFVEGMNMTEEMLSPTSVARQVNDQIALAKAFVVIAKESKNLQFAWDLSAQIRNSQLLLSSAATRRSPLTVLESESTIRDMAVLLYQAQQLHYDSATMIMRLKASIQALEEQMSSVSEKSSKYGQIAAEEVPKSLYCLGVRLTTEWFQNLDLQRTLKERSRVDSKLTDNSLYHFCVFSDNIIATSVVVNSTALNSKAPEKVVFHLVTNEINYAAMKAWFAINMDNLRGVTVEVQKFEDFSWLNASYVPVLKQLQDSDTQSYYFSGHNDDGRTPIKFRNPKYLSMLNHLRFYIPEVFPALKKVVFLDDDVVVQKDLSSLFSIDLNKNVNGAVETCMETFHRYHKYLNYSHPLIRSHFDPDACGWAFGMNVFDLVEWRKRNVTGIYHYWQEKNVDRTLWKLGTLPPGLLTFYGLTEALEASWHILGLGYTNVDARVIEKGAVLHFNGNLKPWLKIGIEKYKPLWERYVDYTSPFMQQCNFH

SEQ ID NO: 44379 - protein, 536 aa, Arabidopsis thaliana
  peptide (1)..(536): Ceres Seq. ID no. 12488904
  misc_feature (153)..(421): Homolog of NCBI NO: 30908792 NR Description: glycosyl transferase protein A [Populus alba]
  misc_feature (77)..(536): Homolog of NCBI NO: 15233046 NR Description: putative protein
  misc_feature (74)..(533): Homolog of NCBI NO: 7271113 NR Description: 68 kDa protein [Cicer arietinum]
  misc_feature (153)..(421): Homolog of NCBI NO: 33868589 NR Description: glycosyltransferase protein A [Prunus persica]
  misc_feature (66)..(536): Homolog of NCBI NO: 18422837 NR Description: putative protein
  misc_feature (66)..(536): Homolog of NCBI NO: 10177914 NR Description: emb|CAB71043.1~gene_id:MCA23.10~strong similarity
  misc_feature (1)..(533): Homolog of NCBI NO: 15293067 NR Description: unknown protein [Arabidopsis thaliana]
  misc_feature (47)..(536): Homolog of NCBI NO: 32492171 NR Description: OSJNBb0034I13.1 [Oryza sativa (japonica
  misc_feature (63)..(518): Homolog of NCBI NO: 25411994 NR Description: hypothetical protein At2g20810 [imported] -
  misc_feature (1)..(536): Homolog of NCBI NO: 18399484 NR Description: Expressed protein
MRRRGGDSFRRAGRRKISNVVWWVLSGIALLLFFLILSKAGHIEPRPSIPKRRYRNDKFVEGMNMTEEMLSPTSVARQVNDQIALAKAFVVIAKESKNLQFAWDLSAQIRNSQLLLSSAATRRSPLTVLESESTIRDMAVLLYQAQQLHYDSATMIMRLKASIQALEEQMSSVSEKSSKYGQIAAEEVPKSLYCLGVRLTTEWFQNLDLQRTLKERSRVDSKLTDNSLYHFCVFSDNIIATSVVVNSTALNSKAPEKVVFHLVTNEINYAAMKAWFAINMDNLRGVTVEVQKFEDFSWLNASYVPVLKQLQDSDTQSYYFSGHNDDGRTPIKFRNPKYLSMLNHLRFYIPEVFPALKKVVFLDDDVVVQKDLSSLFSIDLNKNVNGAVETCMETFHRYHKYLNYSHPLIRSHFDPDACGWAFGMNVFDLVEWRKRNVTGIYHYWQEKNVDRTLWKLGTLPPGLLTFYGLTEALEASWHILGLGYTNVDARVIEKGAVLHFNGNLKPWLKIGIEKYKPLWERYVDYTSPFMQQCNFH

SEQ ID NO: 44380 - protein, 474 aa, Arabidopsis thaliana
  peptide (1)..(474): Ceres Seq. ID no. 12488905
  misc_feature (91)..(359): Homolog of NCBI NO: 30908792 NR Description: glycosyl transferase protein A [Populus alba]
  misc_feature (15)..(474): Homolog of NCBI NO: 15233046 NR Description: putative protein
  misc_feature (12)..(471): Homolog of NCBI NO: 7271113 NR Description: 68 kDa protein [Cicer arietinum]
  misc_feature (91)..(359): Homolog of NCBI NO: 33868589 NR Description: glycosyltransferase protein A [Prunus persica]
  misc_feature (4)..(474): Homolog of NCBI NO: 18422837 NR Description: putative protein
  misc_feature (4)..(474): Homolog of NCBI NO: 10177914 NR Description: emb|CAB71043.1~gene_id:MCA23.10~strong similarity
  misc_feature (1)..(471): Homolog of NCBI NO: 15293067 NR Description: unknown protein [Arabidopsis thaliana]
  misc_feature (1)..(474): Homolog of NCBI NO: 32492171 NR Description: OSJNBb0034I13.1 [Oryza sativa (japonica
  misc_feature (1)..(456): Homolog of NCBI NO: 25411994 NR Description: hypothetical protein At2g20810 [imported] -
  misc_feature (1)..(474): Homolog of NCBI NO: 18399484 NR Description: Expressed protein
MNMTEEMLSPTSVARQVNDQIALAKAFVVIAKESKNLQFAWDLSAQIRNSQLLLSSAATRRSPLTVLESESTIRDMAVLLYQAQQLHYDSATMIMRLKASIQALEEQMSSVSEKSSKYGQIAAEEVPKSLYCLGVRLTTEWFQNLDLQRTLKERSRVDSKLTDNSLYHFCVFSDNIIATSVVVNSTALNSKAPEKVVFHLVTNEINYAAMKAWFAINMDNLRGVTVEVQKFEDFSWLNASYVPVLKQLQDSDTQSYYFSGHNDDGRTPIKFRNPKYLSMLNHLRFYIPEVFPALKKVVFLDDDVVVQKDLSSLFSIDLNKNVNGAVETCMETFHRYHKYLNYSHPLIRSHFDPDACGWAFGMNVFDLVEWRKRNVTGIYHYWQEKNVDRTLWKLGTLPPGLLTFYGLTEALEASWHILGLGYTNVDARVIEKGAVLHFNGNLKPWLKIGIEKYKPLWERYVDYTSPFMQQCNFH

SEQ ID NO: 44381 - DNA, 1278 bp, Arabidopsis thaliana; identical to SEQ ID NO: 37587
  misc_feature (1)..(1278): Ceres Seq. ID no. 13509213
  misc_feature: MA Experiment ID: 108464 Result: Up-regulated in Transcription
  misc_feature: MA Experiment 108464 PARAMETER Experiment Name: At_Germinating_Seeds_cDNA_P Parameter: Age (day) Value: 4 vs. 0
  misc_feature: MA Experiment 108464 PARAMETER Experiment Name: At_Germinating_Seeds_cDNA_P Parameter: Tissue Value: Germinating Seeds
  misc_feature: MA Experiment ID: 108501 Result: Down-regulated in Transcription
  misc_feature: MA Experiment 108501 PARAMETER Experiment Name: At_ap2_floral_buds_cDNA_P Parameter: Plant Line Value: ap2 (Ler.)
  misc_feature: MA Experiment 108501 PARAMETER Experiment Name: At_ap2_floral_buds_cDNA_P Parameter: Tissue Value: Closed Flower
  misc_feature: MA Experiment ID: 108573 Result: Up-regulated in Transcription
  misc_feature: MA Experiment 108573 PARAMETER Experiment Name: At_Drought_cDNA_P Parameter: Timepoint (hr) Value: 6
  misc_feature: MA Experiment 108573 PARAMETER Experiment Name: At_Drought_cDNA_P Parameter: Tissue Value: Aerial
  misc_feature: MA Experiment 108573 PARAMETER Experiment Name: At_Drought_cDNA_P Parameter: Treatment Value: Drought vs. No Drought
  misc_feature: MA Experiment ID: 108574 Result: Down-regulated in Transcription
  misc_feature: MA Experiment 108574 PARAMETER Experiment Name: At_Wounding__cDNA_P Parameter: Timepoint (hr) Value: 1
  misc_feature: MA Experiment 108574 PARAMETER Experiment Name: At_Wounding__cDNA_P Parameter: Tissue Value: Aerial
  misc_feature: MA Experiment 108574 PARAMETER Experiment Name: At_Wounding__cDNA_P Parameter: Treatment Value: Wounding vs. No Wounding
  misc_feature: MA Experiment ID: 108579 Result: Down-regulated in Transcription
  misc_feature: MA Experiment 108579 PARAMETER Experiment Name: At_4deg_Cold_cDNA_P Parameter: Temperature (deg C) Value: 4 vs. 22
  misc_feature: MA Experiment 108579 PARAMETER Experiment Name: At_4deg_Cold_cDNA_P Parameter: Timepoint (hr) Value: 6
  misc_feature: MA Experiment 108579 PARAMETER Experiment Name: At_4deg_Cold_cDNA_P Parameter: Tissue Value: Aerial
  misc_feature: MA Experiment ID: 20000185 Result: Down-regulated in Transcription
  misc_feature: MA Experiment 20000185 PARAMETER Experiment Name: At_Roots__P Parameter: Age (day) Value: 7 vs. 21
  misc_feature: MA Experiment 20000185 PARAMETER Experiment Name: At_Roots__P Parameter: Organism Value: A. thaliana
  misc_feature: MA Experiment 20000185 PARAMETER Experiment Name: At_Roots__P Parameter: Tissue Value: Roots vs. Whole Plant
  misc_feature: MA Experiment ID: 20000213 Result: Down-regulated in Transcription
  misc_feature: MA Experiment 20000213 PARAMETER Experiment Name: At_4deg_Cold_P Parameter: Timepoint (hr) Value: 2
  misc_feature: MA Experiment ID: 20000214 Result: Down-regulated in Transcription
  misc_feature: MA Experiment 20000214 PARAMETER Experiment Name: At_4deg_Cold_P Parameter: Timepoint (hr) Value: 6
  misc_feature: MA Experiment ID: 20000234 Result: Down-regulated in Transcription
  misc_feature: MA Experiment 20000234 PARAMETER Experiment Name: At_Siliques_P Parameter: Age (day) Value: 21
  misc_feature: MA Experiment 20000234 PARAMETER Experiment Name: At_Siliques_P Parameter: Organism Value: A. thaliana
  misc_feature: MA Experiment 20000234 PARAMETER Experiment Name: At_Siliques_P Parameter: Plant Line Value: WS
  misc_feature: MA Experiment 20000234 PARAMETER Experiment Name: At_Siliques_P Parameter: Tissue Value: Less Than 5mm Siliques vs. Whole Plant
  misc_feature: MA Experiment ID: 20000264 Result: Down-regulated in Transcription
  misc_feature: MA Experiment 20000264 PARAMETER Experiment Name: At_Open_Flower_P Parameter: Age (day) Value: 21
  misc_feature: MA Experiment 20000264 PARAMETER Experiment Name: At_Open_Flower_P Parameter: Plant Line Value: WS
  misc_feature: MA Experiment 20000264 PARAMETER Experiment Name: At_Open_Flower_P Parameter: Tissue Value: Open Flower vs. Whole Plant
  misc_feature: MA Experiment ID: 20000265 Result: Down-regulated in Transcription
  misc_feature: MA Experiment 20000265 PARAMETER Experiment Name: At_Open_Flower_P Parameter: Age (day) Value: 21
  misc_feature: MA Experiment 20000265 PARAMETER Experiment Name: At_Open_Flower_P Parameter: Plant Line Value: WS
  misc_feature: MA Experiment 20000265 PARAMETER Experiment Name: At_Open_Flower_P Parameter: Tissue Value: Closed Flower vs. Whole Plant
  misc_feature: MA Experiment ID: 20000268 Result: Down-regulated in Transcription
  misc_feature: MA Experiment 20000268 PARAMETER Experiment Name: At_100mM_NaCl__P Parameter: Age (day) Value: 14
  misc_feature: MA Experiment 20000268 PARAMETER Experiment Name: At_100mM_NaCl__P Parameter: Organism Value: A. thaliana
  misc_feature: MA Experiment 20000268 PARAMETER Experiment Name: At_100mM_NaCl__P Parameter: Plant Line Value: WS
  misc_feature: MA Experiment 20000268 PARAMETER Experiment Name: At_100mM_NaCl__P Parameter: Timepoint (hr) Value: 6
  misc_feature: MA Experiment 20000268 PARAMETER Experiment Name: At_100mM_NaCl__P Parameter: Tissue Value: Whole Plant
  misc_feature: MA Experiment 20000268 PARAMETER Experiment Name: At_100mM_NaCl__P Parameter: Treatment Value: 100mM NaCl vs. No Treatment
  misc_feature: MA Experiment ID: 20000286 Result: Down-regulated in Transcription
  misc_feature: MA Experiment 20000286 PARAMETER Experiment Name: At_Open_Flower_P Parameter: Age (day) Value: 21
  misc_feature: MA Experiment 20000286 PARAMETER Experiment Name: At_Open_Flower_P Parameter: Plant Line Value: WS
  misc_feature: MA Experiment 20000286 PARAMETER Experiment Name: At_Open_Flower_P Parameter: Tissue Value: Half Open vs. Whole Plant
  misc_feature: MA Experiment ID: 20000308 Result: Down-regulated in Transcription
  misc_feature: MA Experiment 20000308 PARAMETER Experiment Name: At_100mM_NaCl__P Parameter: Age (day) Value: 17
  misc_feature: MA Experiment 20000308 PARAMETER Experiment Name: At_100mM_NaCl__P Parameter: Organism Value: A. thaliana
  misc_feature: MA Experiment 20000308 PARAMETER Experiment Name: At_100mM_NaCl__P Parameter: Plant Line Value: WS
  misc_feature: MA Experiment 20000308 PARAMETER Experiment Name: At_100mM_NaCl__P Parameter: Timepoint (hr) Value: 72
  misc_feature: MA Experiment 20000308 PARAMETER Experiment Name: At_100mM_NaCl__P Parameter: Tissue Value: Whole Plant
  misc_feature: MA Experiment 20000308 PARAMETER Experiment Name: At_100mM_NaCl__P Parameter: Treatment Value: 100mM NaCl vs. No Treatment
  misc_feature: MA Experiment ID: 20000439 Result: Down-regulated in Transcription
  misc_feature: MA Experiment 20000439 PARAMETER Experiment Name: At_Roots__P Parameter: Age (day) Value: 14 vs. 21
  misc_feature: MA Experiment 20000439 PARAMETER Experiment Name: At_Roots__P Parameter: Organism Value: A. thaliana
  misc_feature: MA Experiment 20000439 PARAMETER Experiment Name: At_Roots__P Parameter: Tissue Value: Roots vs. Whole Plant
  misc_feature: MA Experiment ID: 20000441 Result: Up-regulated in Transcription
  misc_feature: MA Experiment 20000441 PARAMETER Experiment Name: At_1uM_BR-BRZ__P Parameter: Tissue Value: Shoot Apices
  misc_feature: MA Experiment 20000441 PARAMETER Experiment Name: At_1uM_BR-BRZ__P Parameter: Treatment Value: 1uM BR vs. No Treatment
  misc_feature: MA Experiment ID: 20000443 Result: Up-regulated in Transcription
  misc_feature: MA Experiment 20000443 PARAMETER Experiment Name: At_1uM_BR-BRZ__P Parameter: Tissue Value: Shoot Apices
  misc_feature: MA Experiment 20000443 PARAMETER Experiment Name: At_1uM_BR-BRZ__P Parameter: Treatment Value: 1uM BRZ vs. No Treatment
  misc_feature: MA Experiment ID: 20000573 Result: Up-regulated in Transcription
  misc_feature: MA Experiment 20000573 PARAMETER Experiment Name: At_100uM_ABA_Mutants__P Parameter: Organism Value: A. thaliana
  misc_feature: MA Experiment 20000573 PARAMETER Experiment Name: At_100uM_ABA_Mutants__P Parameter: Plant Line Value: CS22 vs. Ler wt
  misc_feature: MA Experiment 20000573 PARAMETER Experiment Name: At_100uM_ABA_Mutants__P Parameter: Timepoint (hr) Value: N/A
  misc_feature: MA Experiment 20000573 PARAMETER Experiment Name: At_100uM_ABA_Mutants__P Parameter: Tissue Value: Whole Plant
  misc_feature: MA Experiment 20000573 PARAMETER Experiment Name: At_100uM_ABA_Mutants__P Parameter: Treatment Value: None
  misc_feature: MA Experiment ID: 20000794 Result: Down-regulated in Transcription
  misc_feature: MA Experiment 20000794 PARAMETER Experiment Name: At_Petals_P Parameter: Age (day) Value: 23-25 days
  misc_feature: MA Experiment 20000794 PARAMETER Experiment Name: At_Petals_P Parameter: Plant Line Value: WS
  misc_feature: MA Experiment 20000794 PARAMETER Experiment Name: At_Petals_P Parameter: Tissue Value: Petals vs. Whole plant
  misc_feature: MA Experiment ID: 20001248 Result: Up-regulated in Transcription
  misc_feature: MA Experiment 20001248 PARAMETER Experiment Name: At_Far-red-induction_P Parameter: Age (day) Value: 7
  misc_feature: MA Experiment 20001248 PARAMETER Experiment Name: At_Far-red-induction_P Parameter: Light Value: Far-red vs. White
  misc_feature: MA Experiment 20001248 PARAMETER Experiment Name: At_Far-red-induction_P Parameter: Organism Value: A. thaliana
  misc_feature: MA Experiment 20001248 PARAMETER Experiment Name: At_Far-red-induction_P Parameter: Plant Line Value: Columbia
  misc_feature: MA Experiment 20001248 PARAMETER Experiment Name: At_Far-red-induction_P Parameter: Timepoint (hr) Value: 4
  misc_feature: MA Experiment 20001248 PARAMETER Experiment Name: At_Far-red-induction_P Parameter: Tissue Value: Whole Plant
  misc_feature: MA Experiment ID: 20001450 Result: Up-regulated in Transcription
  misc_feature: MA Experiment 20001450 PARAMETER Experiment Name: At_Far-red-induction_P Parameter: Age (day) Value: 7
  misc_feature: MA Experiment 20001450 PARAMETER Experiment Name: At_Far-red-induction_P Parameter: Light Value: Far-red vs. White
  misc_feature: MA Experiment 20001450 PARAMETER Experiment Name: At_Far-red-induction_P Parameter: Organism Value: A. thaliana
  misc_feature: MA Experiment 20001450 PARAMETER Experiment Name: At_Far-red-induction_P Parameter: Plant Line Value: Columbia
  misc_feature: MA Experiment 20001450 PARAMETER Experiment Name: At_Far-red-induction_P Parameter: Timepoint (hr) Value: 8
  misc_feature: MA Experiment 20001450 PARAMETER Experiment Name: At_Far-red-induction_P Parameter: Tissue Value: Whole Plant
  misc_feature: MA Experiment ID: 20001451 Result: Up-regulated in Transcription
  misc_feature: MA Experiment 20001451 PARAMETER Experiment Name: At_Far-red-induction_P Parameter: Age (day) Value: 7
  misc_feature: MA Experiment 20001451 PARAMETER Experiment Name: At_Far-red-induction_P Parameter: Light Value: Far-red vs. White
  misc_feature: MA Experiment 20001451 PARAMETER Experiment Name: At_Far-red-induction_P Parameter: Organism Value: A. thaliana
  misc_feature: MA Experiment 20001451 PARAMETER Experiment Name: At_Far-red-induction_P Parameter: Plant Line Value: Columbia
  misc_feature: MA Experiment 20001451 PARAMETER Experiment Name: At_Far-red-induction_P Parameter: Timepoint (hr) Value: 24
  misc_feature: MA Experiment 20001451 PARAMETER Experiment Name: At_Far-red-induction_P Parameter: Tissue Value: Whole Plant
  misc_feature: MA Experiment ID: 20001556 Result: Down-regulated in Transcription
  misc_feature: MA Experiment 20001556 PARAMETER Experiment Name: At_Drought_Soil_Dry_P Parameter: Age (day) Value: 26
  misc_feature: MA Experiment 20001556 PARAMETER Experiment Name: At_Drought_Soil_Dry_P Parameter: Organism Value: A. thaliana
  misc_feature: MA Experiment 20001556 PARAMETER Experiment Name: At_Drought_Soil_Dry_P Parameter: Plant Line Value: WS
  misc_feature: MA Experiment 20001556 PARAMETER Experiment Name: At_Drought_Soil_Dry_P Parameter: Post Timepoint (hr) Value: None
  misc_feature: MA Experiment 20001556 PARAMETER Experiment Name: At_Drought_Soil_Dry_P Parameter: Post-Treatment Value: None
  misc_feature: MA Experiment 20001556 PARAMETER Experiment Name: At_Drought_Soil_Dry_P Parameter: Timepoint (day) Value: 12
  misc_feature: MA Experiment 20001556 PARAMETER Experiment Name: At_Drought_Soil_Dry_P Parameter: Treatment Value: Drought vs. No Drought
  misc_feature: MA Experiment ID: 20001557 Result: Down-regulated in Transcription
  misc_feature: MA Experiment 20001557 PARAMETER Experiment Name: At_Drought_Soil_Dry_P Parameter: Age (day) Value: 27
  misc_feature: MA Experiment 20001557 PARAMETER Experiment Name: At_Drought_Soil_Dry_P Parameter: Organism Value: A. thaliana
  misc_feature: MA Experiment 20001557 PARAMETER Experiment Name: At_Drought_Soil_Dry_P Parameter: Plant Line Value: WS
  misc_feature: MA Experiment 20001557 PARAMETER Experiment Name: At_Drought_Soil_Dry_P Parameter: Post Timepoint (hr) Value: 3
  misc_feature: MA Experiment 20001557 PARAMETER Experiment Name: At_Drought_Soil_Dry_P Parameter: Post-Treatment Value: Re-Water vs. No Drought
  misc_feature: MA Experiment 20001557 PARAMETER Experiment Name: At_Drought_Soil_Dry_P Parameter: Timepoint (day) Value: 13
  misc_feature: MA Experiment 20001557 PARAMETER Experiment Name: At_Drought_Soil_Dry_P Parameter: Treatment Value: Drought vs. No Drought
  misc_feature: MA Experiment ID: 20001558 Result: Down-regulated in Transcription
  misc_feature: MA Experiment 20001558 PARAMETER Experiment Name: At_Drought_Soil_Dry_P Parameter: Age (day) Value: 27
  misc_feature: MA Experiment 20001558 PARAMETER Experiment Name: At_Drought_Soil_Dry_P Parameter: Organism Value: A. thaliana
  misc_feature: MA Experiment 20001558 PARAMETER Experiment Name: At_Drought_Soil_Dry_P Parameter: Plant Line Value: WS
  misc_feature: MA Experiment 20001558 PARAMETER Experiment Name: At_Drought_Soil_Dry_P Parameter: Post Timepoint (hr) Value: 6
  misc_feature: MA Experiment 20001558 PARAMETER Experiment Name: At_Drought_Soil_Dry_P Parameter: Post-Treatment Value: Re-Water vs. No Drought
  misc_feature: MA Experiment 20001558 PARAMETER Experiment Name: At_Drought_Soil_Dry_P Parameter: Timepoint (day) Value: 13
  misc_feature: MA Experiment 20001558 PARAMETER Experiment Name: At_Drought_Soil_Dry_P Parameter: Treatment Value: Drought vs. No Drought
  misc_feature: MA Experiment ID: 20001559 Result: Down-regulated in Transcription
  misc_feature: MA Experiment 20001559 PARAMETER Experiment Name: At_Drought_Soil_Dry_P Parameter: Age (day) Value: 28
  misc_feature: MA Experiment 20001559 PARAMETER Experiment Name: At_Drought_Soil_Dry_P Parameter: Organism Value: A. thaliana
  misc_feature: MA Experiment 20001559 PARAMETER Experiment Name: At_Drought_Soil_Dry_P Parameter: Plant Line Value: WS
  misc_feature: MA Experiment 20001559 PARAMETER Experiment Name: At_Drought_Soil_Dry_P Parameter: Post Timepoint (hr) Value: 29
  misc_feature: MA Experiment 20001559 PARAMETER Experiment Name: At_Drought_Soil_Dry_P Parameter: Post-Treatment Value: Re-Water vs. No Drought
  misc_feature: MA Experiment 20001559 PARAMETER Experiment Name: At_Drought_Soil_Dry_P Parameter: Timepoint (day) Value: 14
  misc_feature: MA Experiment 20001559 PARAMETER Experiment Name: At_Drought_Soil_Dry_P Parameter: Treatment Value: Drought vs. No Drought
  misc_feature: MA Experiment ID: 20001560 Result: Down-regulated in Transcription
  misc_feature: MA Experiment 20001560 PARAMETER Experiment Name: At_Drought_Soil_Dry_P Parameter: Age (day) Value: 28
  misc_feature: MA Experiment 20001560 PARAMETER Experiment Name: At_Drought_Soil_Dry_P Parameter: Organism Value: A. thaliana
  misc_feature: MA Experiment 20001560 PARAMETER Experiment Name: At_Drought_Soil_Dry_P Parameter: Plant Line Value: WS
  misc_feature: MA Experiment 20001560 PARAMETER Experiment Name: At_Drought_Soil_Dry_P Parameter: Post Timepoint (hr) Value: None
  misc_feature: MA Experiment 20001560 PARAMETER Experiment Name: At_Drought_Soil_Dry_P Parameter: Post-Treatment Value: None
  misc_feature: MA Experiment 20001560 PARAMETER Experiment Name: At_Drought_Soil_Dry_P Parameter: Timepoint (day) Value: 14
  misc_feature: MA Experiment 20001560 PARAMETER Experiment Name: At_Drought_Soil_Dry_P Parameter: Treatment Value: Drought vs. No Drought
  misc_feature: MA Experiment ID: 20001757 Result: Up-regulated in Transcription
  misc_feature: MA Experiment 20001757 PARAMETER Experiment Name: At_50mM_NH4NO3_L-to-H_P Parameter: Timepoint (hr) Value: 6
  misc_feature: MA Experiment 20001757 PARAMETER Experiment Name: At_50mM_NH4NO3_L-to-H_P Parameter: Tissue Value: Leaf
  misc_feature: MA Experiment 20001757 PARAMETER Experiment Name: At_50mM_NH4NO3_L-to-H_P Parameter: Treatment Value: 50mM NH4NO3 vs 100mM Mannitol
  misc_feature: MA Experiment ID: 20001906 Result: Down-regulated in Transcription
  misc_feature: MA Experiment 20001906 PARAMETER Experiment Name: At_Drought_Reproduction_P Parameter: Age (day) Value: 35
  misc_feature: MA Experiment 20001906 PARAMETER Experiment Name: At_Drought_Reproduction_P Parameter: Organism Value: A. thaliana
  misc_feature: MA Experiment 20001906 PARAMETER Experiment Name: At_Drought_Reproduction_P Parameter: Plant Line Value: WS
  misc_feature: MA Experiment 20001906 PARAMETER Experiment Name: At_Drought_Reproduction_P Parameter: Timepoint (day) Value: 5
  misc_feature: MA Experiment 20001906 PARAMETER Experiment Name: At_Drought_Reproduction_P Parameter: Tissue Value: Siliques
  misc_feature: MA Experiment 20001906 PARAMETER Experiment Name: At_Drought_Reproduction_P Parameter: Treatment Value: Drought vs. No Drought
  misc_feature: MA Experiment ID: 20001908 Result: Down-regulated in Transcription
  misc_feature: MA Experiment 20001908 PARAMETER Experiment Name: At_Drought_Reproduction_P Parameter: Age (day) Value: 40
  misc_feature: MA Experiment 20001908 PARAMETER Experiment Name: At_Drought_Reproduction_P Parameter: Organism Value: A. thaliana
  misc_feature: MA Experiment 20001908 PARAMETER Experiment Name: At_Drought_Reproduction_P Parameter: Plant Line Value: WS
  misc_feature: MA Experiment 20001908 PARAMETER Experiment Name: At_Drought_Reproduction_P Parameter: Timepoint (day) Value: 10
  misc_feature: MA Experiment 20001908 PARAMETER Experiment Name: At_Drought_Reproduction_P Parameter: Tissue Value: Siliques
  misc_feature: MA Experiment 20001908 PARAMETER Experiment Name: At_Drought_Reproduction_P Parameter: Treatment Value: Drought vs. No Drought

SEQ ID NO: 44382 - protein, 284 aa, Arabidopsis thaliana; identical to SEQ ID NO: 37588
  peptide (1)..(284): Ceres Seq. ID no. 13509214
  misc_feature (196)..(282): Pfam Name: 5'-AMP-activated protein kinase, beta subunit, Pfam Description: 5'-AMP-activated protein kinase, beta subunit,
  misc_feature (196)..(282): Pfam Name: 5'-AMP-activated protein kinase, beta subunit, Pfam Description: 5'-AMP-activated protein kinase, beta subunit,
  misc_feature (69)..(282): Homolog of NCBI NO: 12018316 NR Description: AMP-activated protein kinase beta-2 regulatory
  misc_feature (29)..(282): Homolog of NCBI NO: 4885561 NR Description: protein kinase, AMP-activated, beta 2
  misc_feature (62)..(284): Homolog of NCBI NO: 11935162 NR Description: SNF1-related kinase complex anchoring protein
  misc_feature (47)..(284): Homolog of NCBI NO: 22324436 NR Description: AKIN beta1-like protein [Oryza sativa (japonica
  misc_feature (38)..(284): Homolog of NCBI NO: 15234895 NR Description: kinase like protein [Arabidopsis thaliana]
  misc_feature (69)..(282): Homolog of NCBI NO: 12018316 NR Description: AMP-activated protein kinase beta-2 regulatory
  misc_feature (62)..(284): Homolog of NCBI NO: 11935162 NR Description: SNF1-related kinase complex anchoring protein
  misc_feature (38)..(284): Homolog of NCBI NO: 15234895 NR Description: kinase like protein [Arabidopsis thaliana]
  misc_feature (1)..(284): Homolog of NCBI NO: 6686782 NR Description: AKIN gamma [Arabidopsis thaliana]
  misc_feature (1)..(284): Homolog of NCBI NO: 15242175 NR Description: AMPKBI (5'-AMP-activated protein kinase, beta
  misc_feature (1)..(284): Homolog of NCBI NO: 5702015 NR Description: GAL83 protein [Solanum tuberosum]
  misc_feature (1)..(284): Homolog of NCBI NO: 6686784 NR Description: AKIN beta2 [Arabidopsis thaliana]
  misc_feature (23)..(242): Homolog of NCBI NO: 29725558 NR Description: SNF1 kinase complex anchoring protein
  misc_feature (47)..(284): Homolog of NCBI NO: 22324436 NR Description: AKIN beta1-like protein [Oryza sativa (japonica
  misc_feature (29)..(282): Homolog of NCBI NO: 4885561 NR Description: protein kinase, AMP-activated, beta 2
  misc_feature (23)..(242): Homolog of NCBI NO: 29725558 NR Description: SNF1 kinase complex anchoring protein
  misc_feature (1)..(284): Homolog of NCBI NO: 6686784 NR Description: AKIN beta2 [Arabidopsis thaliana]
  misc_feature (1)..(284): Homolog of NCBI NO: 5702015 NR Description: GAL83 protein [Solanum tuberosum]
  misc_feature (1)..(284): Homolog of NCBI NO: 15242175 NR Description: AMPKBI (5'-AMP-activated protein kinase, beta
  misc_feature (1)..(284): Homolog of NCBI NO: 6686782 NR Description: AKIN gamma [Arabidopsis thaliana]

SEQ ID NO: 44383 - protein, 239 aa, Arabidopsis thaliana; identical to SEQ ID NO: 37589
  peptide (1)..(239): Ceres Seq. ID no. 13509215
  misc_feature (151)..(237): Pfam Name: 5'-AMP-activated protein kinase, beta subunit, Pfam Description: 5'-AMP-activated protein kinase, beta subunit,
  misc_feature (151)..(237): Pfam Name: 5'-AMP-activated protein kinase, beta subunit, Pfam Description: 5'-AMP-activated protein kinase, beta subunit,
  misc_feature (24)..(237): Homolog of NCBI NO: 12018316 NR Description: AMP-activated protein kinase beta-2 regulatory
  misc_feature (1)..(237): Homolog of NCBI NO: 4885561 NR Description: protein kinase, AMP-activated, beta 2
  misc_feature (17)..(239): Homolog of NCBI NO: 11935162 NR Description: SNF1-related kinase complex anchoring protein
  misc_feature (2)..(239): Homolog of NCBI NO: 22324436 NR Description: AKIN beta1-like protein [Oryza sativa (japonica
  misc_feature (1)..(239): Homolog of NCBI NO: 15234895 NR Description: kinase like protein [Arabidopsis thaliana]
  misc_feature (24)..(237): Homolog of NCBI NO: 12018316 NR Description: AMP-activated protein kinase beta-2 regulatory
  misc_feature (17)..(239): Homolog of NCBI NO: 11935162 NR Description: SNF1-related kinase complex anchoring protein
  misc_feature (1)..(239): Homolog of NCBI NO: 15234895 NR Description: kinase like protein [Arabidopsis thaliana]
  misc_feature (1)..(239): Homolog of NCBI NO: 6686782 NR Description: AKIN gamma [Arabidopsis thaliana]
  misc_feature (1)..(239): Homolog of NCBI NO: 15242175 NR Description: AMPKBI (5'-AMP-activated protein kinase, beta
  misc_feature (1)..(239): Homolog of NCBI NO: 5702015 NR Description: GAL83 protein [Solanum tuberosum]
  misc_feature (1)..(239): Homolog of NCBI NO: 6686784 NR Description: AKIN beta2 [Arabidopsis thaliana]
  misc_feature (1)..(197): Homolog of NCBI NO: 29725558 NR Description: SNF1 kinase complex anchoring protein
  misc_feature (2)..(239): Homolog of NCBI NO: 22324436 NR Description: AKIN beta1-like protein [Oryza sativa (japonica
  misc_feature (1)..(237): Homolog of NCBI NO: 4885561 NR Description: protein kinase, AMP-activated, beta 2
  misc_feature (1)..(197): Homolog of NCBI NO: 29725558 NR Description: SNF1 kinase complex anchoring protein
  misc_feature (1)..(239): Homolog of NCBI NO: 6686784 NR Description: AKIN beta2 [Arabidopsis thaliana]
  misc_feature (1)..(239): Homolog of NCBI NO: 5702015 NR Description: GAL83 protein [Solanum tuberosum]
  misc_feature (1)..(239): Homolog of NCBI NO: 15242175 NR Description: AMPKBI (5'-AMP-activated protein kinase, beta
  misc_feature (1)..(239): Homolog of NCBI NO: 6686782 NR Description: AKIN gamma [Arabidopsis thaliana]

SEQ ID NO: 44384 - DNA, 872 bp, Arabidopsis thaliana
  misc_feature (1)..(872): Ceres Seq. ID no. 12466061
  misc_feature: MA Experiment ID: 20000184 Result: Down-regulated in Transcription
  misc_feature: MA Experiment 20000184 PARAMETER Experiment Name: At_Shoots__P Parameter: Age (day) Value: 7
  misc_feature: MA Experiment 20000184 PARAMETER Experiment Name: At_Shoots__P Parameter: Tissue Value: Shoots vs. Whole Plant
aaaaaccaaaccaaacccatagggttgtgttgttgctgttctgttcctatcgaccacggcggcgacgaggcggagaagaccgacaaagcggagaagccagcttcgaaaccctctagcatttattttttaaaagcgaaattcattttaagggttttggtcatggcttcaatctcgacttggttccgatacatggctcacaagctcgagtattccctcactctcagtctcaagagtcataggagtaataagctgagtgaccgggaacttattcaaataatctgcaagaatctgttctatgggaaaataacctacttacactcggataaaggaccagaaatgtcaccaaccatgacagcaaatgaaaacacacttcttattcgtaagataccaattgctaataccaggtttgtattcattggagatgctgtcgtcttaaaggatccaaacgattcagataagtatntggtaagaagattagcagctgtagaaggattcgaaatggtatcgggtgatgaaaaagaggagccttttgttcttgagaagaatcagtgttgggtaacagctgaaaaccaggagctcaaagctaaggaagcatatgatagtagaacatttggtccagtttcaacagcagacattgttggaagagctatatactgtctgagaacagccgtcgatcacggacctgttcgaaacagccaaactgcaatgggacaagattctccaatcctggccgtggaattggacgtggacgagatggctaagaaccataaggcatagagagacgcactttcttgtgtttgtttattattgtcaaagctaaaattgccttctttgattgagatttgagaaaacaataaatcattacaacaatg

SEQ ID NO: 44385 - protein, 258 aa, Arabidopsis thaliana
  peptide (1)..(258): Ceres Seq. ID no. 12466062
  misc_feature (54)..(257): Homolog of NCBI NO: 38344766 NR Description: OSJNBa0068L06.9 [Oryza sativa (japonica
  misc_feature (54)..(258): Homolog of NCBI NO: 25406903 NR Description: hypothetical protein [imported] - Arabidopsis
  misc_feature (54)..(258): Homolog of NCBI NO: 15221421 NR Description: hypothetical protein
  misc_feature (54)..(232): Homolog of NCBI NO: 25408133 NR Description: hypothetical protein At2g31140 [imported] -
  misc_feature (54)..(258): Homolog of NCBI NO: 30684839 NR Description: expressed protein [Arabidopsis thaliana]
  misc_feature (155)..(155): Xaa is any aa, unknown or other
KNQTKPIGLCCCCSVPIDHGGDEAEKTDKAEKPASKPSSIYFLKAKFILRVLVMASISTWFRYMAHKLEYSLTLSLKSHRSNKLSDRELIQIICKNLFYGKITYLHSDKGPEMSPTMTANENTLLIRKIPIANTRFVFIGDAVVLKDPNDSDKYXVRRLAAVEGFEMVSGDEKEEPFVLEKNQCWVTAENQELKAKEAYDSRTFGPVSTADIVGRAIYCLRTAVDHGPVRNSQTAMGQDSPILAVELDVDEMAKNHKA

SEQ ID NO: 44386 - protein, 205 aa, Arabidopsis thaliana
  peptide (1)..(205): Ceres Seq. ID no. 12466063
  misc_feature (1)..(204): Homolog of NCBI NO: 38344766 NR Description: OSJNBa0068L06.9 [Oryza sativa (japonica
  misc_feature (1)..(205): Homolog of NCBI NO: 25406903 NR Description: hypothetical protein [imported] - Arabidopsis
  misc_feature (1)..(205): Homolog of NCBI NO: 15221421 NR Description: hypothetical protein
  misc_feature (1)..(179): Homolog of NCBI NO: 25408133 NR Description: hypothetical protein At2g31140 [imported] -
  misc_feature (1)..(205): Homolog of NCBI NO: 30684839 NR Description: expressed protein [Arabidopsis thaliana]
  misc_feature (102)..(102): Xaa is any aa, unknown or other
MASISTWFRYMAHKLEYSLTLSLKSHRSNKLSDRELIQIICKNLFYGKITYLHSDKGPEMSPTMTANENTLLIRKIPIANTRFVFIGDAVVLKDPNDSDKYXVRRLAAVEGFEMVSGDEKEEPFVLEKNQCWVTAENQELKAKEAYDSRTFGPVSTADIVGRAIYCLRTAVDHGPVRNSQTAMGQDSPILAVELDVDEMAKNHKA

SEQ ID NO: 44387 - protein, 195 aa, Arabidopsis thaliana
  peptide (1)..(195): Ceres Seq. ID no. 12466064
  misc_feature (1)..(194): Homolog of NCBI NO: 38344766 NR Description: OSJNBa0068L06.9 [Oryza sativa (japonica
  misc_feature (1)..(195): Homolog of NCBI NO: 25406903 NR Description: hypothetical protein [imported] - Arabidopsis
  misc_feature (1)..(195): Homolog of NCBI NO: 15221421 NR Description: hypothetical protein
  misc_feature (1)..(169): Homolog of NCBI NO: 25408133 NR Description: hypothetical protein At2g31140 [imported] -
  misc_feature (1)..(195): Homolog of NCBI NO: 30684839 NR Description: expressed protein [Arabidopsis thaliana]
  misc_feature (92)..(92): Xaa is any aa, unknown or other
MAHKLEYSLTLSLKSHRSNKLSDRELIQIICKNLFYGKITYLHSDKGPEMSPTMTANENTLLIRKIPIANTRFVFIGDAVVLKDPNDSDKYXVRRLAAVEGFEMVSGDEKEEPFVLEKNQCWVTAENQELKAKEAYDSRTFGPVSTADIVGRAIYCLRTAVDHGPVRNSQTAMGQDSPILAVELDVDEMAKNHKA

SEQ ID NO: 44388 - DNA, 1241 bp, Arabidopsis thaliana
  misc_feature (1)..(1241): Ceres Seq. ID no. 12466057
  misc_feature: MA Experiment ID: 20000179 Result: Down-regulated in Transcription
  misc_feature: MA Experiment 20000179 PARAMETER Experiment Name: At_Germinating_Seeds_P Parameter: Age (hr) Value: 6 vs. 0
  misc_feature: MA Experiment 20000179 PARAMETER Experiment Name: At_Germinating_Seeds_P Parameter: Tissue Value: Germinating Seeds
  misc_feature: MA Experiment ID: 20000180 Result: Down-regulated in Transcription
  misc_feature: MA Experiment 20000180 PARAMETER Experiment Name: At_Germinating_Seeds_P Parameter: Age (hr) Value: 24 vs. 0
  misc_feature: MA Experiment 20000180 PARAMETER Experiment Name: At_Germinating_Seeds_P Parameter: Tissue Value: Germinating Seeds
  misc_feature: MA Experiment ID: 20000495 Result: Up-regulated in Transcription
  misc_feature: MA Experiment 20000495 PARAMETER Experiment Name: At_Guard_Cells_P Parameter: Harvest Date Value: 8/2/2002
  misc_feature: MA Experiment 20000495 PARAMETER Experiment Name: At_Guard_Cells_P Parameter: Organism Value: A. thaliana
  misc_feature: MA Experiment 20000495 PARAMETER Experiment Name: At_Guard_Cells_P Parameter: Tissue Value: Guard Cells vs. Leaves
  misc_feature: MA Experiment ID: 20001248 Result: Up-regulated in Transcription
  misc_feature: MA Experiment 20001248 PARAMETER Experiment Name: At_Far-red-induction_P Parameter: Age (day) Value: 7
  misc_feature: MA Experiment 20001248 PARAMETER Experiment Name: At_Far-red-induction_P Parameter: Light Value: Far-red vs. White
  misc_feature: MA Experiment 20001248 PARAMETER Experiment Name: At_Far-red-induction_P Parameter: Organism Value: A. thaliana
  misc_feature: MA Experiment 20001248 PARAMETER Experiment Name: At_Far-red-induction_P Parameter: Plant Line Value: Columbia
  misc_feature: MA Experiment 20001248 PARAMETER Experiment Name: At_Far-red-induction_P Parameter: Timepoint (hr) Value: 4
  misc_feature: MA Experiment 20001248 PARAMETER Experiment Name: At_Far-red-induction_P Parameter: Tissue Value: Whole Plant
  misc_feature: MA Experiment ID: 20001451 Result: Up-regulated in Transcription
  misc_feature: MA Experiment 20001451 PARAMETER Experiment Name: At_Far-red-induction_P Parameter: Age (day) Value: 7
  misc_feature: MA Experiment 20001451 PARAMETER Experiment Name: At_Far-red-induction_P Parameter: Light Value: Far-red vs. White
  misc_feature: MA Experiment 20001451 PARAMETER Experiment Name: At_Far-red-induction_P Parameter: Organism Value: A. thaliana
  misc_feature: MA Experiment 20001451 PARAMETER Experiment Name: At_Far-red-induction_P Parameter: Plant Line Value: Columbia
  misc_feature: MA Experiment 20001451 PARAMETER Experiment Name: At_Far-red-induction_P Parameter: Timepoint (hr) Value: 24
  misc_feature: MA Experiment 20001451 PARAMETER Experiment Name: At_Far-red-induction_P Parameter: Tissue Value: Whole Plant
  misc_feature: MA Experiment ID: 20001557 Result: Up-regulated in Transcription
  misc_feature: MA Experiment 20001557 PARAMETER Experiment Name: At_Drought_Soil_Dry_P Parameter: Age (day) Value: 27
  misc_feature: MA Experiment 20001557 PARAMETER Experiment Name: At_Drought_Soil_Dry_P Parameter: Organism Value: A. thaliana
  misc_feature: MA Experiment 20001557 PARAMETER Experiment Name: At_Drought_Soil_Dry_P Parameter: Plant Line Value: WS
  misc_feature: MA Experiment 20001557 PARAMETER Experiment Name: At_Drought_Soil_Dry_P Parameter: Post Timepoint (hr) Value: 3
  misc_feature: MA Experiment 20001557 PARAMETER Experiment Name: At_Drought_Soil_Dry_P Parameter: Post-Treatment Value: Re-Water vs. No Drought
  misc_feature: MA Experiment 20001557 PARAMETER Experiment Name: At_Drought_Soil_Dry_P Parameter: Timepoint (day) Value: 13
  misc_feature: MA Experiment 20001557 PARAMETER Experiment Name: At_Drought_Soil_Dry_P Parameter: Treatment Value: Drought vs. No Drought
aaaaaccctaatcttcatcttcatcttctcccgccgtcggccgtaagaggtttcgaagaagcaaagtgagcaacaatggcgggaggcaagatcaggaaggagaagcccaaggcttcgaatagagcaccatcgaaccattaccaaggaggaatatcgttccacaaatcgaaagggcaacatatccttaagaaccctctgcttgtggattcgatcgttcagaaagctggtatcaagagtaccgatgtgattctcgagatcggtcccggtactggaaacttgaccaagaagcttctagaagctggcaaagaagttatcgccgtcgaacttgactctcgtatggttctcgagcttcagcgccgttttcaaggaactcccttctctaaccgcttgaaggtaattcaaggggatgtgctcaagacggagcttcccaggtttgacatatgtgtggcaaacattccgtatcagatatcatctcctctcacattcaaacttctcttccatccaacaagcttcagatgtgctgtcatcatgtaccagagggaattcgccatgagactcgttgcccagcctggtgacaatctctactgccgtctctctgtcaacactcagctttatgccagagtctcccacctcctcaaagtcggcaagaacaatttccgccctcctccaaaggtggattcttccgttgtcaggatcgaaccaaggaggcctggccctcaggttaacaagaaggagtgggatgggttcttaagagtctgtttcatcagaaagaacaaaaccttgggatccattttcaagcaaaagtctgttctttccatgctggagaagaacttcaagactcttcaggccgtactagcttcgttgcagaacaatggagaacctgctttgaacaccacctccatggatcttggtgaccagagcatgggaatggaagatgacgacaacgaaatggatgacgatgatatggagatggatgagggagaaggagacggaggagaaacatcagagttcaaggagaaagttatgaatgtcttgaaggaaggtggtttcgaggagaagagatcttcaaagctatcacaacaagagtttttgtatcttctttccttgttcaacaagtctggtattcacttcacataatcgttttgtggtgtgaaagttttgtccttacttattactattgttcaagttttaacatttggaagtgaaaatcaatcaaagtctttgagttactgacgcaaccc

SEQ ID NO: 44389 - protein, 353 aa, Arabidopsis thaliana
  peptide (1)..(353): Ceres Seq. ID no. 12466058
  misc_feature (20)..(269): Homolog of NCBI NO: 34854204 NR Description: similar to RIKEN cDNA 1500031M22 [Rattus
  misc_feature (311)..(352): Homolog of NCBI NO: 21358017 NR Description: CG11837-PA [Drosophila melanogaster]
  misc_feature (5)..(259): Homolog of NCBI NO: 21358017 NR Description: CG11837-PA [Drosophila melanogaster]
  misc_feature (308)..(353): Homolog of NCBI NO: 27151490 NR Description: Probable dimethyladenosine transferase
  misc_feature (24)..(254): Homolog of NCBI NO: 27151490 NR Description: Probable dimethyladenosine transferase
  misc_feature (308)..(353): Homolog of NCBI NO: 7657198 NR Description: putative dimethyladenosine transferase [Homo
  misc_feature (24)..(254): Homolog of NCBI NO: 7657198 NR Description: putative dimethyladenosine transferase [Homo
  misc_feature (308)..(353): Homolog of NCBI NO: 21313560 NR Description: RIKEN cDNA 1500031M22 [Mus musculus]
  misc_feature (1)..(296): Homolog of NCBI NO: 21313560 NR Description: RIKEN cDNA 1500031M22 [Mus musculus]
  misc_feature (1)..(353): Homolog of NCBI NO: 15226591 NR Description: putative dimethyladenosine transferase
MAGGKIRKEKPKASNRAPSNHYQGGISFHKSKGQHILKNPLLVDSIVQKAGIKSTDVILEIGPGTGNLTKKLLEAGKEVIAVELDSRMVLELQRRFQGTPFSNRLKVIQGDVLKTELPRFDICVANIPYQISSPLTFKLLFHPTSFRCAVIMYQREFAMRLVAQPGDNLYCRLSVNTQLYARVSHLLKVGKNNFRPPPKVDSSVVRIEPRRPGPQVNKKEWDGFLRVCFIRKNKTLGSIFKQKSVLSMLEKNFKTLQAVLASLQNNGEPALNTTSMDLGDQSMGMEDDDNEMDDDDMEMDEGEGDGGETSEFKEKVMNVLKEGGFEEKRSSKLSQQEFLYLLSLFNKSGIHFT

SEQ ID NO: 44390 - protein, 266 aa, Arabidopsis thaliana
  peptide (1)..(266): Ceres Seq. ID no. 12466059
  misc_feature (1)..(182): Homolog of NCBI NO: 34854204 NR Description: similar to RIKEN cDNA 1500031M22 [Rattus
  misc_feature (224)..(265): Homolog of NCBI NO: 21358017 NR Description: CG11837-PA [Drosophila melanogaster]
  misc_feature (1)..(172): Homolog of NCBI NO: 21358017 NR Description: CG11837-PA [Drosophila melanogaster]
  misc_feature (221)..(266): Homolog of NCBI NO: 27151490 NR Description: Probable dimethyladenosine transferase
  misc_feature (1)..(167): Homolog of NCBI NO: 27151490 NR Description: Probable dimethyladenosine transferase
  misc_feature (221)..(266): Homolog of NCBI NO: 7657198 NR Description: putative dimethyladenosine transferase [Homo
  misc_feature (1)..(167): Homolog of NCBI NO: 7657198 NR Description: putative dimethyladenosine transferase [Homo
  misc_feature (221)..(266): Homolog of NCBI NO: 21313560 NR Description: RIKEN cDNA 1500031M22 [Mus musculus]
  misc_feature (1)..(209): Homolog of NCBI NO: 21313560 NR Description: RIKEN cDNA 1500031M22 [Mus musculus]
  misc_feature (1)..(266): Homolog of NCBI NO: 15226591 NR Description: putative dimethyladenosine transferase
MVLELQRRFQGTPFSNRLKVIQGDVLKTELPRFDICVANIPYQISSPLTFKLLFHPTSFRCAVIMYQREFAMRLVAQPGDNLYCRLSVNTQLYARVSHLLKVGKNNFRPPPKVDSSVVRIEPRRPGPQVNKKEWDGFLRVCFIRKNKTLGSIFKQKSVLSMLEKNFKTLQAVLASLQNNGEPALNTTSMDLGDQSMGMEDDDNEMDDDDMEMDEGEGDGGETSEFKEKVMNVLKEGGFEEKRSSKLSQQEFLYLLSLFNKSGIHFT

SEQ ID NO: 44391 - protein, 202 aa, Arabidopsis thaliana
  peptide (1)..(202): Ceres Seq. ID no. 12466060
  misc_feature (1)..(118): Homolog of NCBI NO: 34854204 NR Description: similar to RIKEN cDNA 1500031M22 [Rattus
  misc_feature (160)..(201): Homolog of NCBI NO: 21358017 NR Description: CG11837-PA [Drosophila melanogaster]
  misc_feature (1)..(108): Homolog of NCBI NO: 21358017 NR Description: CG11837-PA [Drosophila melanogaster]
  misc_feature (157)..(202): Homolog of NCBI NO: 27151490 NR Description: Probable dimethyladenosine transferase
  misc_feature (1)..(103): Homolog of NCBI NO: 27151490 NR Description: Probable dimethyladenosine transferase
  misc_feature (157)..(202): Homolog of NCBI NO: 7657198 NR Description: putative dimethyladenosine transferase [Homo
  misc_feature (1)..(103): Homolog of NCBI NO: 7657198 NR Description: putative dimethyladenosine transferase [Homo
  misc_feature (157)..(202): Homolog of NCBI NO: 21313560 NR Description: RIKEN cDNA 1500031M22 [Mus musculus]
  misc_feature (1)..(145): Homolog of NCBI NO: 21313560 NR Description: RIKEN cDNA 1500031M22 [Mus musculus]
  misc_feature (1)..(202): Homolog of NCBI NO: 15226591 NR Description: putative dimethyladenosine transferase
MYQREFAMRLVAQPGDNLYCRLSVNTQLYARVSHLLKVGKNNFRPPPKVDSSVVRIEPRRPGPQVNKKEWDGFLRVCFIRKNKTLGSIFKQKSVLSMLEKNFKTLQAVLASLQNNGEPALNTTSMDLGDQSMGMEDDDNEMDDDDMEMDEGEGDGGETSEFKEKVMNVLKEGGFEEKRSSKLSQQEFLYLLSLFNKSGIHFT

SEQ ID NO: 44392 - DNA, 2380 bp, Arabidopsis thaliana
  misc_feature (1)..(2380): Ceres Seq. ID no. 13646246
  misc_feature: MA Experiment ID: 20000171 Result: Down-regulated in Transcription
  misc_feature: MA Experiment 20000171 PARAMETER Experiment Name: At_42deg_Heat_P Parameter: Age (day) Value: 14
  misc_feature: MA Experiment 20000171 PARAMETER Experiment Name: At_42deg_Heat_P Parameter: Organism Value: A. thaliana
  misc_feature: MA Experiment 20000171 PARAMETER Experiment Name: At_42deg_Heat_P Parameter: Plant Line Value: WS
  misc_feature: MA Experiment 20000171 PARAMETER Experiment Name: At_42deg_Heat_P Parameter: Temperature (deg C) Value: 42 vs. 22
  misc_feature: MA Experiment 20000171 PARAMETER Experiment Name: At_42deg_Heat_P Parameter: Timepoint (hr) Value: 1
  misc_feature: MA Experiment 20000171 PARAMETER Experiment Name: At_42deg_Heat_P Parameter: Tissue Value: Aerial
atcagataaatttccattgattgccaacaaaaatggcgactttaaagccacccgaatctcaattactaaaaaccctaacatcaatcctcacatcagagaaaacccatttcctcgaaaccctaaatccctacattcctcaaatcacacagcctctccttacctctctcctctcttctccttcactcgctaagaaaccagaaaccctagtatctttcttccaatgggctcaaacttcaatccccgaagcatttccatcggattcacctcttccacttatctccgtcgtccgttctcttctctctcaccacaaattcgccgacgccaagtctcttctcgtctcctatatccgcacctccgatgcatctctctctctttgcaactctctccttcacccgaatcttcatctatcacctccaccttctaaagctctattcgacattgctcttagtgcttatcttcatgagggaaagcctcacgttgcgttacagatcttccagaagatgattcgattaaagcttaagccaaatctgctcacttgcaatactcttctcattggtttagtcaggtacccttctagcttctctatctcaagtgctagagaagtgtttgatgatatggttaagattggtgtttcgctaaatgtgcaaactttcaatgttttggttaatgggtattgcttggaaggtaagcttgaggatgctttaggaatgttagagaggatggttagtgaattcaaggttaatcctgataatgttacttacaatacgattttgaaagcaatgtctaagaaaggtcgtttgagtgatcttaaggaattgttgttggatatgaagaagaatggattggtgccaaatagggttacttataataatttagtgtatggttactgtaagttaggttcgttgaaagaagcatttcagattgtggagctgatgaagcaaactaatgtattaccggatctttgtacctataacattttgatcaatgggctttgcaatgcggggagtatgagggaaggtcttgaattaatggatgcgatgaagagtttgaagttacagcccgatgtggttacttacaatacattgattgatgggtgtttcgaattggggcttagtttggaggctaggaagttgatggagcaaatggaaaatgatggagtcaaagctaaccaagtgactcataatatctctcttaagtggctttgtaaggaagagaaaagggaagcggttactagaaaggttaaggaattggtggacatgcacgggttttctcctgatatagtaacttatcatactctgattaaagcgtatttgaaagtaggagatttgagtggtgcccttgagatgatgcgtgagatggggcaaaaagggattaagatgaatactattacccttaataccattcttgatgctctatgtaaggagaggaaacttgatgaggctcacaatttgctgaatagtgcgcacaaacgaggatttattgttgacgaggttacttatggcacattaatcatgggattcttcagggaagaaaaagtggagaaagctttggagatgtgggatgagatgaagaaggtaaagattactcctacagtgagcacgttcaactctttaattggaggtctctgtcaccatggaaaaactgagctagcaatggagaaattcgatgagcttgctgagagtggtttgcttcctgatgacagtactttcaattcaatcatcctcggatactgcaaagaaggacgagttgagaaagcattcgagttttataatgaatccatcaaacactctttcaagcctgataactatacatgcaacattctcctcaatggtctttgtaaggaaggtatgacagaaaaggctctcaatttcttcaacacgctaatagaggagagagaggttgatacagttacatacaacacgatgatctcggctttctgcaaggacaagaagttaaaagaagcatatgaccttctatcagaaatggaggagaaaggactagagcctgatcggtttacatacaacagttttatcagtttgcttatggaagatggtaagctgagtgaaacagatgaattgttaaagaaattttccggaaagtttggatcgatgaagcgggatttacaggtagagacagagaaaaatccagcaacaagtgaatcaaaggaggaacttaacactgaagctattgcttattcagatgtaatagatgaactttgtagtagaggaagattaaaggagcattctagatcttacactagttgaaggagaaactccttttttgtggtttcttttttgtatttcgattttctcaaagcatacttattacttgttacagaaagacattgtaatgtagtttttatgtgatgatgatgattatt

SEQ ID NO: 44393 - protein, 743 aa, Arabidopsis thaliana
  peptide (1)..(743): Ceres Seq. ID no. 13646247
  misc_feature (557)..(591): Pfam Name: PPR repeat Pfam Description: PPR repeat
  misc_feature (122)..(617): Homolog of NCBI NO: 15218325 NR Description: pentatricopeptide (PPR) repeat-containing protein
  misc_feature (59)..(675): Homolog of NCBI NO: 15241049 NR Description: pentatricopeptide (PPR) repeat-containing protein
  misc_feature (142)..(685): Homolog of NCBI NO: 22531122 NR Description: putative membrane-associated salt-inducible
  misc_feature (142)..(685): Homolog of NCBI NO: 15221515 NR Description: pentatricopeptide (PPR) repeat-containing protein
  misc_feature (150)..(685): Homolog of NCBI NO: 25404380 NR Description: hypothetical protein F16P17.7 [imported] -
  misc_feature (134)..(685): Homolog of NCBI NO: 30840221 NR Description: fertility restorer [Raphanus sativus]
  misc_feature (136)..(685): Homolog of NCBI NO: 15221674 NR Description: pentatricopeptide (PPR) repeat-containing protein
  misc_feature (134)..(685): Homolog of NCBI NO: 30840327 NR Description: fertility restorer homologue [Raphanus sativus]
  misc_feature (142)..(685): Homolog of NCBI NO: 6630464 NR Description: F23N19.4 [Arabidopsis thaliana]
  misc_feature (142)..(685): Homolog of NCBI NO: 15221549 NR Description: pentatricopeptide (PPR) repeat-containing protein
MATLKPPESQLLKTLTSILTSEKTHFLETLNPYIPQITQPLLTSLLSSPSLAKKPETLVSFFQWAQTSIPEAFPSDSPLPLISVVRSLLSHHKFADAKSLLVSYIRTSDASLSLCNSLLHPNLHLSPPPSKALFDIALSAYLHEGKPHVALQIFQKMIRLKLKPNLLTCNTLLIGLVRYPSSFSISSAREVFDDMVKIGVSLNVQTFNVLVNGYCLEGKLEDALGMLERMVSEFKVNPDNVTYNTILKAMSKKGRLSDLKELLLDMKKNGLVPNRVTYNNLVYGYCKLGSLKEAFQIVELMKQTNVLPDLCTYNILINGLCNAGSMREGLELMDAMKSLKLQPDVVTYNTLIDGCFELGLSLEARKLMEQMENDGVKANQVTHNISLKWLCKEEKREAVTRKVKELVDMHGFSPDIVTYHTLIKAYLKVGDLSGALEMMREMGQKGIKMNTITLNTILDALCKERKLDEAHNLLNSAHKRGFIVDEVTYGTLIMGFFREEKVEKALEMWDEMKKVKITPTVSTFNSLIGGLCHHGKTELAMEKFDELAESGLLPDDSTFNSIILGYCKEGRVEKAFEFYNESIKHSFKPDNYTCNILLNGLCKEGMTEKALNFFNTLIEEREVDTVTYNTMISAFCKDKKLKEAYDLLSEMEEKGLEPDRFTYNSFISLLMEDGKLSETDELLKKFSGKFGSMKRDLQVETEKNPATSESKEELNTEAIAYSDVIDELCSRGRLKEHSRSYTS

SEQ ID NO: 44394 - protein, 587 aa, Arabidopsis thaliana
  peptide (1)..(587): Ceres Seq. ID no. 13646248
  misc_feature (401)..(435): Pfam Name: PPR repeat Pfam Description: PPR repeat
  misc_feature (1)..(461): Homolog of NCBI NO: 15218325 NR Description: pentatricopeptide (PPR) repeat-containing protein
  misc_feature (1)..(519): Homolog of NCBI NO: 15241049 NR Description: pentatricopeptide (PPR) repeat-containing protein
  misc_feature (1)..(529): Homolog of NCBI NO: 22531122 NR Description: putative membrane-associated salt-inducible
  misc_feature (1)..(529): Homolog of NCBI NO: 15221515 NR Description: pentatricopeptide (PPR) repeat-containing protein
  misc_feature (1)..(529): Homolog of NCBI NO: 25404380 NR Description: hypothetical protein F16P17.7 [imported] -
  misc_feature (1)..(529): Homolog of NCBI NO: 30840221 NR Description: fertility restorer [Raphanus sativus]
  misc_feature (1)..(529): Homolog of NCBI NO: 15221674 NR Description: pentatricopeptide (PPR) repeat-containing protein
  misc_feature (1)..(529): Homolog of NCBI NO: 30840327 NR Description: fertility restorer homologue [Raphanus sativus]
  misc_feature (1)..(529): Homolog of NCBI NO: 6630464 NR Description: F23N19.4 [Arabidopsis thaliana]
  misc_feature (1)..(529): Homolog of NCBI NO: 15221549 NR Description: pentatricopeptide (PPR) repeat-containing protein
MIRLKLKPNLLTCNTLLIGLVRYPSSFSISSAREVFDDMVKIGVSLNVQTFNVLVNGYCLEGKLEDALGMLERMVSEFKVNPDNVTYNTILKAMSKKGRLSDLKELLLDMKKNGLVPNRVTYNNLVYGYCKLGSLKEAFQIVELMKQTNVLPDLCTYNILINGLCNAGSMREGLELMDAMKSLKLQPDVVTYNTLIDGCFELGLSLEARKLMEQMENDGVKANQVTHNISLKWLCKEEKREAVTRKVKELVDMHGFSPDIVTYHTLIKAYLKVGDLSGALEMMREMGQKGIKMNTITLNTILDALCKERKLDEAHNLLNSAHKRGFIVDEVTYGTLIMGFFREEKVEKALEMWDEMKKVKITPTVSTFNSLIGGLCHHGKTELAMEKFDELAESGLLPDDSTFNSIILGYCKEGRVEKAFEFYNESIKHSFKPDNYTCNILLNGLCKEGMTEKALNFFNTLIEEREVDTVTYNTMISAFCKDKKLKEAYDLLSEMEEKGLEPDRFTYNSFISLLMEDGKLSETDELLKKFSGKFGSMKRDLQVETEKNPATSESKEELNTEAIAYSDVIDELCSRGRLKEHSRSYTS

SEQ ID NO: 44395 - protein, 549 aa, Arabidopsis thaliana
  peptide (1)..(549): Ceres Seq. ID no. 13646249
  misc_feature (363)..(397): Pfam Name: PPR repeat Pfam Description: PPR repeat
  misc_feature (1)..(423): Homolog of NCBI NO: 15218325 NR Description: pentatricopeptide (PPR) repeat-containing protein
  misc_feature (1)..(481): Homolog of NCBI NO: 15241049 NR Description: pentatricopeptide (PPR) repeat-containing protein
  misc_feature (1)..(491): Homolog of NCBI NO: 22531122 NR Description: putative membrane-associated salt-inducible
  misc_feature (1)..(491): Homolog of NCBI NO: 15221515 NR Description: pentatricopeptide (PPR) repeat-containing protein
  misc_feature (1)..(491): Homolog of NCBI NO: 25404380 NR Description: hypothetical protein F16P17.7 [imported] -
  misc_feature (1)..(491): Homolog of NCBI NO: 30840221 NR Description: fertility restorer [Raphanus sativus]
  misc_feature (1)..(491): Homolog of NCBI NO: 15221674 NR Description: pentatricopeptide (PPR) repeat-containing protein
  misc_feature (1)..(491): Homolog of NCBI NO: 30840327 NR Description: fertility restorer homologue [Raphanus sativus]
  misc_feature (1)..(491): Homolog of NCBI NO: 6630464 NR Description: F23N19.4 [Arabidopsis thaliana]
  misc_feature (1)..(491): Homolog of NCBI NO: 15221549 NR Description: pentatricopeptide (PPR) repeat-containing protein
MVKIGVSLNVQTFNVLVNGYCLEGKLEDALGMLERMVSEFKVNPDNVTYNTILKAMSKKGRLSDLKELLLDMKKNGLVPNRVTYNNLVYGYCKLGSLKEAFQIVELMKQTNVLPDLCTYNILINGLCNAGSMREGLELMDAMKSLKLQPDVVTYNTLIDGCFELGLSLEARKLMEQMENDGVKANQVTHNISLKWLCKEEKREAVTRKVKELVDMHGFSPDIVTYHTLIKAYLKVGDLSGALEMMREMGQKGIKMNTITLNTILDALCKERKLDEAHNLLNSAHKRGFIVDEVTYGTLIMGFFREEKVEKALEMWDEMKKVKITPTVSTFNSLIGGLCHHGKTELAMEKFDELAESGLLPDDSTFNSIILGYCKEGRVEKAFEFYNESIKHSFKPDNYTCNILLNGLCKEGMTEKALNFFNTLIEEREVDTVTYNTMISAFCKDKKLKEAYDLLSEMEEKGLEPDRFTYNSFISLLMEDGKLSETDELLKKFSGKFGSMKRDLQVETEKNPATSESKEELNTEAIAYSDVIDELCSRGRLKEHSRSYTS

SEQ ID NO: 44396 - DNA, 1108 bp, Arabidopsis thaliana; identical to SEQ ID NO: 23129
  misc_feature (1)..(1108): Ceres Seq. ID no. 13646289
  misc_feature: MA Experiment ID: 108434 Result: Down-regulated in Transcription
  misc_feature: MA Experiment 108434 PARAMETER Experiment Name: At_Root_Tips_cDNA_P Parameter: Tissue Value: Root Tips
  misc_feature: MA Experiment ID: 108577 Result: Up-regulated in Transcription
  misc_feature: MA Experiment 108577 PARAMETER Experiment Name: At_42deg_Heat_cDNA_P Parameter: Temperature (deg C) Value: 42 vs. 22
  misc_feature: MA Experiment 108577 PARAMETER Experiment Name: At_42deg_Heat_cDNA_P Parameter: Timepoint (hr) Value: 6
  misc_feature: MA Experiment 108577 PARAMETER Experiment Name: At_42deg_Heat_cDNA_P Parameter: Tissue Value: Aerial
  misc_feature: MA Experiment ID: 108668 Result: Up-regulated in Transcription
  misc_feature: MA Experiment 108668 PARAMETER Experiment Name: At_2mM_SA_cDNA_P Parameter: Plant Line Value: WS
  misc_feature: MA Experiment 108668 PARAMETER Experiment Name: At_2mM_SA_cDNA_P Parameter: Timepoint (hr) Value: 6
  misc_feature: MA Experiment 108668 PARAMETER Experiment Name: At_2mM_SA_cDNA_P Parameter: Treatment Value: 2mM SA vs. No Treatment
  misc_feature: MA Experiment ID: 20000069 Result: Down-regulated in Transcription
  misc_feature: MA Experiment 20000069 PARAMETER Experiment Name: At_100uM_ABA_Mutants_cDNA_P Parameter: Plant Line Value: CS23
  misc_feature: MA Experiment 20000069 PARAMETER Experiment Name: At_100uM_ABA_Mutants_cDNA_P Parameter: Timepoint (hr) Value: 6
  misc_feature: MA Experiment 20000069 PARAMETER Experiment Name: At_100uM_ABA_Mutants_cDNA_P Parameter: Tissue Value: Aerial
  misc_feature: MA Experiment 20000069 PARAMETER Experiment Name: At_100uM_ABA_Mutants_cDNA_P Parameter: Treatment Value: 100uM ABA vs. No Treatment
  misc_feature: MA Experiment ID: 20000070 Result: Down-regulated in Transcription
  misc_feature: MA Experiment 20000070 PARAMETER Experiment Name: At_100uM_ABA_Mutants_cDNA_P Parameter: Plant Line Value: CS24
  misc_feature: MA Experiment 20000070 PARAMETER Experiment Name: At_100uM_ABA_Mutants_cDNA_P Parameter: Timepoint (hr) Value: 6
  misc_feature: MA Experiment 20000070 PARAMETER Experiment Name: At_100uM_ABA_Mutants_cDNA_P Parameter: Tissue Value: Aerial
  misc_feature: MA Experiment 20000070 PARAMETER Experiment Name: At_100uM_ABA_Mutants_cDNA_P Parameter: Treatment Value: 100uM ABA vs. No Treatment
  misc_feature: MA Experiment ID: 20000071 Result: Down-regulated in Transcription
  misc_feature: MA Experiment 20000071 PARAMETER Experiment Name: At_100uM_ABA_Mutants_cDNA_P Parameter: Plant Line Value: CS8104
  misc_feature: MA Experiment 20000071 PARAMETER Experiment Name: At_100uM_ABA_Mutants_cDNA_P Parameter: Timepoint (hr) Value: 6
  misc_feature: MA Experiment 20000071 PARAMETER Experiment Name: At_100uM_ABA_Mutants_cDNA_P Parameter: Tissue Value: Aerial
  misc_feature: MA Experiment 20000071 PARAMETER Experiment Name: At_100uM_ABA_Mutants_cDNA_P Parameter: Treatment Value: 100uM ABA vs. No Treatment
  misc_feature: MA Experiment ID: 20000072 Result: Down-regulated in Transcription
  misc_feature: MA Experiment 20000072 PARAMETER Experiment Name: At_100uM_ABA_Mutants_cDNA_P Parameter: Plant Line Value: CS8105
  misc_feature: MA Experiment 20000072 PARAMETER Experiment Name: At_100uM_ABA_Mutants_cDNA_P Parameter: Timepoint (hr) Value: 6
  misc_feature: MA Experiment 20000072 PARAMETER Experiment Name: At_100uM_ABA_Mutants_cDNA_P Parameter: Tissue Value: Aerial
  misc_feature: MA Experiment 20000072 PARAMETER Experiment Name: At_100uM_ABA_Mutants_cDNA_P Parameter: Treatment Value: 100uM ABA vs. No Treatment
  misc_feature: MA Experiment ID: 20000086 Result: Down-regulated in Transcription
  misc_feature: MA Experiment 20000086 PARAMETER Experiment Name: At_100uM_ABA_Mutants_cDNA_P Parameter: Plant Line Value: CS22
  misc_feature: MA Experiment 20000086 PARAMETER Experiment Name: At_100uM_ABA_Mutants_cDNA_P Parameter: Timepoint (hr) Value: 6
  misc_feature: MA Experiment 20000086 PARAMETER Experiment Name: At_100uM_ABA_Mutants_cDNA_P Parameter: Tissue Value: Aerial
  misc_feature: MA Experiment 20000086 PARAMETER Experiment Name: At_100uM_ABA_Mutants_cDNA_P Parameter: Treatment Value: 100uM ABA vs. No Treatment
  misc_feature: MA Experiment ID: 20000089 Result: Down-regulated in Transcription
  misc_feature: MA Experiment ID: 20000111 Result: Up-regulated in Transcription
  misc_feature: MA Experiment 20000111 PARAMETER Experiment Name: At_42deg_Heat_cDNA_P Parameter: Temperature (deg C) Value: 42 vs. 22
  misc_feature: MA Experiment 20000111 PARAMETER Experiment Name: At_42deg_Heat_cDNA_P Parameter: Timepoint (hr) Value: 6
  misc_feature: MA Experiment 20000111 PARAMETER Experiment Name: At_42deg_Heat_cDNA_P Parameter: Tissue Value: Aerial
  misc_feature: MA Experiment ID: 20000113 Result: Up-regulated in Transcription
  misc_feature: MA Experiment 20000113 PARAMETER Experiment Name: At_42deg_Heat_cDNA_P Parameter: Temperature (deg C) Value: 42 vs. 22
  misc_feature: MA Experiment 20000113 PARAMETER Experiment Name: At_42deg_Heat_cDNA_P Parameter: Timepoint (hr) Value: 8
  misc_feature: MA Experiment 20000113 PARAMETER Experiment Name: At_42deg_Heat_cDNA_P Parameter: Tissue Value: Aerial

SEQ ID NO: 44397 - protein, 266 aa, Arabidopsis thaliana; identical to SEQ ID NO: 23130
  peptide (1)..(266): Ceres Seq. ID no. 13646290
  misc_feature (147)..(258): Homolog of NCBI NO: 25365874 NR Description: hypothetical protein AT4g05060 [imported] -
  misc_feature (28)..(258): Homolog of NCBI NO: 21593103 NR Description: membrane associated protein-like protein
  misc_feature (28)..(258): Homolog of NCBI NO: 18412787 NR Description: VAMP (vesicle-associated membrane
  misc_feature (27)..(265): Homolog of NCBI NO: 7485721 NR Description: hypothetical protein F18E5.70 - Arabidopsis
  misc_feature (17)..(265): Homolog of NCBI NO: 34394013 NR Description: putative 27k vesicle-associated membrane
  misc_feature (27)..(265): Homolog of NCBI NO: 18415696 NR Description: VAMP (vesicle-associated membrane
  misc_feature (1)..(266): Homolog of NCBI NO: 1800147 NR Description: membrane associated protein [Arabidopsis thaliana]
  misc_feature (247)..(266): Homolog of NCBI NO: 8809582 NR Description: membrane associated protein [Arabidopsis thaliana]
  misc_feature (1)..(246): Homolog of NCBI NO: 8809582 NR Description: membrane associated protein [Arabidopsis thaliana]
  misc_feature (1)..(266): Homolog of NCBI NO: 18423592 NR Description: VAMP (vesicle-associated membrane
  misc_feature (147)..(258): Homolog of NCBI NO: 25365874 NR Description: hypothetical protein AT4g05060 [imported] -
  misc_feature (28)..(258): Homolog of NCBI NO: 21593103 NR Description: membrane associated protein-like protein
  misc_feature (28)..(258): Homolog of NCBI NO: 18412787 NR Description: VAMP (vesicle-associated membrane
  misc_feature (27)..(265): Homolog of NCBI NO: 7485721 NR Description: hypothetical protein F18E5.70 - Arabidopsis
  misc_feature (17)..(265): Homolog of NCBI NO: 34394013 NR Description: putative 27k vesicle-associated membrane
  misc_feature (27)..(265): Homolog of NCBI NO: 18415696 NR Description: VAMP (vesicle-associated membrane
  misc_feature (1)..(266): Homolog of NCBI NO: 1800147 NR Description: membrane associated protein [Arabidopsis thaliana]
  misc_feature (247)..(266): Homolog of NCBI NO: 8809582 NR Description: membrane associated protein [Arabidopsis thaliana]
  misc_feature (1)..(246): Homolog of NCBI NO: 8809582 NR Description: membrane associated protein [Arabidopsis thaliana]
  misc_feature (1)..(266): Homolog of NCBI NO: 18423592 NR Description: VAMP (vesicle-associated membrane

SEQ ID NO: 44398 - protein, 204 aa, Arabidopsis thaliana; identical to SEQ ID NO: 23131
  peptide (1)..(204): Ceres Seq. ID no. 13646291
  misc_feature (85)..(196): Homolog of NCBI NO: 25365874 NR Description: hypothetical protein AT4g05060 [imported] -
  misc_feature (1)..(196): Homolog of NCBI NO: 21593103 NR Description: membrane associated protein-like protein
  misc_feature (1)..(196): Homolog of NCBI NO: 18412787 NR Description: VAMP (vesicle-associated membrane
  misc_feature (1)..(203): Homolog of NCBI NO: 7485721 NR Description: hypothetical protein F18E5.70 - Arabidopsis
  misc_feature (1)..(203): Homolog of NCBI NO: 34394013 NR Description: putative 27k vesicle-associated membrane
  misc_feature (1)..(203): Homolog of NCBI NO: 18415696 NR Description: VAMP (vesicle-associated membrane
  misc_feature (1)..(204): Homolog of NCBI NO: 1800147 NR Description: membrane associated protein [Arabidopsis thaliana]
  misc_feature (185)..(204): Homolog of NCBI NO: 8809582 NR Description: membrane associated protein [Arabidopsis thaliana]
  misc_feature (1)..(184): Homolog of NCBI NO: 8809582 NR Description: membrane associated protein [Arabidopsis thaliana]
  misc_feature (1)..(204): Homolog of NCBI NO: 18423592 NR Description: VAMP (vesicle-associated membrane
  misc_feature (85)..(196): Homolog of NCBI NO: 25365874 NR Description: hypothetical protein AT4g05060 [imported] -
  misc_feature (1)..(196): Homolog of NCBI NO: 21593103 NR Description: membrane associated protein-like protein
  misc_feature (1)..(196): Homolog of NCBI NO: 18412787 NR Description: VAMP (vesicle-associated membrane
  misc_feature (1)..(203): Homolog of NCBI NO: 7485721 NR Description: hypothetical protein F18E5.70 - Arabidopsis
  misc_feature (1)..(203): Homolog of NCBI NO: 34394013 NR Description: putative 27k vesicle-associated membrane
  misc_feature (1)..(203): Homolog of NCBI NO: 18415696 NR Description: VAMP (vesicle-associated membrane
  misc_feature (1)..(204): Homolog of NCBI NO: 1800147 NR Description: membrane associated protein [Arabidopsis thaliana]
  misc_feature (185)..(204): Homolog of NCBI NO: 8809582 NR Description: membrane associated protein [Arabidopsis thaliana]
  misc_feature (1)..(184): Homolog of NCBI NO: 8809582 NR Description: membrane associated protein [Arabidopsis thaliana]
  misc_feature (1)..(204): Homolog of NCBI NO: 18423592 NR Description: VAMP (vesicle-associated membrane

SEQ ID NO: 44399 - protein, 144 aa, Arabidopsis thaliana; identical to SEQ ID NO: 23132
  peptide (1)..(144): Ceres Seq. ID no. 13646292
  misc_feature (25)..(136): Homolog of NCBI NO: 25365874 NR Description: hypothetical protein AT4g05060 [imported] -
  misc_feature (1)..(136): Homolog of NCBI NO: 21593103 NR Description: membrane associated protein-like protein
  misc_feature (1)..(136): Homolog of NCBI NO: 18412787 NR Description: VAMP (vesicle-associated membrane
  misc_feature (1)..(143): Homolog of NCBI NO: 7485721 NR Description: hypothetical protein F18E5.70 - Arabidopsis
  misc_feature (1)..(143): Homolog of NCBI NO: 34394013 NR Description: putative 27k vesicle-associated membrane
  misc_feature (1)..(143): Homolog of NCBI NO: 18415696 NR Description: VAMP (vesicle-associated membrane
  misc_feature (1)..(144): Homolog of NCBI NO: 1800147 NR Description: membrane associated protein [Arabidopsis thaliana]
  misc_feature (125)..(144): Homolog of NCBI NO: 8809582 NR Description: membrane associated protein [Arabidopsis thaliana]
  misc_feature (1)..(124): Homolog of NCBI NO: 8809582 NR Description: membrane associated protein [Arabidopsis thaliana]
  misc_feature (1)..(144): Homolog of NCBI NO: 18423592 NR Description: VAMP (vesicle-associated membrane
  misc_feature (25)..(136): Homolog of NCBI NO: 25365874 NR Description: hypothetical protein AT4g05060 [imported] -
  misc_feature (1)..(136): Homolog of NCBI NO: 21593103 NR Description: membrane associated protein-like protein
  misc_feature (1)..(136): Homolog of NCBI NO: 18412787 NR Description: VAMP (vesicle-associated membrane
  misc_feature (1)..(143): Homolog of NCBI NO: 7485721 NR Description: hypothetical protein F18E5.70 - Arabidopsis
  misc_feature (1)..(143): Homolog of NCBI NO: 34394013 NR Description: putative 27k vesicle-associated membrane
  misc_feature (1)..(143): Homolog of NCBI NO: 18415696 NR Description: VAMP (vesicle-associated membrane
  misc_feature (1)..(144): Homolog of NCBI NO: 1800147 NR Description: membrane associated protein [Arabidopsis thaliana]
  misc_feature (125)..(144): Homolog of NCBI NO: 8809582 NR Description: membrane associated protein [Arabidopsis thaliana]
  misc_feature (1)..(124): Homolog of NCBI NO: 8809582 NR Description: membrane associated protein [Arabidopsis thaliana]
  misc_feature (1)..(144): Homolog of NCBI NO: 18423592 NR Description: VAMP (vesicle-associated membrane

SEQ ID NO: 44400 - DNA, 1402 bp, Arabidopsis thaliana
  misc_feature (1)..(1402): Ceres Seq. ID no. 14304428
  misc_feature: MA Experiment ID: 108435 Result: Up-regulated in Transcription
  misc_feature: MA Experiment 108435 PARAMETER Experiment Name: At_stm_Mutants_cDNA_P Parameter: Plant Line Value: wt Landsburg vs stm
  misc_feature: MA Experiment 108435 PARAMETER Experiment Name: At_stm_Mutants_cDNA_P Parameter: Tissue Value: Shoot Apical Meristem Region
  misc_feature: MA Experiment ID: 108462 Result: Up-regulated in Transcription
  misc_feature: MA Experiment 108462 PARAMETER Experiment Name: At_Germinating_Seeds_cDNA_P Parameter: Age (day) Value: 2 vs. 0
  misc_feature: MA Experiment 108462 PARAMETER Experiment Name: At_Germinating_Seeds_cDNA_P Parameter: Tissue Value: Germinating Seeds
  misc_feature: MA Experiment ID: 108463 Result: Up-regulated in Transcription
  misc_feature: MA Experiment 108463 PARAMETER Experiment Name: At_Germinating_Seeds_cDNA_P Parameter: Age (day) Value: 3 vs. 0
  misc_feature: MA Experiment 108463 PARAMETER Experiment Name: At_Germinating_Seeds_cDNA_P Parameter: Tissue Value: Germinating Seeds
  misc_feature: MA Experiment ID: 108464 Result: Up-regulated in Transcription
  misc_feature: MA Experiment 108464 PARAMETER Experiment Name: At_Germinating_Seeds_cDNA_P Parameter: Age (day) Value: 4 vs. 0
  misc_feature: MA Experiment 108464 PARAMETER Experiment Name: At_Germinating_Seeds_cDNA_P Parameter: Tissue Value: Germinating Seeds
  misc_feature: MA Experiment ID: 108573 Result: Up-regulated in Transcription
  misc_feature: MA Experiment 108573 PARAMETER Experiment Name: At_Drought_cDNA_P Parameter: Timepoint (hr) Value: 6
  misc_feature: MA Experiment 108573 PARAMETER Experiment Name: At_Drought_cDNA_P Parameter: Tissue Value: Aerial
  misc_feature: MA Experiment 108573 PARAMETER Experiment Name: At_Drought_cDNA_P Parameter: Treatment Value: Drought vs. No Drought
  misc_feature: MA Experiment ID: 108667 Result: Up-regulated in Transcription
  misc_feature: MA Experiment 108667 PARAMETER Experiment Name: At_2mM_SA_cDNA_P Parameter: Plant Line Value: WS
  misc_feature: MA Experiment 108667 PARAMETER Experiment Name: At_2mM_SA_cDNA_P Parameter: Timepoint (hr) Value: 1
  misc_feature: MA Experiment 108667 PARAMETER Experiment Name: At_2mM_SA_cDNA_P Parameter: Treatment Value: 2mM SA vs. No Treatment
  misc_feature: MA Experiment ID: 20000113 Result: Down-regulated in Transcription
  misc_feature: MA Experiment 20000113 PARAMETER Experiment Name: At_42deg_Heat_cDNA_P Parameter: Temperature (deg C) Value: 42 vs. 22
  misc_feature: MA Experiment 20000113 PARAMETER Experiment Name: At_42deg_Heat_cDNA_P Parameter: Timepoint (hr) Value: 8
  misc_feature: MA Experiment 20000113 PARAMETER Experiment Name: At_42deg_Heat_cDNA_P Parameter: Tissue Value: Aerial
  misc_feature: MA Experiment ID: 20000184 Result: Down-regulated in Transcription
  misc_feature: MA Experiment 20000184 PARAMETER Experiment Name: At_Shoots__P Parameter: Age (day) Value: 7
  misc_feature: MA Experiment 20000184 PARAMETER Experiment Name: At_Shoots__P Parameter: Tissue Value: Shoots vs. Whole Plant
  misc_feature: MA Experiment ID: 20000185 Result: Down-regulated in Transcription
  misc_feature: MA Experiment 20000185 PARAMETER Experiment Name: At_Roots__P Parameter: Age (day) Value: 7 vs. 21
  misc_feature: MA Experiment 20000185 PARAMETER Experiment Name: At_Roots__P Parameter: Organism Value: A. thaliana
  misc_feature: MA Experiment 20000185 PARAMETER Experiment Name: At_Roots__P Parameter: Tissue Value: Roots vs. Whole Plant
  misc_feature: MA Experiment ID: 20000234 Result: Down-regulated in Transcription
  misc_feature: MA Experiment 20000234 PARAMETER Experiment Name: At_Siliques_P Parameter: Age (day) Value: 21
  misc_feature: MA Experiment 20000234 PARAMETER Experiment Name: At_Siliques_P Parameter: Organism Value: A. thaliana
  misc_feature: MA Experiment 20000234 PARAMETER Experiment Name: At_Siliques_P Parameter: Plant Line Value: WS
  misc_feature: MA Experiment 20000234 PARAMETER Experiment Name: At_Siliques_P Parameter: Tissue Value: Less Than 5mm Siliques vs. Whole Plant
  misc_feature: MA Experiment ID: 20000235 Result: Down-regulated in Transcription
  misc_feature: MA Experiment 20000235 PARAMETER Experiment Name: At_Siliques_P Parameter: Age (day) Value: 21
  misc_feature: MA Experiment 20000235 PARAMETER Experiment Name: At_Siliques_P Parameter: Organism Value: A. thaliana
  misc_feature: MA Experiment 20000235 PARAMETER Experiment Name: At_Siliques_P Parameter: Plant Line Value: WS
  misc_feature: MA Experiment 20000235 PARAMETER Experiment Name: At_Siliques_P Parameter: Tissue Value: 5-10mm Siliques vs. Whole Plant
  misc_feature: MA Experiment ID: 20000264 Result: Down-regulated in Transcription
  misc_feature: MA Experiment 20000264 PARAMETER Experiment Name: At_Open_Flower_P Parameter: Age (day) Value: 21
  misc_feature: MA Experiment 20000264 PARAMETER Experiment Name: At_Open_Flower_P Parameter: Plant Line Value: WS
  misc_feature: MA Experiment 20000264 PARAMETER Experiment Name: At_Open_Flower_P Parameter: Tissue Value: Open Flower vs. Whole Plant
  misc_feature: MA Experiment ID: 20000265 Result: Down-regulated in Transcription
  misc_feature: MA Experiment 20000265 PARAMETER Experiment Name: At_Open_Flower_P Parameter: Age (day) Value: 21
  misc_feature: MA Experiment 20000265 PARAMETER Experiment Name: At_Open_Flower_P Parameter: Plant Line Value: WS
  misc_feature: MA Experiment 20000265 PARAMETER Experiment Name: At_Open_Flower_P Parameter: Tissue Value: Closed Flower vs. Whole Plant
  misc_feature: MA Experiment ID: 20000286 Result: Down-regulated in Transcription
  misc_feature: MA Experiment 20000286 PARAMETER Experiment Name: At_Open_Flower_P Parameter: Age (day) Value: 21
  misc_feature: MA Experiment 20000286 PARAMETER Experiment Name: At_Open_Flower_P Parameter: Plant Line Value: WS
  misc_feature: MA Experiment 20000286 PARAMETER Experiment Name: At_Open_Flower_P Parameter: Tissue Value: Half Open vs. Whole Plant
  misc_feature: MA Experiment ID: 20000438 Result: Down-regulated in Transcription
  misc_feature: MA Experiment 20000438 PARAMETER Experiment Name: At_Shoots__P Parameter: Age (day) Value: 14
  misc_feature: MA Experiment 20000438 PARAMETER Experiment Name: At_Shoots__P Parameter: Tissue Value: Shoots vs. Whole Plant
  misc_feature: MA Experiment ID: 20000439 Result: Down-regulated in Transcription
  misc_feature: MA Experiment 20000439 PARAMETER Experiment Name: At_Roots__P Parameter: Age (day) Value: 14 vs. 21
  misc_feature: MA Experiment 20000439 PARAMETER Experiment Name: At_Roots__P Parameter: Organism Value: A. thaliana
  misc_feature: MA Experiment 20000439 PARAMETER Experiment Name: At_Roots__P Parameter: Tissue Value: Roots vs. Whole Plant
  misc_feature: MA Experiment ID: 20000573 Result: Down-regulated in Transcription
  misc_feature: MA Experiment 20000573 PARAMETER Experiment Name: At_100uM_ABA_Mutants__P Parameter: Organism Value: A. thaliana
  misc_feature: MA Experiment 20000573 PARAMETER Experiment Name: At_100uM_ABA_Mutants__P Parameter: Plant Line Value: CS22 vs. Ler wt
  misc_feature: MA Experiment 20000573 PARAMETER Experiment Name: At_100uM_ABA_Mutants__P Parameter: Timepoint (hr) Value: N/A
  misc_feature: MA Experiment 20000573 PARAMETER Experiment Name: At_100uM_ABA_Mutants__P Parameter: Tissue Value: Whole Plant
  misc_feature: MA Experiment 20000573 PARAMETER Experiment Name: At_100uM_ABA_Mutants__P Parameter: Treatment Value: None
  misc_feature: MA Experiment ID: 20000574 Result: Down-regulated in Transcription
  misc_feature: MA Experiment 20000574 PARAMETER Experiment Name: At_100uM_ABA_Mutants__P Parameter: Organism Value: A. thaliana
  misc_feature: MA Experiment 20000574 PARAMETER Experiment Name: At_100uM_ABA_Mutants__P Parameter: Plant Line Value: CS23 vs. Ler wt
  misc_feature: MA Experiment 20000574 PARAMETER Experiment Name: At_100uM_ABA_Mutants__P Parameter: Timepoint (hr) Value: N/A
  misc_feature: MA Experiment 20000574 PARAMETER Experiment Name: At_100uM_ABA_Mutants__P Parameter: Tissue Value: Whole Plant
  misc_feature: MA Experiment 20000574 PARAMETER Experiment Name: At_100uM_ABA_Mutants__P Parameter: Treatment Value: None
  misc_feature: MA Experiment ID: 20001247 Result: Up-regulated in Transcription
  misc_feature: MA Experiment 20001247 PARAMETER Experiment Name: At_Far-red-induction_P Parameter: Age (day) Value: 7
  misc_feature: MA Experiment 20001247 PARAMETER Experiment Name: At_Far-red-induction_P Parameter: Light Value: Far-red vs. White
  misc_feature: MA Experiment 20001247 PARAMETER Experiment Name: At_Far-red-induction_P Parameter: Organism Value: A. thaliana
  misc_feature: MA Experiment 20001247 PARAMETER Experiment Name: At_Far-red-induction_P Parameter: Plant Line Value: Columbia
  misc_feature: MA Experiment 20001247 PARAMETER Experiment Name: At_Far-red-induction_P Parameter: Timepoint (hr) Value: 1
  misc_feature: MA Experiment 20001247 PARAMETER Experiment Name: At_Far-red-induction_P Parameter: Tissue Value: Whole Plant
  misc_feature: MA Experiment ID: 20001248 Result: Up-regulated in Transcription
  misc_feature: MA Experiment 20001248 PARAMETER Experiment Name: At_Far-red-induction_P Parameter: Age (day) Value: 7
  misc_feature: MA Experiment 20001248 PARAMETER Experiment Name: At_Far-red-induction_P Parameter: Light Value: Far-red vs. White
  misc_feature: MA Experiment 20001248 PARAMETER Experiment Name: At_Far-red-induction_P Parameter: Organism Value: A. thaliana
  misc_feature: MA Experiment 20001248 PARAMETER Experiment Name: At_Far-red-induction_P Parameter: Plant Line Value: Columbia
  misc_feature: MA Experiment 20001248 PARAMETER Experiment Name: At_Far-red-induction_P Parameter: Timepoint (hr) Value: 4
  misc_feature: MA Experiment 20001248 PARAMETER Experiment Name: At_Far-red-induction_P Parameter: Tissue Value: Whole Plant
atgggttttatgtttactagttgtttttgctgtttgttcttaaatttagagtaacaatatcaaaaaggacaaatcttgatattgctttgattgctgttgtgtatgtatgtgtttttatagtgagagaagaaaaaaaagcacaatctttgaatggactggaatttcaaacttagctctggttatttatctggattcgatcaagaaccagatttatcaccaatggatggttcgatctcgtttggtgggtcgtcacagtcaaaagcggatttttcatttgatctaaaacttggaagaaacattggaaactcttcctctgtttttggtgatacagagcaagtgattagtcttagtaagtggaaagatagtgctttagctaaaccagaaggttcaagaagctcgagttcaaagagaacaaggaatggtgttggaaccaaccagatgccgatttgtcttgttgatggatgtgattctgattttagtaattgtagagagtatcataagagacataaagtttgtgatgttcattcaaaaactcctgtggttactattaatggtcataaacagaggttttgtcaacaatgcagcaggtttcatgctttggaggagtttgatgaagggaagagaagttgtaggaaacgtcttgatggacataatcgaagacgacggaagccgcagcctgaacatatcggtcgtcctgccaacttctttacgggttttcaaggtagcaaattgctagagttttctggtggttcacatgtgtttccaactacatctgtgttgaacccgagctggggaaatagtcttgtaagcgttgctgtagccgccaatggttcgagttatgggcagagccagagctatgttgttggttcttctcctgcaaagacagggataatgtttccaatctcttcttctccaaacagtaccagaagcatagcaaaacaattccctttcttgcaagaagaagaaagctcgagaaccgcatcgttgtgtgagagaatgacgagttgcatccatgactctgattgtgctctctctcttctgtcatcctcctcgtcgtcagtccctcatttgcttcaaccaccactttctttgtcccaagaagcagttgagacagttttttacgggtcgggattgtttgagaatgcctgtgcagtctctgatggatcggttatatccggtaacgaggctgtccgtcttccgcagacattcccgtttcattgggagtagtagaagaagaagtaggtagatagatagaatcagaaagatctatttgtgtctcttctcttctccctcatttttcaatgttctttatcatcatcattgttcttgttaacactacaagaaatatggacattcttaacacaccgaaaacgctataataacgtttacatagcggattcat

SEQ ID NO: 44401 - protein, 358 aa, Arabidopsis thaliana
  peptide (1)..(358): Ceres Seq. ID no. 14304429
  misc_feature (99)..(177): Pfam Name: SBP domain Pfam Description: SBP domain
  misc_feature (79)..(217): Homolog of NCBI NO: 25352584 NR Description: squamosa promoter binding protein-homolog 4
  misc_feature (85)..(174): Homolog of NCBI NO: 6730637 NR Description: F4N2.13 [Arabidopsis thaliana]
  misc_feature (67)..(177): Homolog of NCBI NO: 6094241 NR Description: SQUAMOSA-PROMOTER BINDING PROTEIN 2
  misc_feature (34)..(310): Homolog of NCBI NO: 25403307 NR Description: protein F17L21.14 [imported] - Arabidopsis
  misc_feature (34)..(310): Homolog of NCBI NO: 18396302 NR Description: squamosa-promoter binding protein 2 -related
  misc_feature (85)..(311): Homolog of NCBI NO: 30697804 NR Description: squamosa-promoter binding protein -related
  misc_feature (85)..(311): Homolog of NCBI NO: 13877707 NR Description: similar to squamosa-promoter binding protein 1
  misc_feature (189)..(358): Homolog of NCBI NO: 20260414 NR Description: unknown protein [Arabidopsis thaliana]
  misc_feature (24)..(358): Homolog of NCBI NO: 21536841 NR Description: unknown [Arabidopsis thaliana]
  misc_feature (1)..(358): Homolog of NCBI NO: 18423163 NR Description: expressed protein [Arabidopsis thaliana]
MDWNFKLSSGYLSGFDQEPDLSPMDGSISFGGSSQSKADFSFDLKLGRNIGNSSSVFGDTEQVISLSKWKDSALAKPEGSRSSSSKRTRNGVGTNQMPICLVDGCDSDFSNCREYHKRHKVCDVHSKTPVVTINGHKQRFCQQCSRFHALEEFDEGKRSCRKRLDGHNRRRRKPQPEHIGRPANFFTGFQGSKLLEFSGGSHVFPTTSVLNPSWGNSLVSVAVAANGSSYGQSQSYVVGSSPAKTGIMFPISSSPNSTRSIAKQFPFLQEEESSRTASLCERMTSCIHDSDCALSLLSSSSSSVPHLLQPPLSLSQEAVETVFYGSGLFENACAVSDGSVISGNEAVRLPQTFPFHWE

SEQ ID NO: 44402 - protein, 335 aa, Arabidopsis thaliana
  peptide (1)..(335): Ceres Seq. ID no. 14304430
  misc_feature (76)..(154): Pfam Name: SBP domain Pfam Description: SBP domain
  misc_feature (56)..(194): Homolog of NCBI NO: 25352584 NR Description: squamosa promoter binding protein-homolog 4
  misc_feature (62)..(151): Homolog of NCBI NO: 6730637 NR Description: F4N2.13 [Arabidopsis thaliana]
  misc_feature (44)..(154): Homolog of NCBI NO: 6094241 NR Description: SQUAMOSA-PROMOTER BINDING PROTEIN 2
  misc_feature (11)..(287): Homolog of NCBI NO: 25403307 NR Description: protein F17L21.14 [imported] - Arabidopsis
  misc_feature (11)..(287): Homolog of NCBI NO: 18396302 NR Description: squamosa-promoter binding protein 2 -related
  misc_feature (62)..(288): Homolog of NCBI NO: 30697804 NR Description: squamosa-promoter binding protein -related
  misc_feature (62)..(288): Homolog of NCBI NO: 13877707 NR Description: similar to squamosa-promoter binding protein 1
  misc_feature (166)..(335): Homolog of NCBI NO: 20260414 NR Description: unknown protein [Arabidopsis thaliana]
  misc_feature (1)..(335): Homolog of NCBI NO: 21536841 NR Description: unknown [Arabidopsis thaliana]
  misc_feature (1)..(335): Homolog of NCBI NO: 18423163 NR Description: expressed protein [Arabidopsis thaliana]
MDGSISFGGSSQSKADFSFDLKLGRNIGNSSSVFGDTEQVISLSKWKDSALAKPEGSRSSSSKRTRNGVGTNQMPICLVDGCDSDFSNCREYHKRHKVCDVHSKTPVVTINGHKQRFCQQCSRFHALEEFDEGKRSCRKRLDGHNRRRRKPQPEHIGRPANFFTGFQGSKLLEFSGGSHVFPTTSVLNPSWGNSLVSVAVAANGSSYGQSQSYVVGSSPAKTGIMFPISSSPNSTRSIAKQFPFLQEEESSRTASLCERMTSCIHDSDCALSLLSSSSSSVPHLLQPPLSLSQEAVETVFYGSGLFENACAVSDGSVISGNEAVRLPQTFPFHWE

SEQ ID NO: 44403 - protein, 262 aa, Arabidopsis thaliana; identical to SEQ ID NO: 40211
  peptide (1)..(262): Ceres Seq. ID no. 14304431
  misc_feature (3)..(81): Pfam Name: SBP domain Pfam Description: SBP domain
  misc_feature (1)..(121): Homolog of NCBI NO: 25352584 NR Description: squamosa promoter binding protein-homolog 4
  misc_feature (1)..(78): Homolog of NCBI NO: 6730637 NR Description: F4N2.13 [Arabidopsis thaliana]
  misc_feature (1)..(81): Homolog of NCBI NO: 6094241 NR Description: SQUAMOSA-PROMOTER BINDING PROTEIN 2
  misc_feature (1)..(214): Homolog of NCBI NO: 25403307 NR Description: protein F17L21.14 [imported] - Arabidopsis
  misc_feature (1)..(214): Homolog of NCBI NO: 18396302 NR Description: squamosa-promoter binding protein 2 -related
  misc_feature (1)..(215): Homolog of NCBI NO: 30697804 NR Description: squamosa-promoter binding protein -related
  misc_feature (1)..(215): Homolog of NCBI NO: 13877707 NR Description: similar to squamosa-promoter binding protein 1
  misc_feature (93)..(262): Homolog of NCBI NO: 20260414 NR Description: unknown protein [Arabidopsis thaliana]
  misc_feature (1)..(262): Homolog of NCBI NO: 21536841 NR Description: unknown [Arabidopsis thaliana]
  misc_feature (1)..(262): Homolog of NCBI NO: 18423163 NR Description: expressed protein [Arabidopsis thaliana]

SEQ ID NO: 44404 - DNA, 748 bp, Arabidopsis thaliana
  misc_feature (1)..(748): Ceres Seq. ID no. 13502510
  misc_feature: MA Experiment ID: 20000173 Result: Down-regulated in Transcription
  misc_feature: MA Experiment 20000173 PARAMETER Experiment Name: At_42deg_Heat_P Parameter: Age (day) Value: 14
  misc_feature: MA Experiment 20000173 PARAMETER Experiment Name: At_42deg_Heat_P Parameter: Organism Value: A. thaliana
  misc_feature: MA Experiment 20000173 PARAMETER Experiment Name: At_42deg_Heat_P Parameter: Plant Line Value: WS
  misc_feature: MA Experiment 20000173 PARAMETER Experiment Name: At_42deg_Heat_P Parameter: Temperature (deg C) Value: 42 vs. 22
  misc_feature: MA Experiment 20000173 PARAMETER Experiment Name: At_42deg_Heat_P Parameter: Timepoint (hr) Value: 6
  misc_feature: MA Experiment 20000173 PARAMETER Experiment Name: At_42deg_Heat_P Parameter: Tissue Value: Aerial
  misc_feature: MA Experiment ID: 20000184 Result: Down-regulated in Transcription
  misc_feature: MA Experiment 20000184 PARAMETER Experiment Name: At_Shoots__P Parameter: Age (day) Value: 7
  misc_feature: MA Experiment 20000184 PARAMETER Experiment Name: At_Shoots__P Parameter: Tissue Value: Shoots vs. Whole Plant
  misc_feature: MA Experiment ID: 20000227 Result: Down-regulated in Transcription
  misc_feature: MA Experiment 20000227 PARAMETER Experiment Name: At_Root-Tips-vs-Tops_P Parameter: Tissue Value: Root Tips vs. Root Tops
  misc_feature: MA Experiment ID: 20000234 Result: Down-regulated in Transcription
  misc_feature: MA Experiment 20000234 PARAMETER Experiment Name: At_Siliques_P Parameter: Age (day) Value: 21
  misc_feature: MA Experiment 20000234 PARAMETER Experiment Name: At_Siliques_P Parameter: Organism Value: A. thaliana
  misc_feature: MA Experiment 20000234 PARAMETER Experiment Name: At_Siliques_P Parameter: Plant Line Value: WS
  misc_feature: MA Experiment 20000234 PARAMETER Experiment Name: At_Siliques_P Parameter: Tissue Value: Less Than 5mm Siliques vs. Whole Plant
  misc_feature: MA Experiment ID: 20000235 Result: Down-regulated in Transcription
  misc_feature: MA Experiment 20000235 PARAMETER Experiment Name: At_Siliques_P Parameter: Age (day) Value: 21
  misc_feature: MA Experiment 20000235 PARAMETER Experiment Name: At_Siliques_P Parameter: Organism Value: A. thaliana
  misc_feature: MA Experiment 20000235 PARAMETER Experiment Name: At_Siliques_P Parameter: Plant Line Value: WS
  misc_feature: MA Experiment 20000235 PARAMETER Experiment Name: At_Siliques_P Parameter: Tissue Value: 5-10mm Siliques vs. Whole Plant
  misc_feature: MA Experiment ID: 20000438 Result: Down-regulated in Transcription
  misc_feature: MA Experiment 20000438 PARAMETER Experiment Name: At_Shoots__P Parameter: Age (day) Value: 14
  misc_feature: MA Experiment 20000438 PARAMETER Experiment Name: At_Shoots__P Parameter: Tissue Value: Shoots vs. Whole Plant
  misc_feature: MA Experiment ID: 20000495 Result: Down-regulated in Transcription
  misc_feature: MA Experiment 20000495 PARAMETER Experiment Name: At_Guard_Cells_P Parameter: Harvest Date Value: 8/2/2002
  misc_feature: MA Experiment 20000495 PARAMETER Experiment Name: At_Guard_Cells_P Parameter: Organism Value: A. thaliana
  misc_feature: MA Experiment 20000495 PARAMETER Experiment Name: At_Guard_Cells_P Parameter: Tissue Value: Guard Cells vs. Leaves
  misc_feature: MA Experiment ID: 20000496 Result: Down-regulated in Transcription
  misc_feature: MA Experiment 20000496 PARAMETER Experiment Name: At_Guard_Cells_P Parameter: Harvest Date Value: 7/19/2002
  misc_feature: MA Experiment 20000496 PARAMETER Experiment Name: At_Guard_Cells_P Parameter: Organism Value: Canola
  misc_feature: MA Experiment 20000496 PARAMETER Experiment Name: At_Guard_Cells_P Parameter: Tissue Value: Guard Cells vs. Leaves
  misc_feature: MA Experiment ID: 20001557 Result: Down-regulated in Transcription
  misc_feature: MA Experiment 20001557 PARAMETER Experiment Name: At_Drought_Soil_Dry_P Parameter: Age (day) Value: 27
  misc_feature: MA Experiment 20001557 PARAMETER Experiment Name: At_Drought_Soil_Dry_P Parameter: Organism Value: A. thaliana
  misc_feature: MA Experiment 20001557 PARAMETER Experiment Name: At_Drought_Soil_Dry_P Parameter: Plant Line Value: WS
  misc_feature: MA Experiment 20001557 PARAMETER Experiment Name: At_Drought_Soil_Dry_P Parameter: Post Timepoint (hr) Value: 3
  misc_feature: MA Experiment 20001557 PARAMETER Experiment Name: At_Drought_Soil_Dry_P Parameter: Post-Treatment Value: Re-Water vs. No Drought
  misc_feature: MA Experiment 20001557 PARAMETER Experiment Name: At_Drought_Soil_Dry_P Parameter: Timepoint (day) Value: 13
  misc_feature: MA Experiment 20001557 PARAMETER Experiment Name: At_Drought_Soil_Dry_P Parameter: Treatment Value: Drought vs. No Drought
  misc_feature: MA Experiment ID: 20001558 Result: Down-regulated in Transcription
  misc_feature: MA Experiment 20001558 PARAMETER Experiment Name: At_Drought_Soil_Dry_P Parameter: Age (day) Value: 27
  misc_feature: MA Experiment 20001558 PARAMETER Experiment Name: At_Drought_Soil_Dry_P Parameter: Organism Value: A. thaliana
  misc_feature: MA Experiment 20001558 PARAMETER Experiment Name: At_Drought_Soil_Dry_P Parameter: Plant Line Value: WS
  misc_feature: MA Experiment 20001558 PARAMETER Experiment Name: At_Drought_Soil_Dry_P Parameter: Post Timepoint (hr) Value: 6
  misc_feature: MA Experiment 20001558 PARAMETER Experiment Name: At_Drought_Soil_Dry_P Parameter: Post-Treatment Value: Re-Water vs. No Drought
  misc_feature: MA Experiment 20001558 PARAMETER Experiment Name: At_Drought_Soil_Dry_P Parameter: Timepoint (day) Value: 13
  misc_feature: MA Experiment 20001558 PARAMETER Experiment Name: At_Drought_Soil_Dry_P Parameter: Treatment Value: Drought vs. No Drought
  misc_feature: MA Experiment ID: 20001560 Result: Down-regulated in Transcription
  misc_feature: MA Experiment 20001560 PARAMETER Experiment Name: At_Drought_Soil_Dry_P Parameter: Age (day) Value: 28
  misc_feature: MA Experiment 20001560 PARAMETER Experiment Name: At_Drought_Soil_Dry_P Parameter: Organism Value: A. thaliana
  misc_feature: MA Experiment 20001560 PARAMETER Experiment Name: At_Drought_Soil_Dry_P Parameter: Plant Line Value: WS
  misc_feature: MA Experiment 20001560 PARAMETER Experiment Name: At_Drought_Soil_Dry_P Parameter: Post Timepoint (hr) Value: None
  misc_feature: MA Experiment 20001560 PARAMETER Experiment Name: At_Drought_Soil_Dry_P Parameter: Post-Treatment Value: None
  misc_feature: MA Experiment 20001560 PARAMETER Experiment Name: At_Drought_Soil_Dry_P Parameter: Timepoint (day) Value: 14
  misc_feature: MA Experiment 20001560 PARAMETER Experiment Name: At_Drought_Soil_Dry_P Parameter: Treatment Value: Drought vs. No Drought
  misc_feature: MA Experiment ID: 20001905 Result: Down-regulated in Transcription
  misc_feature: MA Experiment 20001905 PARAMETER Experiment Name: At_Drought_Reproduction_P Parameter: Age (day) Value: 40
  misc_feature: MA Experiment 20001905 PARAMETER Experiment Name: At_Drought_Reproduction_P Parameter: Organism Value: A. thaliana
  misc_feature: MA Experiment 20001905 PARAMETER Experiment Name: At_Drought_Reproduction_P Parameter: Plant Line Value: WS
  misc_feature: MA Experiment 20001905 PARAMETER Experiment Name: At_Drought_Reproduction_P Parameter: Timepoint (day) Value: 10
  misc_feature: MA Experiment 20001905 PARAMETER Experiment Name: At_Drought_Reproduction_P Parameter: Tissue Value: Rosettes
  misc_feature: MA Experiment 20001905 PARAMETER Experiment Name: At_Drought_Reproduction_P Parameter: Treatment Value: Drought vs. No Drought
atacatagtcccttcttccacatcagaacccatttgtctttgagtgagagaatcagctttcagagaaaaaagtatacctacagagagagttatggcggagagtggtggacgaaggatcggagtggcggtggatttctcggactgcagtaagaaggctctgagctgggcgatcgataacgtggttcgcgacggagatcatctgatcctaatcactattgctcacgatatgaattacgaggaaggcgagatgcagctctgggagaccgttggatcaccttttattcctatgagtgaattctctgacgctgctgtgatgaaaaagtatgcattgaagccagatgctgaaacccttgacattgtcaatactgccgctaggaagaaaacgattacagtagtgatgaagatatattggggagatcctcgtgagaagatttgtgcagcagctgaacagattcctctctcaagccttgtgatgggtaacagaggccttggtggtcttaagaggatgattatgggaagtgtaagcaaccatgttgtcaacaacgttgcatgccctgtgaccgttgtcaaggctcacatctgagtttgctcggagaactctaaataacaccaccgtgtattctataatttgtgtttttgtggtcggaatttctattgttaactgttgtgtgactggtgttttgttcatctgtatggataaacaacactccaccttctaataaatacagactcttttgatttttggacc

SEQ ID NO: 44405 - protein, 163 aa, Arabidopsis thaliana
  peptide (1)..(163): Ceres Seq. ID no. 13502511
  misc_feature (6)..(160): Pfam Name: Universal stress protein family Pfam Description: Universal stress protein family
  misc_feature (6)..(160): Pfam Name: Universal stress protein family Pfam Description: Universal stress protein family
  misc_feature (2)..(160): Homolog of NCBI NO: 40539010 NR Description: putative stress-related protein
  misc_feature (7)..(138): Homolog of NCBI NO: 18396497 NR Description: expressed protein [Arabidopsis thaliana]
  misc_feature (7)..(160): Homolog of NCBI NO: 11602749 NR Description: early nodulin ENOD18 [Vicia faba]
  misc_feature (7)..(160): Homolog of NCBI NO: 11602751 NR Description: ENOD18 protein [Vicia faba]
  misc_feature (7)..(160): Homolog of NCBI NO: 11602747 NR Description: early nodulin ENOD18 [Vicia faba]
  misc_feature (2)..(160): Homolog of NCBI NO: 40539010 NR Description: putative stress-related protein
  misc_feature (7)..(160): Homolog of NCBI NO: 11602749 NR Description: early nodulin ENOD18 [Vicia faba]
  misc_feature (7)..(160): Homolog of NCBI NO: 11602747 NR Description: early nodulin ENOD18 [Vicia faba]
  misc_feature (1)..(163): Homolog of NCBI NO: 18401345 NR Description: expressed protein [Arabidopsis thaliana]
  misc_feature (5)..(163): Homolog of NCBI NO: 15528707 NR Description: P0583G08.8 [Oryza sativa (japonica
  misc_feature (1)..(161): Homolog of NCBI NO: 20160561 NR Description: P0414E03.3 [Oryza sativa (japonica
  misc_feature (7)..(162): Homolog of NCBI NO: 30678807 NR Description: expressed protein [Arabidopsis thaliana]
  misc_feature (7)..(160): Homolog of NCBI NO: 30693971 NR Description: expressed protein [Arabidopsis thaliana]
  misc_feature (7)..(160): Homolog of NCBI NO: 11602751 NR Description: ENOD18 protein [Vicia faba]
  misc_feature (7)..(138): Homolog of NCBI NO: 18396497 NR Description: expressed protein [Arabidopsis thaliana]
  misc_feature (7)..(160): Homolog of NCBI NO: 30693971 NR Description: expressed protein [Arabidopsis thaliana]
  misc_feature (7)..(162): Homolog of NCBI NO: 30678807 NR Description: expressed protein [Arabidopsis thaliana]
  misc_feature (1)..(161): Homolog of NCBI NO: 20160561 NR Description: P0414E03.3 [Oryza sativa (japonica
  misc_feature (5)..(163): Homolog of NCBI NO: 15528707 NR Description: P0583G08.8 [Oryza sativa (japonica
  misc_feature (1)..(163): Homolog of NCBI NO: 18401345 NR Description: expressed protein [Arabidopsis thaliana]
MAESGGRRIGVAVDFSDCSKKALSWAIDNVVRDGDHLILITIAHDMNYEEGEMQLWETVGSPFIPMSEFSDAAVMKKYALKPDAETLDIVNTAARKKTITVVMKIYWGDPREKICAAAEQIPLSSLVMGNRGLGGLKRMIMGSVSNHVVNNVACPVTVVKAHI

SEQ ID NO: 44406 - protein, 118 aa, Arabidopsis thaliana
  peptide (1)..(118): Ceres Seq. ID no. 13502512
  misc_feature (1)..(115): Pfam Name: Universal stress protein family Pfam Description: Universal stress protein family
  misc_feature (1)..(115): Pfam Name: Universal stress protein family Pfam Description: Universal stress protein family
  misc_feature (1)..(115): Homolog of NCBI NO: 40539010 NR Description: putative stress-related protein
  misc_feature (1)..(93): Homolog of NCBI NO: 18396497 NR Description: expressed protein [Arabidopsis thaliana]
  misc_feature (1)..(115): Homolog of NCBI NO: 11602749 NR Description: early nodulin ENOD18 [Vicia faba]
  misc_feature (1)..(115): Homolog of NCBI NO: 11602751 NR Description: ENOD18 protein [Vicia faba]
  misc_feature (1)..(115): Homolog of NCBI NO: 11602747 NR Description: early nodulin ENOD18 [Vicia faba]
  misc_feature (1)..(115): Homolog of NCBI NO: 40539010 NR Description: putative stress-related protein
  misc_feature (1)..(115): Homolog of NCBI NO: 11602749 NR Description: early nodulin ENOD18 [Vicia faba]
  misc_feature (1)..(115): Homolog of NCBI NO: 11602747 NR Description: early nodulin ENOD18 [Vicia faba]
  misc_feature (1)..(118): Homolog of NCBI NO: 18401345 NR Description: expressed protein [Arabidopsis thaliana]
  misc_feature (1)..(118): Homolog of NCBI NO: 15528707 NR Description: P0583G08.8 [Oryza sativa (japonica
  misc_feature (1)..(116): Homolog of NCBI NO: 20160561 NR Description: P0414E03.3 [Oryza sativa (japonica
  misc_feature (1)..(117): Homolog of NCBI NO: 30678807 NR Description: expressed protein [Arabidopsis thaliana]
  misc_feature (1)..(115): Homolog of NCBI NO: 30693971 NR Description: expressed protein [Arabidopsis thaliana]
  misc_feature (1)..(115): Homolog of NCBI NO: 11602751 NR Description: ENOD18 protein [Vicia faba]
  misc_feature (1)..(93): Homolog of NCBI NO: 18396497 NR Description: expressed protein [Arabidopsis thaliana]
  misc_feature (1)..(115): Homolog of NCBI NO: 30693971 NR Description: expressed protein [Arabidopsis thaliana]
  misc_feature (1)..(117): Homolog of NCBI NO: 30678807 NR Description: expressed protein [Arabidopsis thaliana]
  misc_feature (1)..(116): Homolog of NCBI NO: 20160561 NR Description: P0414E03.3 [Oryza sativa (japonica
  misc_feature (1)..(118): Homolog of NCBI NO: 15528707 NR Description: P0583G08.8 [Oryza sativa (japonica
  misc_feature (1)..(118): Homolog of NCBI NO: 18401345 NR Description: expressed protein [Arabidopsis thaliana]
MNYEEGEMQLWETVGSPFIPMSEFSDAAVMKKYALKPDAETLDIVNTAARKKTITVVMKIYWGDPREKICAAAEQIPLSSLVMGNRGLGGLKRMIMGSVSNHVVNNVACPVTVVKAHI

SEQ ID NO: 44407 - protein, 111 aa, Arabidopsis thaliana
  peptide (1)..(111): Ceres Seq. ID no. 13502513
  misc_feature (1)..(108): Pfam Name: Universal stress protein family Pfam Description: Universal stress protein family
  misc_feature (1)..(108): Pfam Name: Universal stress protein family Pfam Description: Universal stress protein family
  misc_feature (1)..(108): Homolog of NCBI NO: 40539010 NR Description: putative stress-related protein
  misc_feature (1)..(86): Homolog of NCBI NO: 18396497 NR Description: expressed protein [Arabidopsis thaliana]
  misc_feature (1)..(108): Homolog of NCBI NO: 11602749 NR Description: early nodulin ENOD18 [Vicia faba]
  misc_feature (1)..(108): Homolog of NCBI NO: 11602751 NR Description: ENOD18 protein [Vicia faba]
  misc_feature (1)..(108): Homolog of NCBI NO: 11602747 NR Description: early nodulin ENOD18 [Vicia faba]
  misc_feature (1)..(108): Homolog of NCBI NO: 40539010 NR Description: putative stress-related protein
  misc_feature (1)..(108): Homolog of NCBI NO: 11602749 NR Description: early nodulin ENOD18 [Vicia faba]
  misc_feature (1)..(108): Homolog of NCBI NO: 11602747 NR Description: early nodulin ENOD18 [Vicia faba]
  misc_feature (1)..(111): Homolog of NCBI NO: 18401345 NR Description: expressed protein [Arabidopsis thaliana]
  misc_feature (1)..(111): Homolog of NCBI NO: 15528707 NR Description: P0583G08.8 [Oryza sativa (japonica
  misc_feature (1)..(109): Homolog of NCBI NO: 20160561 NR Description: P0414E03.3 [Oryza sativa (japonica
  misc_feature (1)..(110): Homolog of NCBI NO: 30678807 NR Description: expressed protein [Arabidopsis thaliana]
  misc_feature (1)..(108): Homolog of NCBI NO: 30693971 NR Description: expressed protein [Arabidopsis thaliana]
  misc_feature (1)..(108): Homolog of NCBI NO: 11602751 NR Description: ENOD18 protein [Vicia faba]
  misc_feature (1)..(86): Homolog of NCBI NO: 18396497 NR Description: expressed protein [Arabidopsis thaliana]
  misc_feature (1)..(108): Homolog of NCBI NO: 30693971 NR Description: expressed protein [Arabidopsis thaliana]
  misc_feature (1)..(110): Homolog of NCBI NO: 30678807 NR Description: expressed protein [Arabidopsis thaliana]
  misc_feature (1)..(109): Homolog of NCBI NO: 20160561 NR Description: P0414E03.3 [Oryza sativa (japonica
  misc_feature (1)..(111): Homolog of NCBI NO: 15528707 NR Description: P0583G08.8 [Oryza sativa (japonica
  misc_feature (1)..(111): Homolog of NCBI NO: 18401345 NR Description: expressed protein [Arabidopsis thaliana]
MQLWETVGSPFIPMSEFSDAAVMKKYALKPDAETLDIVNTAARKKTITVVMKIYWGDPREKICAAAEQIPLSSLVMGNRGLGGLKRMIMGSVSNHVVNNVACPVTVVKAHI

SEQ ID NO: 44408 - DNA, 1196 bp, Arabidopsis thaliana; identical to SEQ ID NO: 30652
  misc_feature (1)..(1196): Ceres Seq. ID no. 13509751
  misc_feature: MA Experiment ID: 108573 Result: Up-regulated in Transcription
  misc_feature: MA Experiment 108573 PARAMETER Experiment Name: At_Drought_cDNA_P Parameter: Timepoint (hr) Value: 6
  misc_feature: MA Experiment 108573 PARAMETER Experiment Name: At_Drought_cDNA_P Parameter: Tissue Value: Aerial
  misc_feature: MA Experiment 108573 PARAMETER Experiment Name: At_Drought_cDNA_P Parameter: Treatment Value: Drought vs. No Drought
  misc_feature: MA Experiment ID: 20000180 Result: Up-regulated in Transcription
  misc_feature: MA Experiment 20000180 PARAMETER Experiment Name: At_Germinating_Seeds_P Parameter: Age (hr) Value: 24 vs. 0
  misc_feature: MA Experiment 20000180 PARAMETER Experiment Name: At_Germinating_Seeds_P Parameter: Tissue Value: Germinating Seeds

SEQ ID NO: 44409 - protein, 272 aa, Arabidopsis thaliana; identical to SEQ ID NO: 30653
  peptide (1)..(272): Ceres Seq. ID no. 13509752
  misc_feature (12)..(272): Homolog of NCBI NO: 24642653 NR Description: CG32566-PB [Drosophila melanogaster]
  misc_feature (9)..(272): Homolog of NCBI NO: 34858413 NR Description: similar to RIKEN cDNA 1200016B17 [Rattus
  misc_feature (9)..(272): Homolog of NCBI NO: 27229051 NR Description: RIKEN cDNA 1200016B17 [Mus musculus]
  misc_feature (8)..(272): Homolog of NCBI NO: 8922416 NR Description: hypothetical protein FLJ10420 [Homo sapiens]
  misc_feature (8)..(260): Homolog of NCBI NO: 10435511 NR Description: unnamed protein product [Homo sapiens]
  misc_feature (149)..(248): Homolog of NCBI NO: 25406749 NR Description: hypothetical protein [imported] - Arabidopsis
  misc_feature (7)..(272): Homolog of NCBI NO: 37535352 NR Description: unknown protein [Oryza sativa (japonica
  misc_feature (1)..(219): Homolog of NCBI NO: 25406749 NR Description: hypothetical protein [imported] - Arabidopsis
  misc_feature (1)..(272): Homolog of NCBI NO: 18379172 NR Description: expressed protein [Arabidopsis thaliana]
  misc_feature (1)..(250): Homolog of NCBI NO: 14596175 NR Description: Unknown protein [Arabidopsis thaliana]
  misc_feature (12)..(272): Homolog of NCBI NO: 24642653 NR Description: CG32566-PB [Drosophila melanogaster]
  misc_feature (9)..(272): Homolog of NCBI NO: 34858413 NR Description: similar to RIKEN cDNA 1200016B17 [Rattus
  misc_feature (9)..(272): Homolog of NCBI NO: 27229051 NR Description: RIKEN cDNA 1200016B17 [Mus musculus]
  misc_feature (8)..(272): Homolog of NCBI NO: 8922416 NR Description: hypothetical protein FLJ10420 [Homo sapiens]
  misc_feature (8)..(260): Homolog of NCBI NO: 10435511 NR Description: unnamed protein product [Homo sapiens]
  misc_feature (149)..(248): Homolog of NCBI NO: 25406749 NR Description: hypothetical protein [imported] - Arabidopsis
  misc_feature (7)..(272): Homolog of NCBI NO: 37535352 NR Description: unknown protein [Oryza sativa (japonica
  misc_feature (1)..(219): Homolog of NCBI NO: 25406749 NR Description: hypothetical protein [imported] - Arabidopsis
  misc_feature (1)..(272): Homolog of NCBI NO: 18379172 NR Description: expressed protein [Arabidopsis thaliana]
  misc_feature (1)..(250): Homolog of NCBI NO: 14596175 NR Description: Unknown protein [Arabidopsis thaliana]

SEQ ID NO: 44410 - DNA, 1625 bp, Arabidopsis thaliana
  misc_feature (1)..(1625): Ceres Seq. ID no. 13509498
  misc_feature: MA Experiment ID: 20000315 Result: Down-regulated in Transcription
  misc_feature: MA Experiment 20000315 PARAMETER Experiment Name: At_14day_Shoots-Roots_Sub_P Parameter: Age (day) Value: 14
  misc_feature: MA Experiment 20000315 PARAMETER Experiment Name: At_14day_Shoots-Roots_Sub_P Parameter: Organism Value: A. thaliana
  misc_feature: MA Experiment 20000315 PARAMETER Experiment Name: At_14day_Shoots-Roots_Sub_P Parameter: Plant Line Value: WS
  misc_feature: MA Experiment 20000315 PARAMETER Experiment Name: At_14day_Shoots-Roots_Sub_P Parameter: Tissue Value: Shoots vs. Whole Plant
  misc_feature: MA Experiment ID: 20000329 Result: Down-regulated in Transcription
  misc_feature: MA Experiment 20000329 PARAMETER Experiment Name: At_4deg_Cold_Sub_P Parameter: Age (day) Value: 14
  misc_feature: MA Experiment 20000329 PARAMETER Experiment Name: At_4deg_Cold_Sub_P Parameter: Organism Value: A. thaliana
  misc_feature: MA Experiment 20000329 PARAMETER Experiment Name: At_4deg_Cold_Sub_P Parameter: Plant Line Value: WS
  misc_feature: MA Experiment 20000329 PARAMETER Experiment Name: At_4deg_Cold_Sub_P Parameter: Temperature (deg C) Value: 4 vs. 22
  misc_feature: MA Experiment 20000329 PARAMETER Experiment Name: At_4deg_Cold_Sub_P Parameter: Timepoint (hr) Value: 6
  misc_feature: MA Experiment 20000329 PARAMETER Experiment Name: At_4deg_Cold_Sub_P Parameter: Tissue Value: Aerial
  misc_feature: MA Experiment ID: 20000347 Result: Up-regulated in Transcription
  misc_feature: MA Experiment 20000347 PARAMETER Experiment Name: At_2mM_SA_Sub_P Parameter: Age (day) Value: 14
  misc_feature: MA Experiment 20000347 PARAMETER Experiment Name: At_2mM_SA_Sub_P Parameter: Organism Value: A. thaliana
  misc_feature: MA Experiment 20000347 PARAMETER Experiment Name: At_2mM_SA_Sub_P Parameter: Plant Line Value: WS
  misc_feature: MA Experiment 20000347 PARAMETER Experiment Name: At_2mM_SA_Sub_P Parameter: Timepoint (hr) Value: 6
  misc_feature: MA Experiment 20000347 PARAMETER Experiment Name: At_2mM_SA_Sub_P Parameter: Tissue Value: Aerial
  misc_feature: MA Experiment 20000347 PARAMETER Experiment Name: At_2mM_SA_Sub_P Parameter: Treatment Value: 2mM SA vs. No Treatment
  misc_feature: MA Experiment ID: 20000355 Result: Down-regulated in Transcription
  misc_feature: MA Experiment 20000355 PARAMETER Experiment Name: At_Siliques_Sub_P Parameter: Age (day) Value: 21
  misc_feature: MA Experiment 20000355 PARAMETER Experiment Name: At_Siliques_Sub_P Parameter: Organism Value: A. thaliana
  misc_feature: MA Experiment 20000355 PARAMETER Experiment Name: At_Siliques_Sub_P Parameter: Plant Line Value: WS
  misc_feature: MA Experiment 20000355 PARAMETER Experiment Name: At_Siliques_Sub_P Parameter: Tissue Value: Less Than 5mm Siliques vs. Whole Plant
  misc_feature: MA Experiment ID: 20000440 Result: Down-regulated in Transcription
  misc_feature: MA Experiment 20000440 PARAMETER Experiment Name: At_Closed-Flower__Sub_P Parameter: Tissue Value: Closed Flower vs. Whole Plant
aggcggagaaacactttccgtggtttagtgttgaggacgatcactgtttgtaattcgatggcgaggaagaagatcagagaatatgactccaagagacttctcaaggagcatttgaagcgtcttgctaatattgacctgcagattcgctctgctcaggtgacagaatctacggatttcactgagttaaccaaccaggagtcatggctatcgtccacaaagctagttgtgaaaccggatatgctatttgggaaacgcgggaaaagtggtttggtagctctaaagctggatcttgctgaagttgcagactttgtcaaagcccgcctcggcactgaggtcgagatggagggatgtaaagcacctatcactacattcattgtggagccttttgtgcctcatgatcaagaatactacctctctatagtatctgatagacttggatgcactataagcttctctgaatgtggtggcattgaaatagaagagaattgggacaaagtgaagactatatttcttcctgcggaaaagtcgatgacgctagaagtatgtgctccattaatagcaactcttcctcttgaggttcgagctaaaatcggcaacttcataatgggtgcctttgctgtatttcaagatttggatttcagttttatggagatgaatccttttacactagtcgatggagaaccattccctctggatatgagaggagaattagatgacactgctgccttcaagaatttcaacaagtggggagacattgaatttcctctgccatttggaagggtcctcagttctacagagaacttcatccatggtttagatgagaagacaagtgcttctttgaagttcactgttttgaatcctaaaggccgcatttggacgatggtagctggaggtggtgctagcgtcatatatgctgatacagttggggatttaggttatgcatcagagcttggaaactacgcagagtatagtggagcacctaatgaggaagaggtgttacaatatgcaagagttgtcattgattgtgccactactgatcctgacgggcgtaaacgagctcttctaattggaggaggcattgccaatttcactgatgtggcagctactttcaacggtatcattcgagcgctaagagaaaaggaaacaagattgaaagcatcaagaatgcacatttacgtaaggagaggtggaccaaattaccagactggtttggctagaatgcgagctttaggagaggaacttggtgtccctctagaggtatatggtccagaggcaacaatgacgggaatatgcaaacgagccattgactgcatcatgttgcctgatgcataacctacccaaaccttttatctcttcttcagtttgaaagcagaacaaaagctttggagctggacgaatgagtgagtgtaaaatgagtcatgtccttcatctctctctttccacataagaaaatgaaaatctctttaaaactttttttccactgggtgtgaatttgaaaactgtatcattgtgtgtaagcgtaattgtaatcagacggtcaaaatccttattttgaaatgtacaataagacttcaaaagttaatgttgcttttgatttttgtgtgtggtaaagccacactcgctct

SEQ ID NO: 44411 - protein, 443 aa, Arabidopsis thaliana
  peptide (1)..(443): Ceres Seq. ID no. 13509499
  misc_feature (20)..(443): Homolog of NCBI NO: 38569421 NR Description: ATP citrate lyase isoform 1 [Homo sapiens]
  misc_feature (20)..(443): Homolog of NCBI NO: 8392839 NR Description: ATP citrate lyase [Rattus norvegicus]
  misc_feature (20)..(443): Homolog of NCBI NO: 29293809 NR Description: ATP citrate lyase [Mus musculus]
  misc_feature (20)..(443): Homolog of NCBI NO: 9229902 NR Description: ATP citrate-lyase [Ciona intestinalis]
  misc_feature (20)..(438): Homolog of NCBI NO: 19698853 NR Description: similar to ATP-citrate-lyase [Arabidopsis
  misc_feature (20)..(438): Homolog of NCBI NO: 15219818 NR Description: ATP citrate-lyase -related [Arabidopsis thaliana]
  misc_feature (20)..(438): Homolog of NCBI NO: 21593129 NR Description: ATP citrate-lyase, putative [Arabidopsis thaliana]
  misc_feature (20)..(438): Homolog of NCBI NO: 15919089 NR Description: ATP citrate lyase b-subunit [Lupinus albus]
  misc_feature (20)..(438): Homolog of NCBI NO: 15220186 NR Description: ATP citrate-lyase -related [Arabidopsis thaliana]
  misc_feature (20)..(443): Homolog of NCBI NO: 15217510 NR Description: expressed protein [Arabidopsis thaliana]
RRRNTFRGLVLRTITVCNSMARKKIREYDSKRLLKEHLKRLANIDLQIRSAQVTESTDFTELTNQESWLSSTKLVVKPDMLFGKRGKSGLVALKLDLAEVADFVKARLGTEVEMEGCKAPITTFIVEPFVPHDQEYYLSIVSDRLGCTISFSECGGIEIEENWDKVKTIFLPAEKSMTLEVCAPLIATLPLEVRAKIGNFIMGAFAVFQDLDFSFMEMNPFTLVDGEPFPLDMRGELDDTAAFKNFNKWGDIEFPLPFGRVLSSTENFIHGLDEKTSASLKFTVLNPKGRIWTMVAGGGASVIYADTVGDLGYASELGNYAEYSGAPNEEEVLQYARVVIDCATTDPDGRKRALLIGGGIANFTDVAATFNGIIRALREKETRLKASRMHIYVRRGGPNYQTGLARMRALGEELGVPLEVYGPEATMTGICKRAIDCIMLPDA

SEQ ID NO: 44412 - protein, 424 aa, Arabidopsis thaliana
  peptide (1)..(424): Ceres Seq. ID no. 13509500
  misc_feature (1)..(424): Homolog of NCBI NO: 38569421 NR Description: ATP citrate lyase isoform 1 [Homo sapiens]
  misc_feature (1)..(424): Homolog of NCBI NO: 8392839 NR Description: ATP citrate lyase [Rattus norvegicus]
  misc_feature (1)..(424): Homolog of NCBI NO: 29293809 NR Description: ATP citrate lyase [Mus musculus]
  misc_feature (1)..(424): Homolog of NCBI NO: 9229902 NR Description: ATP citrate-lyase [Ciona intestinalis]
  misc_feature (1)..(419): Homolog of NCBI NO: 19698853 NR Description: similar to ATP-citrate-lyase [Arabidopsis
  misc_feature (1)..(419): Homolog of NCBI NO: 15219818 NR Description: ATP citrate-lyase -related [Arabidopsis thaliana]
  misc_feature (1)..(419): Homolog of NCBI NO: 21593129 NR Description: ATP citrate-lyase, putative [Arabidopsis thaliana]
  misc_feature (1)..(419): Homolog of NCBI NO: 15919089 NR Description: ATP citrate lyase b-subunit [Lupinus albus]
  misc_feature (1)..(419): Homolog of NCBI NO: 15220186 NR Description: ATP citrate-lyase -related [Arabidopsis thaliana]
  misc_feature (1)..(424): Homolog of NCBI NO: 15217510 NR Description: expressed protein [Arabidopsis thaliana]
MARKKIREYDSKRLLKEHLKRLANIDLQIRSAQVTESTDFTELTNQESWLSSTKLVVKPDMLFGKRGKSGLVALKLDLAEVADFVKARLGTEVEMEGCKAPITTFIVEPFVPHDQEYYLSIVSDRLGCTISFSECGGIEIEENWDKVKTIFLPAEKSMTLEVCAPLIATLPLEVRAKIGNFIMGAFAVFQDLDFSFMEMNPFTLVDGEPFPLDMRGELDDTAAFKNFNKWGDIEFPLPFGRVLSSTENFIHGLDEKTSASLKFTVLNPKGRIWTMVAGGGASVIYADTVGDLGYASELGNYAEYSGAPNEEEVLQYARVVIDCATTDPDGRKRALLIGGGIANFTDVAATFNGIIRALREKETRLKASRMHIYVRRGGPNYQTGLARMRALGEELGVPLEVYGPEATMTGICKRAIDCIMLPDA

SEQ ID NO: 44413 - protein, 364 aa, Arabidopsis thaliana
  peptide (1)..(364): Ceres Seq. ID no. 13509501
  misc_feature (1)..(364): Homolog of NCBI NO: 38569421 NR Description: ATP citrate lyase isoform 1 [Homo sapiens]
  misc_feature (1)..(364): Homolog of NCBI NO: 8392839 NR Description: ATP citrate lyase [Rattus norvegicus]
  misc_feature (1)..(364): Homolog of NCBI NO: 29293809 NR Description: ATP citrate lyase [Mus musculus]
  misc_feature (1)..(364): Homolog of NCBI NO: 9229902 NR Description: ATP citrate-lyase [Ciona intestinalis]
  misc_feature (1)..(359): Homolog of NCBI NO: 19698853 NR Description: similar to ATP-citrate-lyase [Arabidopsis
  misc_feature (1)..(359): Homolog of NCBI NO: 15219818 NR Description: ATP citrate-lyase -related [Arabidopsis thaliana]
  misc_feature (1)..(359): Homolog of NCBI NO: 21593129 NR Description: ATP citrate-lyase, putative [Arabidopsis thaliana]
  misc_feature (1)..(359): Homolog of NCBI NO: 15919089 NR Description: ATP citrate lyase b-subunit [Lupinus albus]
  misc_feature (1)..(359): Homolog of NCBI NO: 15220186 NR Description: ATP citrate-lyase -related [Arabidopsis thaliana]
  misc_feature (1)..(364): Homolog of NCBI NO: 15217510 NR Description: expressed protein [Arabidopsis thaliana]
MLFGKRGKSGLVALKLDLAEVADFVKARLGTEVEMEGCKAPITTFIVEPFVPHDQEYYLSIVSDRLGCTISFSECGGIEIEENWDKVKTIFLPAEKSMTLEVCAPLIATLPLEVRAKIGNFIMGAFAVFQDLDFSFMEMNPFTLVDGEPFPLDMRGELDDTAAFKNFNKWGDIEFPLPFGRVLSSTENFIHGLDEKTSASLKFTVLNPKGRIWTMVAGGGASVIYADTVGDLGYASELGNYAEYSGAPNEEEVLQYARVVIDCATTDPDGRKRALLIGGGIANFTDVAATFNGIIRALREKETRLKASRMHIYVRRGGPNYQTGLARMRALGEELGVPLEVYGPEATMTGICKRAIDCIMLPDA

SEQ ID NO: 44414 - DNA, 626 bp, Arabidopsis thaliana
  misc_feature (1)..(626): Ceres Seq. ID no. 12781011
  misc_feature: MA Experiment ID: 20000213 Result: Up-regulated in Transcription
  misc_feature: MA Experiment 20000213 PARAMETER Experiment Name: At_4deg_Cold_P Parameter: Timepoint (hr) Value: 2
  misc_feature: MA Experiment ID: 20000437 Result: Up-regulated in Transcription
  misc_feature: MA Experiment 20000437 PARAMETER Experiment Name: At_Drought_P Parameter: Age (day) Value: 8
  misc_feature: MA Experiment 20000437 PARAMETER Experiment Name: At_Drought_P Parameter: Organism Value: A. thaliana
  misc_feature: MA Experiment 20000437 PARAMETER Experiment Name: At_Drought_P Parameter: Plant Line Value: WS
  misc_feature: MA Experiment 20000437 PARAMETER Experiment Name: At_Drought_P Parameter: Timepoint (hr) Value: 24
  misc_feature: MA Experiment 20000437 PARAMETER Experiment Name: At_Drought_P Parameter: Tissue Value: Whole Plant
  misc_feature: MA Experiment 20000437 PARAMETER Experiment Name: At_Drought_P Parameter: Treatment Value: Drought vs. No Drought
  misc_feature: MA Experiment ID: 20000438 Result: Down-regulated in Transcription
  misc_feature: MA Experiment 20000438 PARAMETER Experiment Name: At_Shoots__P Parameter: Age (day) Value: 14
  misc_feature: MA Experiment 20000438 PARAMETER Experiment Name: At_Shoots__P Parameter: Tissue Value: Shoots vs. Whole Plant
  misc_feature: MA Experiment ID: 20001451 Result: Up-regulated in Transcription
  misc_feature: MA Experiment 20001451 PARAMETER Experiment Name: At_Far-red-induction_P Parameter: Age (day) Value: 7
  misc_feature: MA Experiment 20001451 PARAMETER Experiment Name: At_Far-red-induction_P Parameter: Light Value: Far-red vs. White
  misc_feature: MA Experiment 20001451 PARAMETER Experiment Name: At_Far-red-induction_P Parameter: Organism Value: A. thaliana
  misc_feature: MA Experiment 20001451 PARAMETER Experiment Name: At_Far-red-induction_P Parameter: Plant Line Value: Columbia
  misc_feature: MA Experiment 20001451 PARAMETER Experiment Name: At_Far-red-induction_P Parameter: Timepoint (hr) Value: 24
  misc_feature: MA Experiment 20001451 PARAMETER Experiment Name: At_Far-red-induction_P Parameter: Tissue Value: Whole Plant
  misc_feature: MA Experiment ID: 20001557 Result: Up-regulated in Transcription
  misc_feature: MA Experiment 20001557 PARAMETER Experiment Name: At_Drought_Soil_Dry_P Parameter: Age (day) Value: 27
  misc_feature: MA Experiment 20001557 PARAMETER Experiment Name: At_Drought_Soil_Dry_P Parameter: Organism Value: A. thaliana
  misc_feature: MA Experiment 20001557 PARAMETER Experiment Name: At_Drought_Soil_Dry_P Parameter: Plant Line Value: WS
  misc_feature: MA Experiment 20001557 PARAMETER Experiment Name: At_Drought_Soil_Dry_P Parameter: Post Timepoint (hr) Value: 3
  misc_feature: MA Experiment 20001557 PARAMETER Experiment Name: At_Drought_Soil_Dry_P Parameter: Post-Treatment Value: Re-Water vs. No Drought
  misc_feature: MA Experiment 20001557 PARAMETER Experiment Name: At_Drought_Soil_Dry_P Parameter: Timepoint (day) Value: 13
  misc_feature: MA Experiment 20001557 PARAMETER Experiment Name: At_Drought_Soil_Dry_P Parameter: Treatment Value: Drought vs. No Drought
acatctcactgctcactactctcactgtaatcccttagatcttcttttcaaatttcaatggcgtccggtgatgttgagtatcggtgcttcgttggaggtctagcatgggccactgatgacagagctcttgagactgccttcgctcaatacggcgacgttattgattccaagatcattaacgatcgtgagactggaagatcaaggggattcggattcgtcaccttcaaggatgagaaagccatgaaggatgcgattgagggaatgaacggacaagatctcgatggccgtagcatcactgttaacgaggctcagtcacgaggaagcggtggcggcggaggccaccgtggaggtggtggcggtggataccgcagcggcggtggtggaggttactccggtggaggtggtagctacggaggtggcggcggtagacgcgagggtggaggatggtaattcctttaattaggtttgggattaccaatgaatgttctctctctcgcttgttatgcttctacttggttttgtgtgttctctattttgttctggttctgctttagatttgatgtaacagttcgtgattaggtattttggtatctggaaacgtaatgttaagtcacttgtcattctcc

SEQ ID NO: 44415 - protein, 130 aa, Arabidopsis thaliana
  peptide (1)..(130): Ceres Seq. ID no. 12781012
  misc_feature (10)..(81): Pfam Name: RNA recognition motif. (a.k.a. RRM, RBD, or RNP domain) Pfam Description: RNA recognition motif. (a.k.a. RRM, RBD, or RNP
  misc_feature (5)..(129): Homolog of NCBI NO: 20152613 NR Description: putative glycine rich protein [Rumex obtusifolius]
  misc_feature (5)..(129): Homolog of NCBI NO: 544426 NR Description: Glycine-rich RNA-binding protein
  misc_feature (5)..(128): Homolog of NCBI NO: 15235002 NR Description: glycine-rich RNA-binding protein 8 (GRP8)
  misc_feature (5)..(130): Homolog of NCBI NO: 30692254 NR Description: glycine-rich RNA-binding protein 8 (GRP8) (CCR1)
  misc_feature (1)..(128): Homolog of NCBI NO: 2267567 NR Description: glycine-rich RNA binding protein 1 [Pelargonium x
  misc_feature (1)..(130): Homolog of NCBI NO: 1346181 NR Description: Glycine-rich RNA-binding protein GRP2A
  misc_feature (1)..(128): Homolog of NCBI NO: 1346180 NR Description: Glycine-rich RNA-binding protein GRP1A
  misc_feature (1)..(129): Homolog of NCBI NO: 30681492 NR Description: glycine-rich RNA-binding protein (AtGRP7)
  misc_feature (1)..(129): Homolog of NCBI NO: 21553354 NR Description: glycine-rich RNA binding protein 7 [Arabidopsis
  misc_feature (1)..(129): Homolog of NCBI NO: 15226605 NR Description: glycine-rich RNA binding protein AtGRP7
MASGDVEYRCFVGGLAWATDDRALETAFAQYGDVIDSKIINDRETGRSRGFGFVTFKDEKAMKDAIEGMNGQDLDGRSITVNEAQSRGSGGGGGHRGGGGGGYRSGGGGGYSGGGGSYGGGGGRREGGGW

SEQ ID NO: 44416 - protein, 69 aa, Arabidopsis thaliana
  peptide (1)..(69): Ceres Seq. ID no. 12781013
  misc_feature (1)..(68): Homolog of NCBI NO: 20152613 NR Description: putative glycine rich protein [Rumex obtusifolius]
  misc_feature (1)..(68): Homolog of NCBI NO: 544426 NR Description: Glycine-rich RNA-binding protein
  misc_feature (1)..(67): Homolog of NCBI NO: 15235002 NR Description: glycine-rich RNA-binding protein 8 (GRP8)
  misc_feature (1)..(69): Homolog of NCBI NO: 30692254 NR Description: glycine-rich RNA-binding protein 8 (GRP8) (CCR1)
  misc_feature (1)..(67): Homolog of NCBI NO: 2267567 NR Description: glycine-rich RNA binding protein 1 [Pelargonium x
  misc_feature (1)..(69): Homolog of NCBI NO: 1346181 NR Description: Glycine-rich RNA-binding protein GRP2A
  misc_feature (1)..(67): Homolog of NCBI NO: 1346180 NR Description: Glycine-rich RNA-binding protein GRP1A
  misc_feature (1)..(68): Homolog of NCBI NO: 30681492 NR Description: glycine-rich RNA-binding protein (AtGRP7)
  misc_feature (1)..(68): Homolog of NCBI NO: 21553354 NR Description: glycine-rich RNA binding protein 7 [Arabidopsis
  misc_feature (1)..(68): Homolog of NCBI NO: 15226605 NR Description: glycine-rich RNA binding protein AtGRP7
MKDAIEGMNGQDLDGRSITVNEAQSRGSGGGGGHRGGGGGGYRSGGGGGYSGGGGSYGGGGGRREGGGW

SEQ ID NO: 44417 - DNA, 1359 bp, Arabidopsis thaliana
  misc_feature (1)..(1359): Ceres Seq. ID no. 13509809
  misc_feature: MA Experiment ID: 20000184 Result: Up-regulated in Transcription
  misc_feature: MA Experiment 20000184 PARAMETER Experiment Name: At_Shoots__P Parameter: Age (day) Value: 7
  misc_feature: MA Experiment 20000184 PARAMETER Experiment Name: At_Shoots__P Parameter: Tissue Value: Shoots vs. Whole Plant
  misc_feature: MA Experiment ID: 20001248 Result: Down-regulated in Transcription
  misc_feature: MA Experiment 20001248 PARAMETER Experiment Name: At_Far-red-induction_P Parameter: Age (day) Value: 7
  misc_feature: MA Experiment 20001248 PARAMETER Experiment Name: At_Far-red-induction_P Parameter: Light Value: Far-red vs. White
  misc_feature: MA Experiment 20001248 PARAMETER Experiment Name: At_Far-red-induction_P Parameter: Organism Value: A. thaliana
  misc_feature: MA Experiment 20001248 PARAMETER Experiment Name: At_Far-red-induction_P Parameter: Plant Line Value: Columbia
  misc_feature: MA Experiment 20001248 PARAMETER Experiment Name: At_Far-red-induction_P Parameter: Timepoint (hr) Value: 4
  misc_feature: MA Experiment 20001248 PARAMETER Experiment Name: At_Far-red-induction_P Parameter: Tissue Value: Whole Plant
  misc_feature: MA Experiment ID: 20001450 Result: Down-regulated in Transcription
  misc_feature: MA Experiment 20001450 PARAMETER Experiment Name: At_Far-red-induction_P Parameter: Age (day) Value: 7
  misc_feature: MA Experiment 20001450 PARAMETER Experiment Name: At_Far-red-induction_P Parameter: Light Value: Far-red vs. White
  misc_feature: MA Experiment 20001450 PARAMETER Experiment Name: At_Far-red-induction_P Parameter: Organism Value: A. thaliana
  misc_feature: MA Experiment 20001450 PARAMETER Experiment Name: At_Far-red-induction_P Parameter: Plant Line Value: Columbia
  misc_feature: MA Experiment 20001450 PARAMETER Experiment Name: At_Far-red-induction_P Parameter: Timepoint (hr) Value: 8
  misc_feature: MA Experiment 20001450 PARAMETER Experiment Name: At_Far-red-induction_P Parameter: Tissue Value: Whole Plant
  misc_feature: MA Experiment ID: 20001905 Result: Up-regulated in Transcription
  misc_feature: MA Experiment 20001905 PARAMETER Experiment Name: At_Drought_Reproduction_P Parameter: Age (day) Value: 40
  misc_feature: MA Experiment 20001905 PARAMETER Experiment Name: At_Drought_Reproduction_P Parameter: Organism Value: A. thaliana
  misc_feature: MA Experiment 20001905 PARAMETER Experiment Name: At_Drought_Reproduction_P Parameter: Plant Line Value: WS
  misc_feature: MA Experiment 20001905 PARAMETER Experiment Name: At_Drought_Reproduction_P Parameter: Timepoint (day) Value: 10
  misc_feature: MA Experiment 20001905 PARAMETER Experiment Name: At_Drought_Reproduction_P Parameter: Tissue Value: Rosettes
  misc_feature: MA Experiment 20001905 PARAMETER Experiment Name: At_Drought_Reproduction_P Parameter: Treatment Value: Drought vs. No Drought
aagcattttagcttcataaaacaaacacaccgacgtcgttaaactcttcatcttcatttttttctgtaacttctcccatattttttcttcccaaaaatatactataaaaatgagaacacttcttctaacgattttgatcttcttcttcacagtgaatccaatctcagcaaaattctacactaacgtctcttcaatcccaccgttacaattcctaaacgcaacgcaaaacgcatgggaaacattctccaaactcgccggttgtcacatcggagaaaatatcaacggcctctcaaaactcaaacaatactttcgccgtttcggttatatcaccaccaccggtaattgcactgacgatttcgatgacgtgcttcaatcagcgatcaacacttaccagaaaaatttcaatctcaaagtcaccggaaaactcgattcctcgactctccggcaaatcgttaaaccgagatgcgggaatccggatttgatcgacggggtttcggagatgaacggtggtaagatactccgtacgactgagaaatactcgtttttccccgggaagccacggtggccgaaacggaaacgagatctgacttatgcgtttgcgccgcagaataatttaacagacgaggttaaacgcgtgttctcacgcgccttcacgcgttgggcggaggtgactccgttgaatttcacgcgctctgagtctatcctccgtgcggatatagtgatcggatttttctccggtgaacatggtgatggagagccgtttgatggagctatgggaacattagcgcatgcttcttcgcctcctacggggatgttacatttagacggtgatgaggattggttgatctctaacggtgaaattagtcgtcggatattaccggtgacgacggtggtggatcttgaatcggtggctgttcatgagattggtcatcttttagggctaggtcattcgtcggtggaagatgcgattatgtttccggcgatttctggtggagatcggaaagtggagttagctaaggatgatatcgaagggattcagcatttgtacggtggtaatccgaatggagacggtggtggttcgaaacctagccgtgagagtcaatctaccggtggtgatagcgttcgtcggtggagagggtggatgattagcttatcatcgattgccacgtgtatattcttgatttctgtttagtgtaggttttattatacttttattccctcttattttggggtcaatttatcgatttgtttttgtttttcttctaaaagtaacgattctatgtgatcgatcggtgtacgaaattggtcatggaaatgagggaaattgtaaaattcttcatattttggattttggtgttt

SEQ ID NO: 44418 - protein, 360 aa, Arabidopsis thaliana
  peptide (1)..(360): Ceres Seq. ID no. 13509810
  misc_feature (145)..(249): Pfam Name: Matrixin Pfam Description: Matrixin
  misc_feature (8)..(337): Homolog of NCBI NO: 7488435 NR Description: zinc metalloproteinase homolog F3I6.6 -
  misc_feature (1)..(358): Homolog of NCBI NO: 15223067 NR Description: matrix metallo proteinase -related [Arabidopsis
  misc_feature (1)..(337): Homolog of NCBI NO: 30688744 NR Description: metallo proteinase -related [Arabidopsis thaliana]
  misc_feature (1)..(360): Homolog of NCBI NO: 15218963 NR Description: metallo proteinase -related [Arabidopsis
MRTLLLTILIFFFTVNPISAKFYTNVSSIPPLQFLNATQNAWETFSKLAGCHIGENINGLSKLKQYFRRFGYITTTGNCTDDFDDVLQSAINTYQKNFNLKVTGKLDSSTLRQIVKPRCGNPDLIDGVSEMNGGKILRTTEKYSFFPGKPRWPKRKRDLTYAFAPQNNLTDEVKRVFSRAFTRWAEVTPLNFTRSESILRADIVIGFFSGEHGDGEPFDGAMGTLAHASSPPTGMLHLDGDEDWLISNGEISRRILPVTTVVDLESVAVHEIGHLLGLGHSSVEDAIMFPAISGGDRKVELAKDDIEGIQHLYGGNPNGDGGGSKPSRESQSTGGDSVRRWRGWMISLSSIATCIFLISV

SEQ ID NO: 44419 - protein, 230 aa, Arabidopsis thaliana
  peptide (1)..(230): Ceres Seq. ID no. 13509811
  misc_feature (15)..(119): Pfam Name: Matrixin Pfam Description: Matrixin
  misc_feature (1)..(207): Homolog of NCBI NO: 7488435 NR Description: zinc metalloproteinase homolog F3I6.6 -
  misc_feature (1)..(228): Homolog of NCBI NO: 15223067 NR Description: matrix metallo proteinase -related [Arabidopsis
  misc_feature (1)..(207): Homolog of NCBI NO: 30688744 NR Description: metallo proteinase -related [Arabidopsis thaliana]
  misc_feature (1)..(230): Homolog of NCBI NO: 15218963 NR Description: metallo proteinase -related [Arabidopsis
MNGGKILRTTEKYSFFPGKPRWPKRKRDLTYAFAPQNNLTDEVKRVFSRAFTRWAEVTPLNFTRSESILRADIVIGFFSGEHGDGEPFDGAMGTLAHASSPPTGMLHLDGDEDWLISNGEISRRILPVTTVVDLESVAVHEIGHLLGLGHSSVEDAIMFPAISGGDRKVELAKDDIEGIQHLYGGNPNGDGGGSKPSRESQSTGGDSVRRWRGWMISLSSIATCIFLISV

SEQ ID NO: 44420 - DNA, 1819 bp, Arabidopsis thaliana; identical to SEQ ID NO: 42770
  misc_feature (1)..(1819): Ceres Seq. ID no. 12489090
  misc_feature: MA Experiment ID: 108435 Result: Up-regulated in Transcription
  misc_feature: MA Experiment 108435 PARAMETER Experiment Name: At_stm_Mutants_cDNA_P Parameter: Plant Line Value: wt Landsburg vs stm
  misc_feature: MA Experiment 108435 PARAMETER Experiment Name: At_stm_Mutants_cDNA_P Parameter: Tissue Value: Shoot Apical Meristem Region
  misc_feature: MA Experiment ID: 108462 Result: Up-regulated in Transcription
  misc_feature: MA Experiment 108462 PARAMETER Experiment Name: At_Germinating_Seeds_cDNA_P Parameter: Age (day) Value: 2 vs. 0
  misc_feature: MA Experiment 108462 PARAMETER Experiment Name: At_Germinating_Seeds_cDNA_P Parameter: Tissue Value: Germinating Seeds
  misc_feature: MA Experiment ID: 108473 Result: Down-regulated in Transcription
  misc_feature: MA Experiment 108473 PARAMETER Experiment Name: At_Drought_Flowers_cDNA_P Parameter: Timepoint (hr) Value: 7 d
  misc_feature: MA Experiment 108473 PARAMETER Experiment Name: At_Drought_Flowers_cDNA_P Parameter: Tissue Value: Flower
  misc_feature: MA Experiment 108473 PARAMETER Experiment Name: At_Drought_Flowers_cDNA_P Parameter: Treatment Value: Drought vs. No Drought
  misc_feature: MA Experiment ID: 108501 Result: Down-regulated in Transcription
  misc_feature: MA Experiment 108501 PARAMETER Experiment Name: At_ap2_floral_buds_cDNA_P Parameter: Plant Line Value: ap2 (Ler.)
  misc_feature: MA Experiment 108501 PARAMETER Experiment Name: At_ap2_floral_buds_cDNA_P Parameter: Tissue Value: Closed Flower
  misc_feature: MA Experiment ID: 108595 Result: Up-regulated in Transcription
  misc_feature: MA Experiment 108595 PARAMETER Experiment Name: At_Ler-pi_Ovule_cDNA_P Parameter: Plant Line Value: null
  misc_feature: MA Experiment ID: 20000264 Result: Up-regulated in Transcription
  misc_feature: MA Experiment 20000264 PARAMETER Experiment Name: At_Open_Flower_P Parameter: Age (day) Value: 21
  misc_feature: MA Experiment 20000264 PARAMETER Experiment Name: At_Open_Flower_P Parameter: Plant Line Value: WS
  misc_feature: MA Experiment 20000264 PARAMETER Experiment Name: At_Open_Flower_P Parameter: Tissue Value: Open Flower vs. Whole Plant
  misc_feature: MA Experiment ID: 20000265 Result: Up-regulated in Transcription
  misc_feature: MA Experiment 20000265 PARAMETER Experiment Name: At_Open_Flower_P Parameter: Age (day) Value: 21
  misc_feature: MA Experiment 20000265 PARAMETER Experiment Name: At_Open_Flower_P Parameter: Plant Line Value: WS
  misc_feature: MA Experiment 20000265 PARAMETER Experiment Name: At_Open_Flower_P Parameter: Tissue Value: Closed Flower vs. Whole Plant
  misc_feature: MA Experiment ID: 20000286 Result: Up-regulated in Transcription
  misc_feature: MA Experiment 20000286 PARAMETER Experiment Name: At_Open_Flower_P Parameter: Age (day) Value: 21
  misc_feature: MA Experiment 20000286 PARAMETER Experiment Name: At_Open_Flower_P Parameter: Plant Line Value: WS
  misc_feature: MA Experiment 20000286 PARAMETER Experiment Name: At_Open_Flower_P Parameter: Tissue Value: Half Open vs. Whole Plant
  misc_feature: MA Experiment ID: 20001906 Result: Down-regulated in Transcription
  misc_feature: MA Experiment 20001906 PARAMETER Experiment Name: At_Drought_Reproduction_P Parameter: Age (day) Value: 35
  misc_feature: MA Experiment 20001906 PARAMETER Experiment Name: At_Drought_Reproduction_P Parameter: Organism Value: A. thaliana
  misc_feature: MA Experiment 20001906 PARAMETER Experiment Name: At_Drought_Reproduction_P Parameter: Plant Line Value: WS
  misc_feature: MA Experiment 20001906 PARAMETER Experiment Name: At_Drought_Reproduction_P Parameter: Timepoint (day) Value: 5
  misc_feature: MA Experiment 20001906 PARAMETER Experiment Name: At_Drought_Reproduction_P Parameter: Tissue Value: Siliques
  misc_feature: MA Experiment 20001906 PARAMETER Experiment Name: At_Drought_Reproduction_P Parameter: Treatment Value: Drought vs. No Drought
  misc_feature: MA Experiment ID: 20001911 Result: Down-regulated in Transcription
  misc_feature: MA Experiment 20001911 PARAMETER Experiment Name: At_Drought_Reproduction_P Parameter: Age (day) Value: 40
  misc_feature: MA Experiment 20001911 PARAMETER Experiment Name: At_Drought_Reproduction_P Parameter: Organism Value: A. thaliana
  misc_feature: MA Experiment 20001911 PARAMETER Experiment Name: At_Drought_Reproduction_P Parameter: Plant Line Value: WS
  misc_feature: MA Experiment 20001911 PARAMETER Experiment Name: At_Drought_Reproduction_P Parameter: Timepoint (day) Value: 10
  misc_feature: MA Experiment 20001911 PARAMETER Experiment Name: At_Drought_Reproduction_P Parameter: Tissue Value: Flowers
  misc_feature: MA Experiment 20001911 PARAMETER Experiment Name: At_Drought_Reproduction_P Parameter: Treatment Value: Drought vs. No Drought

SEQ ID NO: 44421 - protein, 544 aa, Arabidopsis thaliana; identical to SEQ ID NO: 42771
  peptide (1)..(544): Ceres Seq. ID no. 12489091
  misc_feature (69)..(262): Pfam Name: haloacid dehalogenase-like hydrolase Pfam Description: haloacid dehalogenase-like hydrolase
  misc_feature (69)..(262): Pfam Name: haloacid dehalogenase-like hydrolase Pfam Description: haloacid dehalogenase-like hydrolase
  misc_feature (59)..(537): Homolog of NCBI NO: 18390661 NR Description: expressed protein
  misc_feature (59)..(537): Homolog of NCBI NO: 21618047 NR Description: unknown [Arabidopsis thaliana]
  misc_feature (65)..(537): Homolog of NCBI NO: 15239924 NR Description: putative protein; protein id: At5g06090.1
  misc_feature (65)..(537): Homolog of NCBI NO: 15229747 NR Description: unknown protein; protein id: At3g11430.1
  misc_feature (90)..(540): Homolog of NCBI NO: 29788867 NR Description: hypothetical protein [Oryza sativa (japonica
  misc_feature (59)..(537): Homolog of NCBI NO: 18390661 NR Description: expressed protein
  misc_feature (65)..(537): Homolog of NCBI NO: 15239924 NR Description: putative protein; protein id: At5g06090.1
  misc_feature (90)..(540): Homolog of NCBI NO: 29788867 NR Description: hypothetical protein [Oryza sativa (japonica
  misc_feature (44)..(544): Homolog of NCBI NO: 15224445 NR Description: unknown protein
  misc_feature (44)..(544): Homolog of NCBI NO: 15223437 NR Description: hypothetical protein
  misc_feature (44)..(544): Homolog of NCBI NO: 17064780 NR Description: Unknown protein [Arabidopsis thaliana]
  misc_feature (53)..(540): Homolog of NCBI NO: 38000002 NR Description: unknown protein [Oryza sativa (japonica
  misc_feature (53)..(537): Homolog of NCBI NO: 37534314 NR Description: hypothetical protein [Oryza sativa (japonica
  misc_feature (65)..(537): Homolog of NCBI NO: 15229747 NR Description: unknown protein; protein id: At3g11430.1
  misc_feature (59)..(537): Homolog of NCBI NO: 21618047 NR Description: unknown [Arabidopsis thaliana]
  misc_feature (53)..(537): Homolog of NCBI NO: 37534314 NR Description: hypothetical protein [Oryza sativa (japonica
  misc_feature (53)..(540): Homolog of NCBI NO: 38000002 NR Description: unknown protein [Oryza sativa (japonica
  misc_feature (44)..(544): Homolog of NCBI NO: 17064780 NR Description: Unknown protein [Arabidopsis thaliana]
  misc_feature (44)..(544): Homolog of NCBI NO: 15223437 NR Description: hypothetical protein
  misc_feature (44)..(544): Homolog of NCBI NO: 15224445 NR Description: unknown protein

SEQ ID NO: 44422 - protein, 501 aa, Arabidopsis thaliana [sequence omitted]

SEQ ID NO: 44423 - protein, 366 aa, Arabidopsis thaliana; identical to SEQ ID NO: 42773
  peptide (1)..(366): Ceres Seq. ID no. 12489093
  misc_feature (1)..(84): Pfam Name: haloacid dehalogenase-like hydrolase Pfam Description: haloacid dehalogenase-like hydrolase
  misc_feature (1)..(84): Pfam Name: haloacid dehalogenase-like hydrolase Pfam Description: haloacid dehalogenase-like hydrolase
  misc_feature (1)..(359): Homolog of NCBI NO: 18390661 NR Description: expressed protein
  misc_feature (1)..(359): Homolog of NCBI NO: 21618047 NR Description: unknown [Arabidopsis thaliana]
  misc_feature (1)..(359): Homolog of NCBI NO: 15239924 NR Description: putative protein; protein id: At5g06090.1
  misc_feature (1)..(359): Homolog of NCBI NO: 15229747 NR Description: unknown protein; protein id: At3g11430.1
  misc_feature (1)..(362): Homolog of NCBI NO: 29788867 NR Description: hypothetical protein [Oryza sativa (japonica
  misc_feature (1)..(359): Homolog of NCBI NO: 18390661 NR Description: expressed protein
  misc_feature (1)..(359): Homolog of NCBI NO: 15239924 NR Description: putative protein; protein id: At5g06090.1
  misc_feature (1)..(362): Homolog of NCBI NO: 29788867 NR Description: hypothetical protein [Oryza sativa (japonica
  misc_feature (1)..(366): Homolog of NCBI NO: 15224445 NR Description: unknown protein
  misc_feature (1)..(366): Homolog of NCBI NO: 15223437 NR Description: hypothetical protein
  misc_feature (1)..(366): Homolog of NCBI NO: 17064780 NR Description: Unknown protein [Arabidopsis thaliana]
  misc_feature (1)..(362): Homolog of NCBI NO: 38000002 NR Description: unknown protein [Oryza sativa (japonica
  misc_feature (1)..(359): Homolog of NCBI NO: 37534314 NR Description: hypothetical protein [Oryza sativa (japonica
  misc_feature (1)..(359): Homolog of NCBI NO: 15229747 NR Description: unknown protein; protein id: At3g11430.1
  misc_feature (1)..(359): Homolog of NCBI NO: 21618047 NR Description: unknown [Arabidopsis thaliana]
  misc_feature (1)..(359): Homolog of NCBI NO: 37534314 NR Description: hypothetical protein [Oryza sativa (japonica
  misc_feature (1)..(362): Homolog of NCBI NO: 38000002 NR Description: unknown protein [Oryza sativa (japonica
  misc_feature (1)..(366): Homolog of NCBI NO: 17064780 NR Description: Unknown protein [Arabidopsis thaliana]
  misc_feature (1)..(366): Homolog of NCBI NO: 15223437 NR Description: hypothetical protein
  misc_feature (1)..(366): Homolog of NCBI NO: 15224445 NR Description: unknown protein

SEQ ID NO: 44424 - DNA, 1833 bp, Arabidopsis thaliana; identical to SEQ ID NO: 30707
  misc_feature (1)..(1833): Ceres Seq. ID no. 13509854
  misc_feature: MA Experiment ID: 108434 Result: Down-regulated in Transcription
  misc_feature: MA Experiment 108434 PARAMETER Experiment Name: At_Root_Tips_cDNA_P Parameter: Tissue Value: Root Tips
  misc_feature: MA Experiment ID: 108462 Result: Down-regulated in Transcription
  misc_feature: MA Experiment 108462 PARAMETER Experiment Name: At_Germinating_Seeds_cDNA_P Parameter: Age (day) Value: 2 vs. 0
  misc_feature: MA Experiment 108462 PARAMETER Experiment Name: At_Germinating_Seeds_cDNA_P Parameter: Tissue Value: Germinating Seeds
  misc_feature: MA Experiment ID: 108463 Result: Down-regulated in Transcription
  misc_feature: MA Experiment 108463 PARAMETER Experiment Name: At_Germinating_Seeds_cDNA_P Parameter: Age (day) Value: 3 vs. 0
  misc_feature: MA Experiment 108463 PARAMETER Experiment Name: At_Germinating_Seeds_cDNA_P Parameter: Tissue Value: Germinating Seeds
  misc_feature: MA Experiment ID: 108464 Result: Down-regulated in Transcription
  misc_feature: MA Experiment 108464 PARAMETER Experiment Name: At_Germinating_Seeds_cDNA_P Parameter: Age (day) Value: 4 vs. 0
  misc_feature: MA Experiment 108464 PARAMETER Experiment Name: At_Germinating_Seeds_cDNA_P Parameter: Tissue Value: Germinating Seeds
  misc_feature: MA Experiment ID: 108488 Result: Down-regulated in Transcription
  misc_feature: MA Experiment ID: 108501 Result: Down-regulated in Transcription
  misc_feature: MA Experiment 108501 PARAMETER Experiment Name: At_ap2_floral_buds_cDNA_P Parameter: Plant Line Value: ap2 (Ler.)
  misc_feature: MA Experiment 108501 PARAMETER Experiment Name: At_ap2_floral_buds_cDNA_P Parameter: Tissue Value: Closed Flower
  misc_feature: MA Experiment ID: 108573 Result: Up-regulated in Transcription
  misc_feature: MA Experiment 108573 PARAMETER Experiment Name: At_Drought_cDNA_P Parameter: Timepoint (hr) Value: 6
  misc_feature: MA Experiment 108573 PARAMETER Experiment Name: At_Drought_cDNA_P Parameter: Tissue Value: Aerial
  misc_feature: MA Experiment 108573 PARAMETER Experiment Name: At_Drought_cDNA_P Parameter: Treatment Value: Drought vs. No Drought
  misc_feature: MA Experiment ID: 108605 Result: Up-regulated in Transcription
  misc_feature: MA Experiment 108605 PARAMETER Experiment Name: At_100uM_ABA_cDNA_P Parameter: Timepoint (hr) Value: 6
  misc_feature: MA Experiment 108605 PARAMETER Experiment Name: At_100uM_ABA_cDNA_P Parameter: Tissue Value: Aerial
  misc_feature: MA Experiment 108605 PARAMETER Experiment Name: At_100uM_ABA_cDNA_P Parameter: Treatment Value: 100uM ABA vs. No Treatment
  misc_feature: MA Experiment ID: 20000088 Result: Up-regulated in Transcription
  misc_feature: MA Experiment 20000088 PARAMETER Experiment Name: At_100uM_ABA_Mutants_cDNA_P Parameter: Plant Line Value: Landsberg
  misc_feature: MA Experiment 20000088 PARAMETER Experiment Name: At_100uM_ABA_Mutants_cDNA_P Parameter: Timepoint (hr) Value: 6
  misc_feature: MA Experiment 20000088 PARAMETER Experiment Name: At_100uM_ABA_Mutants_cDNA_P Parameter: Tissue Value: Aerial
  misc_feature: MA Experiment 20000088 PARAMETER Experiment Name: At_100uM_ABA_Mutants_cDNA_P Parameter: Treatment Value: 100uM ABA vs. No Treatment
  misc_feature: MA Experiment ID: 20000184 Result: Down-regulated in Transcription
  misc_feature: MA Experiment 20000184 PARAMETER Experiment Name: At_Shoots__P Parameter: Age (day) Value: 7
  misc_feature: MA Experiment 20000184 PARAMETER Experiment Name: At_Shoots__P Parameter: Tissue Value: Shoots vs. Whole Plant
  misc_feature: MA Experiment ID: 20000264 Result: Up-regulated in Transcription
  misc_feature: MA Experiment 20000264 PARAMETER Experiment Name: At_Open_Flower_P Parameter: Age (day) Value: 21
  misc_feature: MA Experiment 20000264 PARAMETER Experiment Name: At_Open_Flower_P Parameter: Plant Line Value: WS
  misc_feature: MA Experiment 20000264 PARAMETER Experiment Name: At_Open_Flower_P Parameter: Tissue Value: Open Flower vs. Whole Plant
  misc_feature: MA Experiment ID: 20000265 Result: Up-regulated in Transcription
  misc_feature: MA Experiment 20000265 PARAMETER Experiment Name: At_Open_Flower_P Parameter: Age (day) Value: 21
  misc_feature: MA Experiment 20000265 PARAMETER Experiment Name: At_Open_Flower_P Parameter: Plant Line Value: WS
  misc_feature: MA Experiment 20000265 PARAMETER Experiment Name: At_Open_Flower_P Parameter: Tissue Value: Closed Flower vs. Whole Plant
  misc_feature: MA Experiment ID: 20000286 Result: Up-regulated in Transcription
  misc_feature: MA Experiment 20000286 PARAMETER Experiment Name: At_Open_Flower_P Parameter: Age (day) Value: 21
  misc_feature: MA Experiment 20000286 PARAMETER Experiment Name: At_Open_Flower_P Parameter: Plant Line Value: WS
  misc_feature: MA Experiment 20000286 PARAMETER Experiment Name: At_Open_Flower_P Parameter: Tissue Value: Half Open vs. Whole Plant
  misc_feature: MA Experiment ID: 20000438 Result: Down-regulated in Transcription
  misc_feature: MA Experiment 20000438 PARAMETER Experiment Name: At_Shoots__P Parameter: Age (day) Value: 14
  misc_feature: MA Experiment 20000438 PARAMETER Experiment Name: At_Shoots__P Parameter: Tissue Value: Shoots vs. Whole Plant
  misc_feature: MA Experiment ID: 20000794 Result: Up-regulated in Transcription
  misc_feature: MA Experiment 20000794 PARAMETER Experiment Name: At_Petals_P Parameter: Age (day) Value: 23-25 days
  misc_feature: MA Experiment 20000794 PARAMETER Experiment Name: At_Petals_P Parameter: Plant Line Value: WS
  misc_feature: MA Experiment 20000794 PARAMETER Experiment Name: At_Petals_P Parameter: Tissue Value: Petals vs. Whole plant
  misc_feature: MA Experiment ID: 20001248 Result: Down-regulated in Transcription
  misc_feature: MA Experiment 20001248 PARAMETER Experiment Name: At_Far-red-induction_P Parameter: Age (day) Value: 7
  misc_feature: MA Experiment 20001248 PARAMETER Experiment Name: At_Far-red-induction_P Parameter: Light Value: Far-red vs. White
  misc_feature: MA Experiment 20001248 PARAMETER Experiment Name: At_Far-red-induction_P Parameter: Organism Value: A. thaliana
  misc_feature: MA Experiment 20001248 PARAMETER Experiment Name: At_Far-red-induction_P Parameter: Plant Line Value: Columbia
  misc_feature: MA Experiment 20001248 PARAMETER Experiment Name: At_Far-red-induction_P Parameter: Timepoint (hr) Value: 4
  misc_feature: MA Experiment 20001248 PARAMETER Experiment Name: At_Far-red-induction_P Parameter: Tissue Value: Whole Plant
  misc_feature: MA Experiment ID: 20001559 Result: Up-regulated in Transcription
  misc_feature: MA Experiment 20001559 PARAMETER Experiment Name: At_Drought_Soil_Dry_P Parameter: Age (day) Value: 28
  misc_feature: MA Experiment 20001559 PARAMETER Experiment Name: At_Drought_Soil_Dry_P Parameter: Organism Value: A. thaliana
  misc_feature: MA Experiment 20001559 PARAMETER Experiment Name: At_Drought_Soil_Dry_P Parameter: Plant Line Value: WS
  misc_feature: MA Experiment 20001559 PARAMETER Experiment Name: At_Drought_Soil_Dry_P Parameter: Post Timepoint (hr) Value: 29
  misc_feature: MA Experiment 20001559 PARAMETER Experiment Name: At_Drought_Soil_Dry_P Parameter: Post-Treatment Value: Re-Water vs. No Drought
  misc_feature: MA Experiment 20001559 PARAMETER Experiment Name: At_Drought_Soil_Dry_P Parameter: Timepoint (day) Value: 14
  misc_feature: MA Experiment 20001559 PARAMETER Experiment Name: At_Drought_Soil_Dry_P Parameter: Treatment Value: Drought vs. No Drought
  misc_feature: MA Experiment ID: 20001904 Result: Up-regulated in Transcription
  misc_feature: MA Experiment 20001904 PARAMETER Experiment Name: At_Drought_Reproduction_P Parameter: Age (day) Value: 37
  misc_feature: MA Experiment 20001904 PARAMETER Experiment Name: At_Drought_Reproduction_P Parameter: Organism Value: A. thaliana
  misc_feature: MA Experiment 20001904 PARAMETER Experiment Name: At_Drought_Reproduction_P Parameter: Plant Line Value: WS
  misc_feature: MA Experiment 20001904 PARAMETER Experiment Name: At_Drought_Reproduction_P Parameter: Timepoint (day) Value: 7
  misc_feature: MA Experiment 20001904 PARAMETER Experiment Name: At_Drought_Reproduction_P Parameter: Tissue Value: Rosettes
  misc_feature: MA Experiment 20001904 PARAMETER Experiment Name: At_Drought_Reproduction_P Parameter: Treatment Value: Drought vs. No Drought
  misc_feature: MA Experiment ID: 20001905 Result: Up-regulated in Transcription
  misc_feature: MA Experiment 20001905 PARAMETER Experiment Name: At_Drought_Reproduction_P Parameter: Age (day) Value: 40
  misc_feature: MA Experiment 20001905 PARAMETER Experiment Name: At_Drought_Reproduction_P Parameter: Organism Value: A. thaliana
  misc_feature: MA Experiment 20001905 PARAMETER Experiment Name: At_Drought_Reproduction_P Parameter: Plant Line Value: WS
  misc_feature: MA Experiment 20001905 PARAMETER Experiment Name: At_Drought_Reproduction_P Parameter: Timepoint (day) Value: 10
  misc_feature: MA Experiment 20001905 PARAMETER Experiment Name: At_Drought_Reproduction_P Parameter: Tissue Value: Rosettes
  misc_feature: MA Experiment 20001905 PARAMETER Experiment Name: At_Drought_Reproduction_P Parameter: Treatment Value: Drought vs. No Drought
  misc_feature: MA Experiment ID: 20001906 Result: Up-regulated in Transcription
  misc_feature: MA Experiment 20001906 PARAMETER Experiment Name: At_Drought_Reproduction_P Parameter: Age (day) Value: 35
  misc_feature: MA Experiment 20001906 PARAMETER Experiment Name: At_Drought_Reproduction_P Parameter: Organism Value: A. thaliana
  misc_feature: MA Experiment 20001906 PARAMETER Experiment Name: At_Drought_Reproduction_P Parameter: Plant Line Value: WS
  misc_feature: MA Experiment 20001906 PARAMETER Experiment Name: At_Drought_Reproduction_P Parameter: Timepoint (day) Value: 5
  misc_feature: MA Experiment 20001906 PARAMETER Experiment Name: At_Drought_Reproduction_P Parameter: Tissue Value: Siliques
  misc_feature: MA Experiment 20001906 PARAMETER Experiment Name: At_Drought_Reproduction_P Parameter: Treatment Value: Drought vs. No Drought
  misc_feature: MA Experiment ID: 20001908 Result: Up-regulated in Transcription
  misc_feature: MA Experiment 20001908 PARAMETER Experiment Name: At_Drought_Reproduction_P Parameter: Age (day) Value: 40
  misc_feature: MA Experiment 20001908 PARAMETER Experiment Name: At_Drought_Reproduction_P Parameter: Organism Value: A. thaliana
  misc_feature: MA Experiment 20001908 PARAMETER Experiment Name: At_Drought_Reproduction_P Parameter: Plant Line Value: WS
  misc_feature: MA Experiment 20001908 PARAMETER Experiment Name: At_Drought_Reproduction_P Parameter: Timepoint (day) Value: 10
  misc_feature: MA Experiment 20001908 PARAMETER Experiment Name: At_Drought_Reproduction_P Parameter: Tissue Value: Siliques
  misc_feature: MA Experiment 20001908 PARAMETER Experiment Name: At_Drought_Reproduction_P Parameter: Treatment Value: Drought vs. No Drought

SEQ ID NO: 44425 - protein, 510 aa, Arabidopsis thaliana; identical to SEQ ID NO: 30708
  peptide (1)..(510): Ceres Seq. ID no. 13509855
  misc_feature (33)..(500): Homolog of NCBI NO: 115874 NR Description: Serine carboxypeptidase III precursor (CP-WIII)
  misc_feature (33)..(500): Homolog of NCBI NO: 82620 NR Description: carboxypeptidase C (EC 3.4.16.5) precursor - wheat
  misc_feature (25)..(505): Homolog of NCBI NO: 6960455 NR Description: serine carboxypeptidase precursor [Matricaria
  misc_feature (14)..(501): Homolog of NCBI NO: 21901929 NR Description: carboxypeptidase type III [Theobroma cacao]
  misc_feature (4)..(500): Homolog of NCBI NO: 15228281 NR Description: serine carboxypeptidase III, putative
  misc_feature (4)..(500): Homolog of NCBI NO: 166674 NR Description: carboxypeptidase Y-like protein
  misc_feature (11)..(501): Homolog of NCBI NO: 18447763 NR Description: putative serine carboxypeptidase precursor
  misc_feature (1)..(502): Homolog of NCBI NO: 15237178 NR Description: serine carboxypeptidase III, putative
  misc_feature (1)..(510): Homolog of NCBI NO: 16323071 NR Description: AT3g45010/F14D17_80 [Arabidopsis thaliana]
  misc_feature (1)..(510): Homolog of NCBI NO: 15230577 NR Description: serine carboxypeptidase III, putative
  misc_feature (33)..(500): Homolog of NCBI NO: 115874 NR Description: Serine carboxypeptidase III precursor (CP-WIII)
  misc_feature (33)..(500): Homolog of NCBI NO: 82620 NR Description: carboxypeptidase C (EC 3.4.16.5) precursor - wheat
  misc_feature (25)..(505): Homolog of NCBI NO: 6960455 NR Description: serine carboxypeptidase precursor [Matricaria
  misc_feature (14)..(501): Homolog of NCBI NO: 21901929 NR Description: carboxypeptidase type III [Theobroma cacao]
  misc_feature (4)..(500): Homolog of NCBI NO: 15228281 NR Description: serine carboxypeptidase III, putative
  misc_feature (4)..(500): Homolog of NCBI NO: 166674 NR Description: carboxypeptidase Y-like protein
  misc_feature (11)..(501): Homolog of NCBI NO: 18447763 NR Description: putative serine carboxypeptidase precursor
  misc_feature (1)..(502): Homolog of NCBI NO: 15237178 NR Description: serine carboxypeptidase III, putative
  misc_feature (1)..(510): Homolog of NCBI NO: 16323071 NR Description: AT3g45010/F14D17_80 [Arabidopsis thaliana]
  misc_feature (1)..(510): Homolog of NCBI NO: 15230577 NR Description: serine carboxypeptidase III, putative
  misc_feature (33)..(500): Homolog of NCBI NO: 115874 NR Description: Serine carboxypeptidase III precursor (CP-WIII)
  misc_feature (33)..(500): Homolog of NCBI NO: 82620 NR Description: carboxypeptidase C (EC 3.4.16.5) precursor - wheat
  misc_feature (25)..(505): Homolog of NCBI NO: 6960455 NR Description: serine carboxypeptidase precursor [Matricaria
  misc_feature (14)..(501): Homolog of NCBI NO: 21901929 NR Description: carboxypeptidase type III [Theobroma cacao]
  misc_feature (4)..(500): Homolog of NCBI NO: 15228281 NR Description: serine carboxypeptidase III, putative
  misc_feature (4)..(500): Homolog of NCBI NO: 166674 NR Description: carboxypeptidase Y-like protein
  misc_feature (11)..(501): Homolog of NCBI NO: 18447763 NR Description: putative serine carboxypeptidase precursor
  misc_feature (1)..(502): Homolog of NCBI NO: 15237178 NR Description: serine carboxypeptidase III, putative
  misc_feature (1)..(510): Homolog of NCBI NO: 16323071 NR Description: AT3g45010/F14D17_80 [Arabidopsis thaliana]
  misc_feature (1)..(510): Homolog of NCBI NO: 15230577 NR Description: serine carboxypeptidase III, putative

SEQ ID NO: 44426 - protein, 455 aa, Arabidopsis thaliana; identical to SEQ ID NO: 30709
  peptide (1)..(455): Ceres Seq. ID no. 13509856
  misc_feature (1)..(445): Homolog of NCBI NO: 115874 NR Description: Serine carboxypeptidase III precursor (CP-WIII)
  misc_feature (1)..(445): Homolog of NCBI NO: 82620 NR Description: carboxypeptidase C (EC 3.4.16.5) precursor - wheat
  misc_feature (1)..(450): Homolog of NCBI NO: 6960455 NR Description: serine carboxypeptidase precursor [Matricaria
  misc_feature (1)..(446): Homolog of NCBI NO: 21901929 NR Description: carboxypeptidase type III [Theobroma cacao]
  misc_feature (1)..(445): Homolog of NCBI NO: 15228281 NR Description: serine carboxypeptidase III, putative
  misc_feature (1)..(445): Homolog of NCBI NO: 166674 NR Description: carboxypeptidase Y-like protein
  misc_feature (1)..(446): Homolog of NCBI NO: 18447763 NR Description: putative serine carboxypeptidase precursor
  misc_feature (1)..(447): Homolog of NCBI NO: 15237178 NR Description: serine carboxypeptidase III, putative
  misc_feature (1)..(455): Homolog of NCBI NO: 16323071 NR Description: AT3g45010/F14D17_80 [Arabidopsis thaliana]
  misc_feature (1)..(455): Homolog of NCBI NO: 15230577 NR Description: serine carboxypeptidase III, putative
  misc_feature (1)..(445): Homolog of NCBI NO: 115874 NR Description: Serine carboxypeptidase III precursor (CP-WIII)
  misc_feature (1)..(445): Homolog of NCBI NO: 82620 NR Description: carboxypeptidase C (EC 3.4.16.5) precursor - wheat
  misc_feature (1)..(450): Homolog of NCBI NO: 6960455 NR Description: serine carboxypeptidase precursor [Matricaria
  misc_feature (1)..(446): Homolog of NCBI NO: 21901929 NR Description: carboxypeptidase type III [Theobroma cacao]
  misc_feature (1)..(445): Homolog of NCBI NO: 15228281 NR Description: serine carboxypeptidase III, putative
  misc_feature (1)..(445): Homolog of NCBI NO: 166674 NR Description: carboxypeptidase Y-like protein
  misc_feature (1)..(446): Homolog of NCBI NO: 18447763 NR Description: putative serine carboxypeptidase precursor
  misc_feature (1)..(447): Homolog of NCBI NO: 15237178 NR Description: serine carboxypeptidase III, putative
  misc_feature (1)..(455): Homolog of NCBI NO: 16323071 NR Description: AT3g45010/F14D17_80 [Arabidopsis thaliana]
  misc_feature (1)..(455): Homolog of NCBI NO: 15230577 NR Description: serine carboxypeptidase III, putative
  misc_feature (1)..(445): Homolog of NCBI NO: 115874 NR Description: Serine carboxypeptidase III precursor (CP-WIII)
  misc_feature (1)..(445): Homolog of NCBI NO: 82620 NR Description: carboxypeptidase C (EC 3.4.16.5) precursor - wheat
  misc_feature (1)..(450): Homolog of NCBI NO: 6960455 NR Description: serine carboxypeptidase precursor [Matricaria
  misc_feature (1)..(446): Homolog of NCBI NO: 21901929 NR Description: carboxypeptidase type III [Theobroma cacao]
  misc_feature (1)..(445): Homolog of NCBI NO: 15228281 NR Description: serine carboxypeptidase III, putative
  misc_feature (1)..(445): Homolog of NCBI NO: 166674 NR Description: carboxypeptidase Y-like protein
  misc_feature (1)..(446): Homolog of NCBI NO: 18447763 NR Description: putative serine carboxypeptidase precursor
  misc_feature (1)..(447): Homolog of NCBI NO: 15237178 NR Description: serine carboxypeptidase III, putative
  misc_feature (1)..(455): Homolog of NCBI NO: 16323071 NR Description: AT3g45010/F14D17_80 [Arabidopsis thaliana]
  misc_feature (1)..(455): Homolog of NCBI NO: 15230577 NR Description: serine carboxypeptidase III, putative

SEQ ID NO: 44427 - protein, 395 aa, Arabidopsis thaliana; identical to SEQ ID NO: 30710
  peptide (1)..(395): Ceres Seq. ID no. 13509857
  misc_feature (1)..(385): Homolog of NCBI NO: 115874 NR Description: Serine carboxypeptidase III precursor (CP-WIII)
  misc_feature (1)..(385): Homolog of NCBI NO: 82620 NR Description: carboxypeptidase C (EC 3.4.16.5) precursor - wheat
  misc_feature (1)..(390): Homolog of NCBI NO: 6960455 NR Description: serine carboxypeptidase precursor [Matricaria
  misc_feature (1)..(386): Homolog of NCBI NO: 21901929 NR Description: carboxypeptidase type III [Theobroma cacao]
  misc_feature (1)..(385): Homolog of NCBI NO: 15228281 NR Description: serine carboxypeptidase III, putative
  misc_feature (1)..(385): Homolog of NCBI NO: 166674 NR Description: carboxypeptidase Y-like protein
  misc_feature (1)..(386): Homolog of NCBI NO: 18447763 NR Description: putative serine carboxypeptidase precursor
  misc_feature (1)..(387): Homolog of NCBI NO: 15237178 NR Description: serine carboxypeptidase III, putative
  misc_feature (1)..(395): Homolog of NCBI NO: 16323071 NR Description: AT3g45010/F14D17_80 [Arabidopsis thaliana]
  misc_feature (1)..(395): Homolog of NCBI NO: 15230577 NR Description: serine carboxypeptidase III, putative
  misc_feature (1)..(385): Homolog of NCBI NO: 115874 NR Description: Serine carboxypeptidase III precursor (CP-WIII)
  misc_feature (1)..(385): Homolog of NCBI NO: 82620 NR Description: carboxypeptidase C (EC 3.4.16.5) precursor - wheat
  misc_feature (1)..(390): Homolog of NCBI NO: 6960455 NR Description: serine carboxypeptidase precursor [Matricaria
  misc_feature (1)..(386): Homolog of NCBI NO: 21901929 NR Description: carboxypeptidase type III [Theobroma cacao]
  misc_feature (1)..(385): Homolog of NCBI NO: 15228281 NR Description: serine carboxypeptidase III, putative
  misc_feature (1)..(385): Homolog of NCBI NO: 166674 NR Description: carboxypeptidase Y-like protein
  misc_feature (1)..(386): Homolog of NCBI NO: 18447763 NR Description: putative serine carboxypeptidase precursor
  misc_feature (1)..(387): Homolog of NCBI NO: 15237178 NR Description: serine carboxypeptidase III, putative
  misc_feature (1)..(395): Homolog of NCBI NO: 16323071 NR Description: AT3g45010/F14D17_80 [Arabidopsis thaliana]
  misc_feature (1)..(395): Homolog of NCBI NO: 15230577 NR Description: serine carboxypeptidase III, putative
  misc_feature (1)..(385): Homolog of NCBI NO: 115874 NR Description: Serine carboxypeptidase III precursor (CP-WIII)
  misc_feature (1)..(385): Homolog of NCBI NO: 82620 NR Description: carboxypeptidase C (EC 3.4.16.5) precursor - wheat
  misc_feature (1)..(390): Homolog of NCBI NO: 6960455 NR Description: serine carboxypeptidase precursor [Matricaria
  misc_feature (1)..(386): Homolog of NCBI NO: 21901929 NR Description: carboxypeptidase type III [Theobroma cacao]
  misc_feature (1)..(385): Homolog of NCBI NO: 15228281 NR Description: serine carboxypeptidase III, putative
  misc_feature (1)..(385): Homolog of NCBI NO: 166674 NR Description: carboxypeptidase Y-like protein
  misc_feature (1)..(386): Homolog of NCBI NO: 18447763 NR Description: putative serine carboxypeptidase precursor
  misc_feature (1)..(387): Homolog of NCBI NO: 15237178 NR Description: serine carboxypeptidase III, putative
  misc_feature (1)..(395): Homolog of NCBI NO: 16323071 NR Description: AT3g45010/F14D17_80 [Arabidopsis thaliana]
  misc_feature (1)..(395): Homolog of NCBI NO: 15230577 NR Description: serine carboxypeptidase III, putative

SEQ ID NO: 44428 - DNA, 2126 bp, Arabidopsis thaliana
  misc_feature (1)..(2126): Ceres Seq. ID no. 13509502
  misc_feature: MA Experiment ID: 20000347 Result: Up-regulated in Transcription
  misc_feature: MA Experiment 20000347 PARAMETER Experiment Name: At_2mM_SA_Sub_P Parameter: Age (day) Value: 14
  misc_feature: MA Experiment 20000347 PARAMETER Experiment Name: At_2mM_SA_Sub_P Parameter: Organism Value: A. thaliana
  misc_feature: MA Experiment 20000347 PARAMETER Experiment Name: At_2mM_SA_Sub_P Parameter: Plant Line Value: WS
  misc_feature: MA Experiment 20000347 PARAMETER Experiment Name: At_2mM_SA_Sub_P Parameter: Timepoint (hr) Value: 6
  misc_feature: MA Experiment 20000347 PARAMETER Experiment Name: At_2mM_SA_Sub_P Parameter: Tissue Value: Aerial
  misc_feature: MA Experiment 20000347 PARAMETER Experiment Name: At_2mM_SA_Sub_P Parameter: Treatment Value: 2mM SA vs. No Treatment
ctattattggattggatcatcatcgttaaagctccacgccttgtcccaatttcctctttggttctttccttctgggcttgttattgttgtttctcgaaaaagaagaagaagcgatggtattgggattttagggattattgcggtttgttgtatatatatatatagaagctgagggattttgtgttgtgaagaacatcgaatcctgtttttttccgtaagaaagttcttagatttctccaagtgaaagaagatgtcatcagctggtgttgcgttaagtccggttcgtagcgagccattgattatgcctctggttcgtgccaattcttgtcttgattcttatcctgacgacaccatcatgatttaccttacacttcctggatcggtgataccaatgcgagtgcttgagtctgattccattgagtctgttaagcttcggattcagtcttaccgcggctttgttgtgaggaatcagaagcttgttttcggtggtcgagagctagctagaagcaattctaatatgcgtgattatggtgttagtgaaggcaacattctccacttggttcttaagctctctgatcttcaggttcttgatgttaagactacctgtgggaaacactgcaggtttcatgtcgagagagggagaaacattgggtatgtgaagaagcagatttcgaaaaagcgtggagactttgttgatcctgatgaacaggagattctttacgaaggtgagaagttggaagaccagagtcttattaatgacatttgtagaaacgatgactcggttttgcatctgcttgtgcggagatctgctaaagttcgagttaagccggtggagaagaactttgagttgtctattgttgccccacaagcaaaagataagaagggtcgtgaagctaagagcattgtgccaccaaaaaagctttctttggagccggtagttgttaactccaaggctaaagtacctctggtggttaaagatatgattcagtctgcttctgatggacttaaaagtgggaattctccggtcaggtcaagcgaaggtacgggaggagcttatttcatgcagggtccatctggcaacaaatttgtgggtgtgtttaagccaatagatgaggaaccaatggctgagaacaatcctcagggtttaccactttcgccaaacggtgaaggtttgaagaaaggaacaaaggttggagaaggtgcattaagggaagtcgctgcatacattttggatcatcccaaaagtggaaacaaatctatgtttggtgaagagataggttttgctggtgtacctcccacagctatgattgaatgtttgcatccagggtttaaccatcccaaaggaatcaaaaccaagattggatcacttcagatgtttactgagaacgatggcagctgtgaagatatgggtccactttcatttccagtagaagaagttcataagatttctgtgttggatattagactggccaacgcagacagacatggtgggaacattttgatgaccaaggacgaaagcgggaagctcgttttggttcctatagaccatggatactgcttgcctgaaagctttgaagattgcacgtttgagtggctatattggccacaagcccggaaaccgtactctgcagagacccaagagtacataagatcactggacgcagaggaagatattgatctactaaagtttcatggatggaaaatgccggcagagacggctcaaacgctcagaatctcaacgatgctactgaagaaaggagtggaaagaggactaacagcatttgagattggaaccataatgtgcagagaaacacttagcaagaagtctctggtggaggaaatggtagaggaagctcaagaagctgtgcttccagggacgagcgaagctgcattcctcgaagccctatccgatgtgatggattaccatctcgatcactctcaggaacactaaaaatggttcttgtttaattcaaaactctggtatatactctttggtttgctttttataaacctgttggcttttgtattttttaaactttttcatttctgtcattctttggacatgttcaaggtgttttgttaacttcactcagacatatttcatggtaatgacaatttaagtgttt

SEQ ID NO: 44429 - protein, 566 aa, Arabidopsis thaliana
  peptide (1)..(566): Ceres Seq. ID no. 13509503
  misc_feature (264)..(520): Pfam Name: Phosphatidylinositol 3- and 4-kinase Pfam Description: Phosphatidylinositol 3- and 4-kinase
  misc_feature (1)..(280): Homolog of NCBI NO: 6633833 NR Description: F1N19.4 [Arabidopsis thaliana]
  misc_feature (236)..(545): Homolog of NCBI NO: 15228965 NR Description: phosphatidylinositol 3- and 4-kinase family
  misc_feature (241)..(561): Homolog of NCBI NO: 18395825 NR Description: phosphatidylinositol 3- and 4-kinase family
  misc_feature (240)..(520): Homolog of NCBI NO: 25363315 NR Description: hypothetical protein At2g03890 [imported] -
  misc_feature (240)..(520): Homolog of NCBI NO: 18395629 NR Description: phosphatidylinositol 3- and 4-kinase family
  misc_feature (271)..(561): Homolog of NCBI NO: 15217655 NR Description: phosphatidylinositol 3- and 4-kinase family
  misc_feature (253)..(561): Homolog of NCBI NO: 6633833 NR Description: F1N19.4 [Arabidopsis thaliana]
  misc_feature (1)..(561): Homolog of NCBI NO: 34904388 NR Description: unnamed protein product [Oryza sativa (japonica
  misc_feature (1)..(561): Homolog of NCBI NO: 15237921 NR Description: ubiquitin family [Arabidopsis thaliana]
  misc_feature (1)..(566): Homolog of NCBI NO: 18407090 NR Description: ubiquitin family [Arabidopsis thaliana]
MSSAGVALSPVRSEPLIMPLVRANSCLDSYPDDTIMIYLTLPGSVIPMRVLESDSIESVKLRIQSYRGFVVRNQKLVFGGRELARSNSNMRDYGVSEGNILHLVLKLSDLQVLDVKTTCGKHCRFHVERGRNIGYVKKQISKKRGDFVDPDEQEILYEGEKLEDQSLINDICRNDDSVLHLLVRRSAKVRVKPVEKNFELSIVAPQAKDKKGREAKSIVPPKKLSLEPVVVNSKAKVPLVVKDMIQSASDGLKSGNSPVRSSEGTGGAYFMQGPSGNKFVGVFKPIDEEPMAENNPQGLPLSPNGEGLKKGTKVGEGALREVAAYILDHPKSGNKSMFGEEIGFAGVPPTAMIECLHPGFNHPKGIKTKIGSLQMFTENDGSCEDMGPLSFPVEEVHKISVLDIRLANADRHGGNILMTKDESGKLVLVPIDHGYCLPESFEDCTFEWLYWPQARKPYSAETQEYIRSLDAEEDIDLLKFHGWKMPAETAQTLRISTMLLKKGVERGLTAFEIGTIMCRETLSKKSLVEEMVEEAQEAVLPGTSEAAFLEALSDVMDYHLDHSQEH

SEQ ID NO: 44430 - protein, 549 aa, Arabidopsis thaliana
  peptide (1)..(549): Ceres Seq. ID no. 13509504
  misc_feature (247)..(503): Pfam Name: Phosphatidylinositol 3- and 4-kinase Pfam Description: Phosphatidylinositol 3- and 4-kinase
  misc_feature (1)..(263): Homolog of NCBI NO: 6633833 NR Description: F1N19.4 [Arabidopsis thaliana]
  misc_feature (219)..(528): Homolog of NCBI NO: 15228965 NR Description: phosphatidylinositol 3- and 4-kinase family
  misc_feature (224)..(544): Homolog of NCBI NO: 18395825 NR Description: phosphatidylinositol 3- and 4-kinase family
  misc_feature (223)..(503): Homolog of NCBI NO: 25363315 NR Description: hypothetical protein At2g03890 [imported] -
  misc_feature (223)..(503): Homolog of NCBI NO: 18395629 NR Description: phosphatidylinositol 3- and 4-kinase family
  misc_feature (254)..(544): Homolog of NCBI NO: 15217655 NR Description: phosphatidylinositol 3- and 4-kinase family
  misc_feature (236)..(544): Homolog of NCBI NO: 6633833 NR Description: F1N19.4 [Arabidopsis thaliana]
  misc_feature (1)..(544): Homolog of NCBI NO: 34904388 NR Description: unnamed protein product [Oryza sativa (japonica
  misc_feature (1)..(544): Homolog of NCBI NO: 15237921 NR Description: ubiquitin family [Arabidopsis thaliana]
  misc_feature (1)..(549): Homolog of NCBI NO: 18407090 NR Description: ubiquitin family [Arabidopsis thaliana]
MPLVRANSCLDSYPDDTIMIYLTLPGSVIPMRVLESDSIESVKLRIQSYRGFVVRNQKLVFGGRELARSNSNMRDYGVSEGNILHLVLKLSDLQVLDVKTTCGKHCRFHVERGRNIGYVKKQISKKRGDFVDPDEQEILYEGEKLEDQSLINDICRNDDSVLHLLVRRSAKVRVKPVEKNFELSIVAPQAKDKKGREAKSIVPPKKLSLEPVVVNSKAKVPLVVKDMIQSASDGLKSGNSPVRSSEGTGGAYFMQGPSGNKFVGVFKPIDEEPMAENNPQGLPLSPNGEGLKKGTKVGEGALREVAAYILDHPKSGNKSMFGEEIGFAGVPPTAMIECLHPGFNHPKGIKTKIGSLQMFTENDGSCEDMGPLSFPVEEVHKISVLDIRLANADRHGGNILMTKDESGKLVLVPIDHGYCLPESFEDCTFEWLYWPQARKPYSAETQEYIRSLDAEEDIDLLKFHGWKMPAETAQTLRISTMLLKKGVERGLTAFEIGTIMCRETLSKKSLVEEMVEEAQEAVLPGTSEAAFLEALSDVMDYHLDHSQEH

SEQ ID NO: 44431 - protein, 531 aa, Arabidopsis thaliana
  peptide (1)..(531): Ceres Seq. ID no. 13509505
  misc_feature (229)..(485): Pfam Name: Phosphatidylinositol 3- and 4-kinase Pfam Description: Phosphatidylinositol 3- and 4-kinase
  misc_feature (1)..(245): Homolog of NCBI NO: 6633833 NR Description: F1N19.4 [Arabidopsis thaliana]
  misc_feature (201)..(510): Homolog of NCBI NO: 15228965 NR Description: phosphatidylinositol 3- and 4-kinase family
  misc_feature (206)..(526): Homolog of NCBI NO: 18395825 NR Description: phosphatidylinositol 3- and 4-kinase family
  misc_feature (205)..(485): Homolog of NCBI NO: 25363315 NR Description: hypothetical protein At2g03890 [imported] -
  misc_feature (205)..(485): Homolog of NCBI NO: 18395629 NR Description: phosphatidylinositol 3- and 4-kinase family
  misc_feature (236)..(526): Homolog of NCBI NO: 15217655 NR Description: phosphatidylinositol 3- and 4-kinase family
  misc_feature (218)..(526): Homolog of NCBI NO: 6633833 NR Description: F1N19.4 [Arabidopsis thaliana]
  misc_feature (1)..(526): Homolog of NCBI NO: 34904388 NR Description: unnamed protein product [Oryza sativa (japonica
  misc_feature (1)..(526): Homolog of NCBI NO: 15237921 NR Description: ubiquitin family [Arabidopsis thaliana]
  misc_feature (1)..(531): Homolog of NCBI NO: 18407090 NR Description: ubiquitin family [Arabidopsis thaliana]
MIYLTLPGSVIPMRVLESDSIESVKLRIQSYRGFVVRNQKLVFGGRELARSNSNMRDYGVSEGNILHLVLKLSDLQVLDVKTTCGKHCRFHVERGRNIGYVKKQISKKRGDFVDPDEQEILYEGEKLEDQSLINDICRNDDSVLHLLVRRSAKVRVKPVEKNFELSIVAPQAKDKKGREAKSIVPPKKLSLEPVVVNSKAKVPLVVKDMIQSASDGLKSGNSPVRSSEGTGGAYFMQGPSGNKFVGVFKPIDEEPMAENNPQGLPLSPNGEGLKKGTKVGEGALREVAAYILDHPKSGNKSMFGEEIGFAGVPPTAMIECLHPGFNHPKGIKTKIGSLQMFTENDGSCEDMGPLSFPVEEVHKISVLDIRLANADRHGGNILMTKDESGKLVLVPIDHGYCLPESFEDCTFEWLYWPQARKPYSAETQEYIRSLDAEEDIDLLKFHGWKMPAETAQTLRISTMLLKKGVERGLTAFEIGTIMCRETLSKKSLVEEMVEEAQEAVLPGTSEAAFLEALSDVMDYHLDHSQEH

SEQ ID NO: 44432 - DNA, 1114 bp, Arabidopsis thaliana
  misc_feature (1)..(1114): Ceres Seq. ID no. 13503792
  misc_feature: MA Experiment ID: 20000166 Result: Up-regulated in Transcription
  misc_feature: MA Experiment 20000166 PARAMETER Experiment Name: At_100uM_ABA_P Parameter: Age (day) Value: 14
  misc_feature: MA Experiment 20000166 PARAMETER Experiment Name: At_100uM_ABA_P Parameter: Organism Value: A. thaliana
  misc_feature: MA Experiment 20000166 PARAMETER Experiment Name: At_100uM_ABA_P Parameter: Plant Line Value: WS
  misc_feature: MA Experiment 20000166 PARAMETER Experiment Name: At_100uM_ABA_P Parameter: Timepoint (hr) Value: 1
  misc_feature: MA Experiment 20000166 PARAMETER Experiment Name: At_100uM_ABA_P Parameter: Tissue Value: Aerial
  misc_feature: MA Experiment 20000166 PARAMETER Experiment Name: At_100uM_ABA_P Parameter: Treatment Value: 100uM ABA vs. No Treatment
  misc_feature: MA Experiment ID: 20000179 Result: Up-regulated in Transcription
  misc_feature: MA Experiment 20000179 PARAMETER Experiment Name: At_Germinating_Seeds_P Parameter: Age (hr) Value: 6 vs. 0
  misc_feature: MA Experiment 20000179 PARAMETER Experiment Name: At_Germinating_Seeds_P Parameter: Tissue Value: Germinating Seeds
  misc_feature: MA Experiment ID: 20000182 Result: Up-regulated in Transcription
  misc_feature: MA Experiment 20000182 PARAMETER Experiment Name: At_2mM_SA_P Parameter: Age (day) Value: 14
  misc_feature: MA Experiment 20000182 PARAMETER Experiment Name: At_2mM_SA_P Parameter: Organism Value: A. thaliana
  misc_feature: MA Experiment 20000182 PARAMETER Experiment Name: At_2mM_SA_P Parameter: Plant Line Value: WS
  misc_feature: MA Experiment 20000182 PARAMETER Experiment Name: At_2mM_SA_P Parameter: Timepoint (hr) Value: 6
  misc_feature: MA Experiment 20000182 PARAMETER Experiment Name: At_2mM_SA_P Parameter: Tissue Value: Aerial
  misc_feature: MA Experiment 20000182 PARAMETER Experiment Name: At_2mM_SA_P Parameter: Treatment Value: 2mM SA vs. No Treatment
  misc_feature: MA Experiment ID: 20000185 Result: Up-regulated in Transcription
  misc_feature: MA Experiment 20000185 PARAMETER Experiment Name: At_Roots__P Parameter: Age (day) Value: 7 vs. 21
  misc_feature: MA Experiment 20000185 PARAMETER Experiment Name: At_Roots__P Parameter: Organism Value: A. thaliana
  misc_feature: MA Experiment 20000185 PARAMETER Experiment Name: At_Roots__P Parameter: Tissue Value: Roots vs. Whole Plant
  misc_feature: MA Experiment ID: 20000227 Result: Down-regulated in Transcription
  misc_feature: MA Experiment 20000227 PARAMETER Experiment Name: At_Root-Tips-vs-Tops_P Parameter: Tissue Value: Root Tips vs. Root Tops
  misc_feature: MA Experiment ID: 20000264 Result: Up-regulated in Transcription
  misc_feature: MA Experiment 20000264 PARAMETER Experiment Name: At_Open_Flower_P Parameter: Age (day) Value: 21
  misc_feature: MA Experiment 20000264 PARAMETER Experiment Name: At_Open_Flower_P Parameter: Plant Line Value: WS
  misc_feature: MA Experiment 20000264 PARAMETER Experiment Name: At_Open_Flower_P Parameter: Tissue Value: Open Flower vs. Whole Plant
  misc_feature: MA Experiment ID: 20000268 Result: Up-regulated in Transcription
  misc_feature: MA Experiment 20000268 PARAMETER Experiment Name: At_100mM_NaCl__P Parameter: Age (day) Value: 14
  misc_feature: MA Experiment 20000268 PARAMETER Experiment Name: At_100mM_NaCl__P Parameter: Organism Value: A. thaliana
  misc_feature: MA Experiment 20000268 PARAMETER Experiment Name: At_100mM_NaCl__P Parameter: Plant Line Value: WS
  misc_feature: MA Experiment 20000268 PARAMETER Experiment Name: At_100mM_NaCl__P Parameter: Timepoint (hr) Value: 6
  misc_feature: MA Experiment 20000268 PARAMETER Experiment Name: At_100mM_NaCl__P Parameter: Tissue Value: Whole Plant
  misc_feature: MA Experiment 20000268 PARAMETER Experiment Name: At_100mM_NaCl__P Parameter: Treatment Value: 100mM NaCl vs. No Treatment
  misc_feature: MA Experiment ID: 20000286 Result: Up-regulated in Transcription
  misc_feature: MA Experiment 20000286 PARAMETER Experiment Name: At_Open_Flower_P Parameter: Age (day) Value: 21
  misc_feature: MA Experiment 20000286 PARAMETER Experiment Name: At_Open_Flower_P Parameter: Plant Line Value: WS
  misc_feature: MA Experiment 20000286 PARAMETER Experiment Name: At_Open_Flower_P Parameter: Tissue Value: Half Open vs. Whole Plant
  misc_feature: MA Experiment ID: 20000441 Result: Down-regulated in Transcription
  misc_feature: MA Experiment 20000441 PARAMETER Experiment Name: At_1uM_BR-BRZ__P Parameter: Tissue Value: Shoot Apices
  misc_feature: MA Experiment 20000441 PARAMETER Experiment Name: At_1uM_BR-BRZ__P Parameter: Treatment Value: 1uM BR vs. No Treatment
  misc_feature: MA Experiment ID: 20000443 Result: Down-regulated in Transcription
  misc_feature: MA Experiment 20000443 PARAMETER Experiment Name: At_1uM_BR-BRZ__P Parameter: Tissue Value: Shoot Apices
  misc_feature: MA Experiment 20000443 PARAMETER Experiment Name: At_1uM_BR-BRZ__P Parameter: Treatment Value: 1uM BRZ vs. No Treatment
  misc_feature: MA Experiment ID: 20000709 Result: Down-regulated in Transcription
  misc_feature: MA Experiment 20000709 PARAMETER Experiment Name: At_15mM_NH4NO3_L-to-H_P Parameter: Age (hr) Value: 14
  misc_feature: MA Experiment 20000709 PARAMETER Experiment Name: At_15mM_NH4NO3_L-to-H_P Parameter: Organism Value: A. thaliana
  misc_feature: MA Experiment 20000709 PARAMETER Experiment Name: At_15mM_NH4NO3_L-to-H_P Parameter: Plant Line Value: WS
  misc_feature: MA Experiment 20000709 PARAMETER Experiment Name: At_15mM_NH4NO3_L-to-H_P Parameter: Timepoint (hr) Value: 4
  misc_feature: MA Experiment 20000709 PARAMETER Experiment Name: At_15mM_NH4NO3_L-to-H_P Parameter: Tissue Value: Aerial
  misc_feature: MA Experiment 20000709 PARAMETER Experiment Name: At_15mM_NH4NO3_L-to-H_P Parameter: Treatment Value: 15mM NH4NO3 vs. 30mM Mannitol
  misc_feature: MA Experiment ID: 20001247 Result: Down-regulated in Transcription
  misc_feature: MA Experiment 20001247 PARAMETER Experiment Name: At_Far-red-induction_P Parameter: Age (day) Value: 7
  misc_feature: MA Experiment 20001247 PARAMETER Experiment Name: At_Far-red-induction_P Parameter: Light Value: Far-red vs. White
  misc_feature: MA Experiment 20001247 PARAMETER Experiment Name: At_Far-red-induction_P Parameter: Organism Value: A. thaliana
  misc_feature: MA Experiment 20001247 PARAMETER Experiment Name: At_Far-red-induction_P Parameter: Plant Line Value: Columbia
  misc_feature: MA Experiment 20001247 PARAMETER Experiment Name: At_Far-red-induction_P Parameter: Timepoint (hr) Value: 1
  misc_feature: MA Experiment 20001247 PARAMETER Experiment Name: At_Far-red-induction_P Parameter: Tissue Value: Whole Plant
  misc_feature: MA Experiment ID: 20001248 Result: Down-regulated in Transcription
  misc_feature: MA Experiment 20001248 PARAMETER Experiment Name: At_Far-red-induction_P Parameter: Age (day) Value: 7
  misc_feature: MA Experiment 20001248 PARAMETER Experiment Name: At_Far-red-induction_P Parameter: Light Value: Far-red vs. White
  misc_feature: MA Experiment 20001248 PARAMETER Experiment Name: At_Far-red-induction_P Parameter: Organism Value: A. thaliana
  misc_feature: MA Experiment 20001248 PARAMETER Experiment Name: At_Far-red-induction_P Parameter: Plant Line Value: Columbia
  misc_feature: MA Experiment 20001248 PARAMETER Experiment Name: At_Far-red-induction_P Parameter: Timepoint (hr) Value: 4
  misc_feature: MA Experiment 20001248 PARAMETER Experiment Name: At_Far-red-induction_P Parameter: Tissue Value: Whole Plant
  misc_feature: MA Experiment ID: 20001450 Result: Down-regulated in Transcription
  misc_feature: MA Experiment 20001450 PARAMETER Experiment Name: At_Far-red-induction_P Parameter: Age (day) Value: 7
  misc_feature: MA Experiment 20001450 PARAMETER Experiment Name: At_Far-red-induction_P Parameter: Light Value: Far-red vs. White
  misc_feature: MA Experiment 20001450 PARAMETER Experiment Name: At_Far-red-induction_P Parameter: Organism Value: A. thaliana
  misc_feature: MA Experiment 20001450 PARAMETER Experiment Name: At_Far-red-induction_P Parameter: Plant Line Value: Columbia
  misc_feature: MA Experiment 20001450 PARAMETER Experiment Name: At_Far-red-induction_P Parameter: Timepoint (hr) Value: 8
  misc_feature: MA Experiment 20001450 PARAMETER Experiment Name: At_Far-red-induction_P Parameter: Tissue Value: Whole Plant
  misc_feature: MA Experiment ID: 20001451 Result: Down-regulated in Transcription
  misc_feature: MA Experiment 20001451 PARAMETER Experiment Name: At_Far-red-induction_P Parameter: Age (day) Value: 7
  misc_feature: MA Experiment 20001451 PARAMETER Experiment Name: At_Far-red-induction_P Parameter: Light Value: Far-red vs. White
  misc_feature: MA Experiment 20001451 PARAMETER Experiment Name: At_Far-red-induction_P Parameter: Organism Value: A. thaliana
  misc_feature: MA Experiment 20001451 PARAMETER Experiment Name: At_Far-red-induction_P Parameter: Plant Line Value: Columbia
  misc_feature: MA Experiment 20001451 PARAMETER Experiment Name: At_Far-red-induction_P Parameter: Timepoint (hr) Value: 24
  misc_feature: MA Experiment 20001451 PARAMETER Experiment Name: At_Far-red-induction_P Parameter: Tissue Value: Whole Plant
  misc_feature: MA Experiment ID: 20001457 Result: Down-regulated in Transcription
  misc_feature: MA Experiment 20001457 PARAMETER Experiment Name: At_50mM_NH4NO3_L-to-H_P Parameter: Age (day) Value: Undefined
  misc_feature: MA Experiment 20001457 PARAMETER Experiment Name: At_50mM_NH4NO3_L-to-H_P Parameter: Organism Value: Undefined
  misc_feature: MA Experiment 20001457 PARAMETER Experiment Name: At_50mM_NH4NO3_L-to-H_P Parameter: Plant Line Value: Undefined
  misc_feature: MA Experiment 20001457 PARAMETER Experiment Name: At_50mM_NH4NO3_L-to-H_P Parameter: Timepoint (hr) Value: 0.5
  misc_feature: MA Experiment 20001457 PARAMETER Experiment Name: At_50mM_NH4NO3_L-to-H_P Parameter: Tissue Value: Siliques
  misc_feature: MA Experiment 20001457 PARAMETER Experiment Name: At_50mM_NH4NO3_L-to-H_P Parameter: Treatment Value: 50mM NH4NO3 vs. 100mM Manitol
  misc_feature: MA Experiment ID: 20001555 Result: Down-regulated in Transcription
  misc_feature: MA Experiment 20001555 PARAMETER Experiment Name: At_Drought_Soil_Dry_P Parameter: Age (day) Value: 24
  misc_feature: MA Experiment 20001555 PARAMETER Experiment Name: At_Drought_Soil_Dry_P Parameter: Organism Value: A. thaliana
  misc_feature: MA Experiment 20001555 PARAMETER Experiment Name: At_Drought_Soil_Dry_P Parameter: Plant Line Value: WS
  misc_feature: MA Experiment 20001555 PARAMETER Experiment Name: At_Drought_Soil_Dry_P Parameter: Post Timepoint (hr) Value: None
  misc_feature: MA Experiment 20001555 PARAMETER Experiment Name: At_Drought_Soil_Dry_P Parameter: Post-Treatment Value: None
  misc_feature: MA Experiment 20001555 PARAMETER Experiment Name: At_Drought_Soil_Dry_P Parameter: Timepoint (day) Value: 10
  misc_feature: MA Experiment 20001555 PARAMETER Experiment Name: At_Drought_Soil_Dry_P Parameter: Treatment Value: Drought vs. No Drought
  misc_feature: MA Experiment ID: 20001556 Result: Down-regulated in Transcription
  misc_feature: MA Experiment 20001556 PARAMETER Experiment Name: At_Drought_Soil_Dry_P Parameter: Age (day) Value: 26
  misc_feature: MA Experiment 20001556 PARAMETER Experiment Name: At_Drought_Soil_Dry_P Parameter: Organism Value: A. thaliana
  misc_feature: MA Experiment 20001556 PARAMETER Experiment Name: At_Drought_Soil_Dry_P Parameter: Plant Line Value: WS
  misc_feature: MA Experiment 20001556 PARAMETER Experiment Name: At_Drought_Soil_Dry_P Parameter: Post Timepoint (hr) Value: None
  misc_feature: MA Experiment 20001556 PARAMETER Experiment Name: At_Drought_Soil_Dry_P Parameter: Post-Treatment Value: None
  misc_feature: MA Experiment 20001556 PARAMETER Experiment Name: At_Drought_Soil_Dry_P Parameter: Timepoint (day) Value: 12
  misc_feature: MA Experiment 20001556 PARAMETER Experiment Name: At_Drought_Soil_Dry_P Parameter: Treatment Value: Drought vs. No Drought
  misc_feature: MA Experiment ID: 20001557 Result: Down-regulated in Transcription
  misc_feature: MA Experiment 20001557 PARAMETER Experiment Name: At_Drought_Soil_Dry_P Parameter: Age (day) Value: 27
  misc_feature: MA Experiment 20001557 PARAMETER Experiment Name: At_Drought_Soil_Dry_P Parameter: Organism Value: A. thaliana
  misc_feature: MA Experiment 20001557 PARAMETER Experiment Name: At_Drought_Soil_Dry_P Parameter: Plant Line Value: WS
  misc_feature: MA Experiment 20001557 PARAMETER Experiment Name: At_Drought_Soil_Dry_P Parameter: Post Timepoint (hr) Value: 3
  misc_feature: MA Experiment 20001557 PARAMETER Experiment Name: At_Drought_Soil_Dry_P Parameter: Post-Treatment Value: Re-Water vs. No Drought
  misc_feature: MA Experiment 20001557 PARAMETER Experiment Name: At_Drought_Soil_Dry_P Parameter: Timepoint (day) Value: 13
  misc_feature: MA Experiment 20001557 PARAMETER Experiment Name: At_Drought_Soil_Dry_P Parameter: Treatment Value: Drought vs. No Drought
  misc_feature: MA Experiment ID: 20001558 Result: Down-regulated in Transcription
  misc_feature: MA Experiment 20001558 PARAMETER Experiment Name: At_Drought_Soil_Dry_P Parameter: Age (day) Value: 27
  misc_feature: MA Experiment 20001558 PARAMETER Experiment Name: At_Drought_Soil_Dry_P Parameter: Organism Value: A. thaliana
  misc_feature: MA Experiment 20001558 PARAMETER Experiment Name: At_Drought_Soil_Dry_P Parameter: Plant Line Value: WS
  misc_feature: MA Experiment 20001558 PARAMETER Experiment Name: At_Drought_Soil_Dry_P Parameter: Post Timepoint (hr) Value: 6
  misc_feature: MA Experiment 20001558 PARAMETER Experiment Name: At_Drought_Soil_Dry_P Parameter: Post-Treatment Value: Re-Water vs. No Drought
  misc_feature: MA Experiment 20001558 PARAMETER Experiment Name: At_Drought_Soil_Dry_P Parameter: Timepoint (day) Value: 13
  misc_feature: MA Experiment 20001558 PARAMETER Experiment Name: At_Drought_Soil_Dry_P Parameter: Treatment Value: Drought vs. No Drought
  misc_feature: MA Experiment ID: 20001559 Result: Down-regulated in Transcription
  misc_feature: MA Experiment 20001559 PARAMETER Experiment Name: At_Drought_Soil_Dry_P Parameter: Age (day) Value: 28
  misc_feature: MA Experiment 20001559 PARAMETER Experiment Name: At_Drought_Soil_Dry_P Parameter: Organism Value: A. thaliana
  misc_feature: MA Experiment 20001559 PARAMETER Experiment Name: At_Drought_Soil_Dry_P Parameter: Plant Line Value: WS
  misc_feature: MA Experiment 20001559 PARAMETER Experiment Name: At_Drought_Soil_Dry_P Parameter: Post Timepoint (hr) Value: 29
  misc_feature: MA Experiment 20001559 PARAMETER Experiment Name: At_Drought_Soil_Dry_P Parameter: Post-Treatment Value: Re-Water vs. No Drought
  misc_feature: MA Experiment 20001559 PARAMETER Experiment Name: At_Drought_Soil_Dry_P Parameter: Timepoint (day) Value: 14
  misc_feature: MA Experiment 20001559 PARAMETER Experiment Name: At_Drought_Soil_Dry_P Parameter: Treatment Value: Drought vs. No Drought
  misc_feature: MA Experiment ID: 20001560 Result: Down-regulated in Transcription
  misc_feature: MA Experiment 20001560 PARAMETER Experiment Name: At_Drought_Soil_Dry_P Parameter: Age (day) Value: 28
  misc_feature: MA Experiment 20001560 PARAMETER Experiment Name: At_Drought_Soil_Dry_P Parameter: Organism Value: A. thaliana
  misc_feature: MA Experiment 20001560 PARAMETER Experiment Name: At_Drought_Soil_Dry_P Parameter: Plant Line Value: WS
  misc_feature: MA Experiment 20001560 PARAMETER Experiment Name: At_Drought_Soil_Dry_P Parameter: Post Timepoint (hr) Value: None
  misc_feature: MA Experiment 20001560 PARAMETER Experiment Name: At_Drought_Soil_Dry_P Parameter: Post-Treatment Value: None
  misc_feature: MA Experiment 20001560 PARAMETER Experiment Name: At_Drought_Soil_Dry_P Parameter: Timepoint (day) Value: 14
  misc_feature: MA Experiment 20001560 PARAMETER Experiment Name: At_Drought_Soil_Dry_P Parameter: Treatment Value: Drought vs. No Drought
aacatctgtcctctcgaggttagggttctttagaaagtttttattctatcaaaacgatcctttggatcttgttatgagagttaattaatttgaagattaatatgttttaaaaacttctaatttttatctttgtcataaaccttttaaattttattcaaacttatagggttttcgatcgtattatttgatagatcgtcgccactaaaacgtatataaacatctctgttttttccttgatttatccttccaaatcttatttaatcgtttttaaaaacctaaaatttccaaattataatcaatggaaacaatagcagttcaaaatgcaccgggtaaacaagtttcgggtttgagaccattcaagaaccctaaaagaaggagttctcgtggttctctttcaagatccggaggaagtttggctcttcctcttaatccaacgtcgtcttggggatcttctccggcatatccgccgccgcatagttactctcagcctcctcttctccctctaccacgtgtcaacagctcaactgttcctctgcaacgcgtcaacagctctcgaccacgtgtcaacaacaactcttctctcaatcgcgttgctcagacaaaagctatttctgaaacacacatgaagaaagcagagttcatcgaatctgcgagactgactcgaaccggttcagtgccgatccaggcgaaccagttgcgtgattttcctgaaggattcgatggctaccccggtccagcgatcatgttattatctccgccaccgagtagtttgcccatgcctaggttttcgatcaaaccgaagcttcgttgcaacgtagaagctgctgggaaaagtgacgtagctaccaataacatccggcgagttttacagctccggtgaaaggtggtgctacgttaacgtacgaataaaaagaagcttatgggctttttaatactttattgggctttgggtctgtcttgttttttaaattgatagaactcttctctactttgtgtgatttgctaagccataacttttcaaaaaggcttcctaggcacaaaatagcctggctgtaatagaatttcaattttatgttccttaataagaaaaaaagtttctaatgatagatcgaat

SEQ ID NO: 44433 - protein, 193 aa, Arabidopsis thaliana
  peptide (1)..(193): Ceres Seq. ID no. 13503793
  misc_feature (1)..(193): Homolog of NCBI NO: 15223762 NR Description: expressed protein [Arabidopsis thaliana]
METIAVQNAPGKQVSGLRPFKNPKRRSSRGSLSRSGGSLALPLNPTSSWGSSPAYPPPHSYSQPPLLPLPRVNSSTVPLQRVNSSRPRVNNNSSLNRVAQTKAISETHMKKAEFIESARLTRTGSVPIQANQLRDFPEGFDGYPGPAIMLLSPPPSSLPMPRFSIKPKLRCNVEAAGKSDVATNNIRRVLQLR

SEQ ID NO: 44434 - DNA, 661 bp, Arabidopsis thaliana
  misc_feature (1)..(661): Ceres Seq. ID no. 13509812
  misc_feature: MA Experiment ID: 20001911 Result: Down-regulated in Transcription
  misc_feature: MA Experiment 20001911 PARAMETER Experiment Name: At_Drought_Reproduction_P Parameter: Age (day) Value: 40
  misc_feature: MA Experiment 20001911 PARAMETER Experiment Name: At_Drought_Reproduction_P Parameter: Organism Value: A. thaliana
  misc_feature: MA Experiment 20001911 PARAMETER Experiment Name: At_Drought_Reproduction_P Parameter: Plant Line Value: WS
  misc_feature: MA Experiment 20001911 PARAMETER Experiment Name: At_Drought_Reproduction_P Parameter: Timepoint (day) Value: 10
  misc_feature: MA Experiment 20001911 PARAMETER Experiment Name: At_Drought_Reproduction_P Parameter: Tissue Value: Flowers
  misc_feature: MA Experiment 20001911 PARAMETER Experiment Name: At_Drought_Reproduction_P Parameter: Treatment Value: Drought vs. No Drought
attactcgttaagactttccactacccattctcattctctcttcaactaatattcttccccggccctcataaagaagcttctcctgttctttattcacattttccaaaattgtatcttcttaaagtatctccaacaaaactaaatcctactaagttaagagatttgaaaatgacaaagataggaggtattcttgtttgtctagtcattgtgggcttagatgtagctgctgcaatcctcggaatccaagctgaagtcgcccaaaatcaggtgaagcacatgaggctttggttatttgagtgcagagagccgagccaggacgcgttcaggctcggtctaggtgcagccgcgatattggtaatggctcatgtcctacttaacttggtcggaggctgtctttgtatttgctctcaagacgagtttcaaagatcttcttccactagacaaatctccatggcttgtcttgtcctcacttggatcgtattcgctgttggatttgggagtatagtgattgggacgatgtcgaacagtaagtcaagatcctcttgtggattcacacatcaccattttctctccattggagggattttgtgttttcttcatgccctcttctgtgttgcttattacgtttctgccactgcggccaaagatgaagctaagtga

SEQ ID NO: 44435 - protein, 219 aa, Arabidopsis thaliana
  peptide (1)..(219): Ceres Seq. ID no. 13509813
  misc_feature (63)..(215): Homolog of NCBI NO: 18418215 NR Description: expressed protein [Arabidopsis thaliana]
  misc_feature (81)..(158): Homolog of NCBI NO: 26452012 NR Description: unknown protein [Arabidopsis thaliana]
  misc_feature (63)..(215): Homolog of NCBI NO: 34897938 NR Description: ESTs AU082454(S3638),D41267(S3638) correspond to region of the predicted gene.~Similar to Arabidopsis thaliana DNA
  misc_feature (62)..(219): Homolog of NCBI NO: 15220395 NR Description: expressed protein [Arabidopsis thaliana]
  misc_feature (63)..(215): Homolog of NCBI NO: 25406837 NR Description: YUP8H12.9 [imported] - Arabidopsis thaliana
  misc_feature (57)..(217): Homolog of NCBI NO: 34393261 NR Description: unknown protein [Oryza sativa (japonica
  misc_feature (57)..(217): Homolog of NCBI NO: 15233592 NR Description: expressed protein [Arabidopsis thaliana]
  misc_feature (57)..(219): Homolog of NCBI NO: 15225221 NR Description: expressed protein [Arabidopsis thaliana]
LLVKTFHYPFSFSLQLIFFPGPHKEASPVLYSHFPKLYLLKVSPTKLNPTKLRDLKMTKIGGILVCLVIVGLDVAAAILGIQAEVAQNQVKHMRLWLFECREPSQDAFRLGLGAAAILVMAHVLLNLVGGCLCICSQDEFQRSSSTRQISMACLVLTWIVFAVGFGSIVIGTMSNSKSRSSCGFTHHHFLSIGGILCFLHALFCVAYYVSATAAKDEAK

SEQ ID NO: 44436 - protein, 163 aa, Arabidopsis thaliana
  peptide (1)..(163): Ceres Seq. ID no. 13509814
  misc_feature (7)..(159): Homolog of NCBI NO: 18418215 NR Description: expressed protein [Arabidopsis thaliana]
  misc_feature (25)..(102): Homolog of NCBI NO: 26452012 NR Description: unknown protein [Arabidopsis thaliana]
  misc_feature (7)..(159): Homolog of NCBI NO: 34897938 NR Description: ESTs AU082454(S3638),D41267(S3638) correspond to region of the predicted gene.~Similar to Arabidopsis thaliana DNA
  misc_feature (6)..(163): Homolog of NCBI NO: 15220395 NR Description: expressed protein [Arabidopsis thaliana]
  misc_feature (7)..(159): Homolog of NCBI NO: 25406837 NR Description: YUP8H12.9 [imported] - Arabidopsis thaliana
  misc_feature (1)..(161): Homolog of NCBI NO: 34393261 NR Description: unknown protein [Oryza sativa (japonica
  misc_feature (1)..(161): Homolog of NCBI NO: 15233592 NR Description: expressed protein [Arabidopsis thaliana]
  misc_feature (1)..(163): Homolog of NCBI NO: 15225221 NR Description: expressed protein [Arabidopsis thaliana]
MTKIGGILVCLVIVGLDVAAAILGIQAEVAQNQVKHMRLWLFECREPSQDAFRLGLGAAAILVMAHVLLNLVGGCLCICSQDEFQRSSSTRQISMACLVLTWIVFAVGFGSIVIGTMSNSKSRSSCGFTHHHFLSIGGILCFLHALFCVAYYVSATAAKDEAK

SEQ ID NO: 44437 - protein, 127 aa, Arabidopsis thaliana
  peptide (1)..(127): Ceres Seq. ID no. 13509815
  misc_feature (1)..(123): Homolog of NCBI NO: 18418215 NR Description: expressed protein [Arabidopsis thaliana]
  misc_feature (1)..(66): Homolog of NCBI NO: 26452012 NR Description: unknown protein [Arabidopsis thaliana]
  misc_feature (1)..(123): Homolog of NCBI NO: 34897938 NR Description: ESTs AU082454(S3638),D41267(S3638) correspond to region of the predicted gene.~Similar to Arabidopsis thaliana DNA
  misc_feature (1)..(127): Homolog of NCBI NO: 15220395 NR Description: expressed protein [Arabidopsis thaliana]
  misc_feature (1)..(123): Homolog of NCBI NO: 25406837 NR Description: YUP8H12.9 [imported] - Arabidopsis thaliana
  misc_feature (1)..(125): Homolog of NCBI NO: 34393261 NR Description: unknown protein [Oryza sativa (japonica
  misc_feature (1)..(125): Homolog of NCBI NO: 15233592 NR Description: expressed protein [Arabidopsis thaliana]
  misc_feature (1)..(127): Homolog of NCBI NO: 15225221 NR Description: expressed protein [Arabidopsis thaliana]
MRLWLFECREPSQDAFRLGLGAAAILVMAHVLLNLVGGCLCICSQDEFQRSSSTRQISMACLVLTWIVFAVGFGSIVIGTMSNSKSRSSCGFTHHHFLSIGGILCFLHALFCVAYYVSATAAKDEAK

SEQ ID NO: 44438 - DNA, 724 bp, Arabidopsis thaliana
  misc_feature (1)..(724): Ceres Seq. ID no. 13646217
  misc_feature: MA Experiment ID: 20000213 Result: Up-regulated in Transcription
  misc_feature: MA Experiment 20000213 PARAMETER Experiment Name: At_4deg_Cold_P Parameter: Timepoint (hr) Value: 2
  misc_feature: MA Experiment ID: 20000437 Result: Up-regulated in Transcription
  misc_feature: MA Experiment 20000437 PARAMETER Experiment Name: At_Drought_P Parameter: Age (day) Value: 8
  misc_feature: MA Experiment 20000437 PARAMETER Experiment Name: At_Drought_P Parameter: Organism Value: A. thaliana
  misc_feature: MA Experiment 20000437 PARAMETER Experiment Name: At_Drought_P Parameter: Plant Line Value: WS
  misc_feature: MA Experiment 20000437 PARAMETER Experiment Name: At_Drought_P Parameter: Timepoint (hr) Value: 24
  misc_feature: MA Experiment 20000437 PARAMETER Experiment Name: At_Drought_P Parameter: Tissue Value: Whole Plant
  misc_feature: MA Experiment 20000437 PARAMETER Experiment Name: At_Drought_P Parameter: Treatment Value: Drought vs. No Drought
  misc_feature: MA Experiment ID: 20000438 Result: Down-regulated in Transcription
  misc_feature: MA Experiment 20000438 PARAMETER Experiment Name: At_Shoots__P Parameter: Age (day) Value: 14
  misc_feature: MA Experiment 20000438 PARAMETER Experiment Name: At_Shoots__P Parameter: Tissue Value: Shoots vs. Whole Plant
  misc_feature: MA Experiment ID: 20001451 Result: Up-regulated in Transcription
  misc_feature: MA Experiment 20001451 PARAMETER Experiment Name: At_Far-red-induction_P Parameter: Age (day) Value: 7
  misc_feature: MA Experiment 20001451 PARAMETER Experiment Name: At_Far-red-induction_P Parameter: Light Value: Far-red vs. White
  misc_feature: MA Experiment 20001451 PARAMETER Experiment Name: At_Far-red-induction_P Parameter: Organism Value: A. thaliana
  misc_feature: MA Experiment 20001451 PARAMETER Experiment Name: At_Far-red-induction_P Parameter: Plant Line Value: Columbia
  misc_feature: MA Experiment 20001451 PARAMETER Experiment Name: At_Far-red-induction_P Parameter: Timepoint (hr) Value: 24
  misc_feature: MA Experiment 20001451 PARAMETER Experiment Name: At_Far-red-induction_P Parameter: Tissue Value: Whole Plant
  misc_feature: MA Experiment ID: 20001557 Result: Up-regulated in Transcription
  misc_feature: MA Experiment 20001557 PARAMETER Experiment Name: At_Drought_Soil_Dry_P Parameter: Age (day) Value: 27
  misc_feature: MA Experiment 20001557 PARAMETER Experiment Name: At_Drought_Soil_Dry_P Parameter: Organism Value: A. thaliana
  misc_feature: MA Experiment 20001557 PARAMETER Experiment Name: At_Drought_Soil_Dry_P Parameter: Plant Line Value: WS
  misc_feature: MA Experiment 20001557 PARAMETER Experiment Name: At_Drought_Soil_Dry_P Parameter: Post Timepoint (hr) Value: 3
  misc_feature: MA Experiment 20001557 PARAMETER Experiment Name: At_Drought_Soil_Dry_P Parameter: Post-Treatment Value: Re-Water vs. No Drought
  misc_feature: MA Experiment 20001557 PARAMETER Experiment Name: At_Drought_Soil_Dry_P Parameter: Timepoint (day) Value: 13
  misc_feature: MA Experiment 20001557 PARAMETER Experiment Name: At_Drought_Soil_Dry_P Parameter: Treatment Value: Drought vs. No Drought
gaaaaacatctcactgctcactactctcactgtaatcccttagatcttcttttcaaatttcaatggcgtccggtgatgttgagtatcggtgcttcgttggaggtctagcatgggccactgatgacagagctcttgagactgccttcgctcaatacggcgacgttattgattccaagatcattaacgatcgtgagactggaagatcaaggggattcggattcgtcaccttcaaggatgagaaagccatgaaggatgcgattgagggaatgaacggacaagatctcgatggccgtagcatcactgttaacgaggctcagtcacgaggaagcggtggcggcggaggccaccgtggaggtggtggcggtggataccgcagcggcggtggtggaggttactccggtggaggtggtagctacggaggtggaagacgtgagggaggaggaggatacggtggtggtgaaggaggaggttacggaggaagcggtggtggaggatggtaattcctttaattaggtttgggattaccaatgaatgttctctctctcgcttgttatgcttctacttggttttgtgtgttctctattttgttctggttctgctttagatttgatgtaacagttcgtgattaggtattttggtatctggaaacgtaatgttaagtcacttgtcattctctaaataacaaatttcttcggagatattatctctgttgattgattctatc

SEQ ID NO: 44439 - protein, 145 aa, Arabidopsis thaliana
  peptide (1)..(145): Ceres Seq. ID no. 13646218
  misc_feature (10)..(81): Pfam Name: RNA recognition motif. (a.k.a. RRM, RBD, or RNP domain) Pfam Description: RNA recognition motif. (a.k.a. RRM, RBD, or RNP
  misc_feature (1)..(145): Homolog of NCBI NO: 34851124 NR Description: putative glycine-rich RNA-binding protein [Prunus
  misc_feature (5)..(145): Homolog of NCBI NO: 2119044 NR Description: glycine-rich RNA-binding protein RGP-1b - wood
  misc_feature (5)..(144): Homolog of NCBI NO: 544426 NR Description: Glycine-rich RNA-binding protein
  misc_feature (5)..(145): Homolog of NCBI NO: 2226370 NR Description: RNA-binding protein [Nicotiana glutinosa]
  misc_feature (1)..(139): Homolog of NCBI NO: 2267567 NR Description: glycine-rich RNA binding protein 1 [Pelargonium x
  misc_feature (1)..(145): Homolog of NCBI NO: 1346181 NR Description: Glycine-rich RNA-binding protein GRP2A
  misc_feature (1)..(145): Homolog of NCBI NO: 1346180 NR Description: Glycine-rich RNA-binding protein GRP1A
  misc_feature (1)..(144): Homolog of NCBI NO: 21553354 NR Description: glycine-rich RNA binding protein 7 [Arabidopsis
  misc_feature (1)..(145): Homolog of NCBI NO: 30681492 NR Description: glycine-rich RNA-binding protein (AtGRP7)
  misc_feature (1)..(144): Homolog of NCBI NO: 15226605 NR Description: glycine-rich RNA-binding protein (AtGRP7)
MASGDVEYRCFVGGLAWATDDRALETAFAQYGDVIDSKIINDRETGRSRGFGFVTFKDEKAMKDAIEGMNGQDLDGRSITVNEAQSRGSGGGGGHRGGGGGGYRSGGGGGYSGGGGSYGGGRREGGGGYGGGEGGGYGGSGGGGW

SEQ ID NO: 44440 - protein, 84 aa, Arabidopsis thaliana
  peptide (1)..(84): Ceres Seq. ID no. 13646219
  misc_feature (15)..(83): Pfam Name: Herpesvirus large structural phosphoprotein UL32 Pfam Description: Herpesvirus large structural phosphoprotein UL32
  misc_feature (1)..(84): Homolog of NCBI NO: 34851124 NR Description: putative glycine-rich RNA-binding protein [Prunus
  misc_feature (1)..(84): Homolog of NCBI NO: 2119044 NR Description: glycine-rich RNA-binding protein RGP-1b - wood
  misc_feature (1)..(83): Homolog of NCBI NO: 544426 NR Description: Glycine-rich RNA-binding protein
  misc_feature (1)..(84): Homolog of NCBI NO: 2226370 NR Description: RNA-binding protein [Nicotiana glutinosa]
  misc_feature (1)..(78): Homolog of NCBI NO: 2267567 NR Description: glycine-rich RNA binding protein 1 [Pelargonium x
  misc_feature (1)..(84): Homolog of NCBI NO: 1346181 NR Description: Glycine-rich RNA-binding protein GRP2A
  misc_feature (1)..(84): Homolog of NCBI NO: 1346180 NR Description: Glycine-rich RNA-binding protein GRP1A
  misc_feature (1)..(83): Homolog of NCBI NO: 21553354 NR Description: glycine-rich RNA binding protein 7 [Arabidopsis
  misc_feature (1)..(84): Homolog of NCBI NO: 30681492 NR Description: glycine-rich RNA-binding protein (AtGRP7)
  misc_feature (1)..(83): Homolog of NCBI NO: 15226605 NR Description: glycine-rich RNA-binding protein (AtGRP7)
MKDAIEGMNGQDLDGRSITVNEAQSRGSGGGGGHRGGGGGGYRSGGGGGYSGGGGSYGGGRREGGGGYGGGEGGGYGGSGGGGW

SEQ ID NO: 44441 - protein, 77 aa, Arabidopsis thaliana
  peptide (1)..(77): Ceres Seq. ID no. 13646220
  misc_feature (8)..(76): Pfam Name: Herpesvirus large structural phosphoprotein UL32 Pfam Description: Herpesvirus large structural phosphoprotein UL32
  misc_feature (1)..(77): Homolog of NCBI NO: 34851124 NR Description: putative glycine-rich RNA-binding protein [Prunus
  misc_feature (1)..(77): Homolog of NCBI NO: 2119044 NR Description: glycine-rich RNA-binding protein RGP-1b - wood
  misc_feature (1)..(76): Homolog of NCBI NO: 544426 NR Description: Glycine-rich RNA-binding protein
  misc_feature (1)..(77): Homolog of NCBI NO: 2226370 NR Description: RNA-binding protein [Nicotiana glutinosa]
  misc_feature (1)..(71): Homolog of NCBI NO: 2267567 NR Description: glycine-rich RNA binding protein 1 [Pelargonium x
  misc_feature (1)..(77): Homolog of NCBI NO: 1346181 NR Description: Glycine-rich RNA-binding protein GRP2A
  misc_feature (1)..(77): Homolog of NCBI NO: 1346180 NR Description: Glycine-rich RNA-binding protein GRP1A
  misc_feature (1)..(76): Homolog of NCBI NO: 21553354 NR Description: glycine-rich RNA binding protein 7 [Arabidopsis
  misc_feature (1)..(77): Homolog of NCBI NO: 30681492 NR Description: glycine-rich RNA-binding protein (AtGRP7)
  misc_feature (1)..(76): Homolog of NCBI NO: 15226605 NR Description: glycine-rich RNA-binding protein (AtGRP7)
MNGQDLDGRSITVNEAQSRGSGGGGGHRGGGGGGYRSGGGGGYSGGGGSYGGGRREGGGGYGGGEGGGYGGSGGGGW

SEQ ID NO: 44442 - DNA, 1730 bp, Arabidopsis thaliana
  misc_feature (1)..(1730): Ceres Seq. ID no. 12603677
  misc_feature: MA Experiment ID: 20000171 Result: Up-regulated in Transcription
  misc_feature: MA Experiment 20000171 PARAMETER Experiment Name: At_42deg_Heat_P Parameter: Age (day) Value: 14
  misc_feature: MA Experiment 20000171 PARAMETER Experiment Name: At_42deg_Heat_P Parameter: Organism Value: A. thaliana
  misc_feature: MA Experiment 20000171 PARAMETER Experiment Name: At_42deg_Heat_P Parameter: Plant Line Value: WS
  misc_feature: MA Experiment 20000171 PARAMETER Experiment Name: At_42deg_Heat_P Parameter: Temperature (deg C) Value: 42 vs. 22
  misc_feature: MA Experiment 20000171 PARAMETER Experiment Name: At_42deg_Heat_P Parameter: Timepoint (hr) Value: 1
  misc_feature: MA Experiment 20000171 PARAMETER Experiment Name: At_42deg_Heat_P Parameter: Tissue Value: Aerial
  misc_feature: MA Experiment ID: 20000173 Result: Up-regulated in Transcription
  misc_feature: MA Experiment 20000173 PARAMETER Experiment Name: At_42deg_Heat_P Parameter: Age (day) Value: 14
  misc_feature: MA Experiment 20000173 PARAMETER Experiment Name: At_42deg_Heat_P Parameter: Organism Value: A. thaliana
  misc_feature: MA Experiment 20000173 PARAMETER Experiment Name: At_42deg_Heat_P Parameter: Plant Line Value: WS
  misc_feature: MA Experiment 20000173 PARAMETER Experiment Name: At_42deg_Heat_P Parameter: Temperature (deg C) Value: 42 vs. 22
  misc_feature: MA Experiment 20000173 PARAMETER Experiment Name: At_42deg_Heat_P Parameter: Timepoint (hr) Value: 6
  misc_feature: MA Experiment 20000173 PARAMETER Experiment Name: At_42deg_Heat_P Parameter: Tissue Value: Aerial
  misc_feature: MA Experiment ID: 20001910 Result: Down-regulated in Transcription
  misc_feature: MA Experiment 20001910 PARAMETER Experiment Name: At_Drought_Reproduction_P Parameter: Age (day) Value: 37
  misc_feature: MA Experiment 20001910 PARAMETER Experiment Name: At_Drought_Reproduction_P Parameter: Organism Value: A. thaliana
  misc_feature: MA Experiment 20001910 PARAMETER Experiment Name: At_Drought_Reproduction_P Parameter: Plant Line Value: WS
  misc_feature: MA Experiment 20001910 PARAMETER Experiment Name: At_Drought_Reproduction_P Parameter: Timepoint (day) Value: 7
  misc_feature: MA Experiment 20001910 PARAMETER Experiment Name: At_Drought_Reproduction_P Parameter: Tissue Value: Flowers
  misc_feature: MA Experiment 20001910 PARAMETER Experiment Name: At_Drought_Reproduction_P Parameter: Treatment Value: Drought vs. No Drought
actcttcaacaagaaaatagataaaccaacctctaacttaaaattcaccatcaaaccaagaacaaaggaagaaaccaccaaccactatgatcaactccaaaaatacattcatcgtcgctacaaccatcttatgcctctccatggccatattatccgaaggtcaagctaacccttttctattgcaactcgatcggtgggaaatgttgctaccgagcatcggtatatccgccatgcacatgcaactcctccacaacggcatggttataatgttcgaccgtaccgatttcggtacctcaaatgtttctctacccggaggcatatgtcgttacgaccctactgacaccgcagaaaagttcgattgcagcgcacactcagttctctacgatgttgtctccaacacataccgtcctttgaatgtccaaacagatacatggtgttcttctggtgcggttcttcccaacggaacattggttcaaaccggtggatacaacgatggtgagcgtgctgctcgaatgtttagcccttgtggttatagtgatacatgtgattggattgagtttcctcagtatctatcccaacgtagatggtatgccaccaaccaaatattacccgatggacggatcattgtggtcggaggaagaagacagttcaactatgaactttttccccgacatgattctcggtctagaagctcaagacttgagtttcttagagaaacttcagatggaagtaacgagaacaacttatatccgttcatacatcttttacctgatggaaacttatttgtcttcgctaacacaagatccattgtgttcgattacaaaaagaaccgaatcgtgaaagagtttccagagattccaggtggtgatccaaggaactatccaagcagtggttcttctatactatttccattagatgataccaacgatgctaacgtagaagttgagataatggtatgtggaggctctcctaaaggcggcttctcacgtggattcacacgtgccacctccacatgcgggaggctaaaactatccgatcagagtccaagttgggaaatggaaaccatgccattgccacgtgttatgggagacatgctactcttaccaacaggtgacgtcatcatcgtaaacggagccggagctggcacggccggttgggagaaagcacgtgacccgattatccaacctgtgatatatcaaccgtttgatcatctcttcaccgttatgtccacaccatcacgtcctaggatgtaccattcctcagcgattttattaccagacggtcgggttttagttggtggaagtaatcctcacgtttattacaactttaccaacgtcgagtatccaacggatttaagcctcgaggcttattctccaccatatctatttttcacatccgacccaatacgtcccaagatattattgacaagcgacaaagtattgagttacaagagattgtttaacgtggatttctccatagctcagtttctgaccgttgatcttctctctgtgaggatagttgcaccatctttcactacacactcctttgcgatgaatcagaggatggtaatcttgaagctactctctgtgacgcgtgaccagctaacaaattcttatagagtcagtgcattgggtccatcaacggctgagattgctcctccgggatactatatgatatttctggtgcatgcaggtataccaagctcagccgcttgggtgcagattgagtga

SEQ ID NO: 44443 - protein, 547 aa, Arabidopsis thaliana
  peptide (1)..(547): Ceres Seq. ID no. 12603678
  misc_feature (37)..(546): Homolog of NCBI NO: 15232379 NR Description: putative protein
  misc_feature (36)..(546): Homolog of NCBI NO: 19310437 NR Description: AT5g19580/T20D1_100 [Arabidopsis thaliana]
  misc_feature (36)..(546): Homolog of NCBI NO: 15241135 NR Description: putative protein
  misc_feature (37)..(546): Homolog of NCBI NO: 34911116 NR Description: putative glyoxal oxidase [Oryza sativa (japonica
  misc_feature (49)..(547): Homolog of NCBI NO: 25352604 NR Description: hypothetical protein F6F9.4 [imported] -
  misc_feature (37)..(547): Homolog of NCBI NO: 15222300 NR Description: unknown protein; protein id: At1g75620.1
  misc_feature (37)..(547): Homolog of NCBI NO: 15223699 NR Description: unknown protein
  misc_feature (3)..(543): Homolog of NCBI NO: 15223754 NR Description: hypothetical protein; protein id: At1g14430.1
  misc_feature (3)..(546): Homolog of NCBI NO: 25352602 NR Description: F14L17.20 protein - Arabidopsis thaliana
  misc_feature (1)..(547): Homolog of NCBI NO: 15230360 NR Description: putative protein; protein id: At3g57620.1
MINSKNTFIVATTILCLSMAILSEGQANPFLLQLDRWEMLLPSIGISAMHMQLLHNGMVIMFDRTDFGTSNVSLPGGICRYDPTDTAEKFDCSAHSVLYDVVSNTYRPLNVQTDTWCSSGAVLPNGTLVQTGGYNDGERAARMFSPCGYSDTCDWIEFPQYLSQRRWYATNQILPDGRIIVVGGRRQFNYELFPRHDSRSRSSRLEFLRETSDGSNENNLYPFIHLLPDGNLFVFANTRSIVFDYKKNRIVKEFPEIPGGDPRNYPSSGSSILFPLDDTNDANVEVEIMVCGGSPKGGFSRGFTRATSTCGRLKLSDQSPSWEMETMPLPRVMGDMLLLPTGDVIIVNGAGAGTAGWEKARDPIIQPVIYQPFDHLFTVMSTPSRPRMYHSSAILLPDGRVLVGGSNPHVYYNFTNVEYPTDLSLEAYSPPYLFFTSDPIRPKILLTSDKVLSYKRLFNVDFSIAQFLTVDLLSVRIVAPSFTTHSFAMNQRMVILKLLSVTRDQLTNSYRVSALGPSTAEIAPPGYYMIFLVHAGIPSSAAWVQIE

SEQ ID NO: 44444 - protein, 529 aa, Arabidopsis thaliana
  peptide (1)..(529): Ceres Seq. ID no. 12603679
  misc_feature (19)..(528): Homolog of NCBI NO: 15232379 NR Description: putative protein
  misc_feature (18)..(528): Homolog of NCBI NO: 19310437 NR Description: AT5g19580/T20D1_100 [Arabidopsis thaliana]
  misc_feature (18)..(528): Homolog of NCBI NO: 15241135 NR Description: putative protein
  misc_feature (19)..(528): Homolog of NCBI NO: 34911116 NR Description: putative glyoxal oxidase [Oryza sativa (japonica
  misc_feature (31)..(529): Homolog of NCBI NO: 25352604 NR Description: hypothetical protein F6F9.4 [imported] -
  misc_feature (19)..(529): Homolog of NCBI NO: 15222300 NR Description: unknown protein; protein id: At1g75620.1
  misc_feature (19)..(529): Homolog of NCBI NO: 15223699 NR Description: unknown protein
  misc_feature (1)..(525): Homolog of NCBI NO: 15223754 NR Description: hypothetical protein; protein id: At1g14430.1
  misc_feature (1)..(528): Homolog of NCBI NO: 25352602 NR Description: F14L17.20 protein - Arabidopsis thaliana
  misc_feature (1)..(529): Homolog of NCBI NO: 15230360 NR Description: putative protein; protein id: At3g57620.1
MAILSEGQANPFLLQLDRWEMLLPSIGISAMHMQLLHNGMVIMFDRTDFGTSNVSLPGGICRYDPTDTAEKFDCSAHSVLYDVVSNTYRPLNVQTDTWCSSGAVLPNGTLVQTGGYNDGERAARMFSPCGYSDTCDWIEFPQYLSQRRWYATNQILPDGRIIVVGGRRQFNYELFPRHDSRSRSSRLEFLRETSDGSNENNLYPFIHLLPDGNLFVFANTRSIVFDYKKNRIVKEFPEIPGGDPRNYPSSGSSILFPLDDTNDANVEVEIMVCGGSPKGGFSRGFTRATSTCGRLKLSDQSPSWEMETMPLPRVMGDMLLLPTGDVIIVNGAGAGTAGWEKARDPIIQPVIYQPFDHLFTVMSTPSRPRMYHSSAILLPDGRVLVGGSNPHVYYNFTNVEYPTDLSLEAYSPPYLFFTSDPIRPKILLTSDKVLSYKRLFNVDFSIAQFLTVDLLSVRIVAPSFTTHSFAMNQRMVILKLLSVTRDQLTNSYRVSALGPSTAEIAPPGYYMIFLVHAGIPSSAAWVQIE

SEQ ID NO: 44445 - protein, 509 aa, Arabidopsis thaliana
  peptide (1)..(509): Ceres Seq. ID no. 12603680
  misc_feature (1)..(508): Homolog of NCBI NO: 15232379 NR Description: putative protein
  misc_feature (1)..(508): Homolog of NCBI NO: 19310437 NR Description: AT5g19580/T20D1_100 [Arabidopsis thaliana]
  misc_feature (1)..(508): Homolog of NCBI NO: 15241135 NR Description: putative protein
  misc_feature (1)..(508): Homolog of NCBI NO: 34911116 NR Description: putative glyoxal oxidase [Oryza sativa (japonica
  misc_feature (11)..(509): Homolog of NCBI NO: 25352604 NR Description: hypothetical protein F6F9.4 [imported] -
  misc_feature (1)..(509): Homolog of NCBI NO: 15222300 NR Description: unknown protein; protein id: At1g75620.1
  misc_feature (1)..(509): Homolog of NCBI NO: 15223699 NR Description: unknown protein
  misc_feature (1)..(505): Homolog of NCBI NO: 15223754 NR Description: hypothetical protein; protein id: At1g14430.1
  misc_feature (1)..(508): Homolog of NCBI NO: 25352602 NR Description: F14L17.20 protein - Arabidopsis thaliana
  misc_feature (1)..(509): Homolog of NCBI NO: 15230360 NR Description: putative protein; protein id: At3g57620.1
MLLPSIGISAMHMQLLHNGMVIMFDRTDFGTSNVSLPGGICRYDPTDTAEKFDCSAHSVLYDVVSNTYRPLNVQTDTWCSSGAVLPNGTLVQTGGYNDGERAARMFSPCGYSDTCDWIEFPQYLSQRRWYATNQILPDGRIIVVGGRRQFNYELFPRHDSRSRSSRLEFLRETSDGSNENNLYPFIHLLPDGNLFVFANTRSIVFDYKKNRIVKEFPEIPGGDPRNYPSSGSSILFPLDDTNDANVEVEIMVCGGSPKGGFSRGFTRATSTCGRLKLSDQSPSWEMETMPLPRVMGDMLLLPTGDVIIVNGAGAGTAGWEKARDPIIQPVIYQPFDHLFTVMSTPSRPRMYHSSAILLPDGRVLVGGSNPHVYYNFTNVEYPTDLSLEAYSPPYLFFTSDPIRPKILLTSDKVLSYKRLFNVDFSIAQFLTVDLLSVRIVAPSFTTHSFAMNQRMVILKLLSVTRDQLTNSYRVSALGPSTAEIAPPGYYMIFLVHAGIPSSAAWVQIE

SEQ ID NO: 44446 - DNA, 1447 bp, Arabidopsis thaliana
  misc_feature (1)..(1447): Ceres Seq. ID no. 12462105
  misc_feature: MA Experiment ID: 20000180 Result: Down-regulated in Transcription
  misc_feature: MA Experiment 20000180 PARAMETER Experiment Name: At_Germinating_Seeds_P Parameter: Age (hr) Value: 24 vs. 0
  misc_feature: MA Experiment 20000180 PARAMETER Experiment Name: At_Germinating_Seeds_P Parameter: Tissue Value: Germinating Seeds
  misc_feature: MA Experiment ID: 20000184 Result: Down-regulated in Transcription
  misc_feature: MA Experiment 20000184 PARAMETER Experiment Name: At_Shoots__P Parameter: Age (day) Value: 7
  misc_feature: MA Experiment 20000184 PARAMETER Experiment Name: At_Shoots__P Parameter: Tissue Value: Shoots vs. Whole Plant
acagtgattaactcaggctgctaagggagatggcaacggcgatggcggaggatacgagcttcgagggagaccaactagcttccatgactactgatgacatcggtagagcttctcgtctcttagccaacgagattcgcatcctcaaggaagaatcgcagaggacaaaccttgatttggaatcagtgaaggagaaaataaaggagaaccaggagaagattaagcttaacaaacagcttccttacttagttggcaatatcgttgagattcttgagatgagtccagaggatgatgcagaggaagatggagcgaatatcgatctggactctcagaggaagggaaagtgtgtcgttctaaaaacatcaactcgtcagaccatcttcctccctgttgttggacttgttgatccagatacattgaagcctggggacttagttggagttaacaaagatagttacttgattctggatactttaccttctgagtatgattcaagagtaaaagcaatggaggtcgacgaaaaacctactgaagactacaatgatatagggggactagaaaaacagatacaagaacttgttgaagccattgtgttgccaatgactcataaagagcagttcgaaaagttgggtatccgtccaccaaaaggtgtactcttgtatggtcctcctggaaccggaaagacgttgatggcccgagcttgtgcagcacagacaaatgcaactttcctcaaactagcagggccacaacttgttcagatgttcatcggagatggagcaaaacttgtccgtgatgctttcctgcttgcaaaagagaaatccccttgtattatattcatagatgagattgacgcaatagggacaaagcgttttgatagcgaagttagtggagaccgtgaggtacaaaggacaatgttggagctgctcaaccagcttgatggattcagcagcgatgatcgcattaaggttattgcagcgacaaatcgtgctgatatactagatcctgcccttatgcgttctggtcgtttggatcgtaaaatcgagtttccgcaccccactgaagaagctagaggcaggatcttacagatacattcaaggaaaatgaatgtgaatgcagacgtcaattttgaagagcttgctcggtcaacggatgatttcaatggagctcaactcaaagcagtgtgtgttgaagcgggtatgcttgccctgcgccgggatgcaactgaggtgaaccatgaggatttcaatgaaggtataattcaagtacaagccaagaagaaagcaagcttgaattactacgcctaagtcctcttttatgtacactcttctttctcctctttacattatagaaaacttcaagttgtagtctcaacttttgaatctagaaccccttcaaagtgtggttataattataatagatatcagcttgacatattttgcttattattttc

SEQ ID NO: 44447 - protein, 423 aa, Arabidopsis thaliana
  peptide (1)..(423): Ceres Seq. ID no. 12462106
  misc_feature (206)..(393): Pfam Name: ATPase family associated with various cellular Pfam Description: ATPase family associated with various cellular
  misc_feature (2)..(423): Homolog of NCBI NO: 1174613 NR Description: 26S PROTEASE REGULATORY SUBUNIT 6A HOMOLOG
  misc_feature (2)..(423): Homolog of NCBI NO: 17297989 NR Description: 26S proteasome regulatory particle triple-A
  misc_feature (1)..(423): Homolog of NCBI NO: 1729860 NR Description: 26S PROTEASE REGULATORY SUBUNIT 6A HOMOLOG
  misc_feature (1)..(423): Homolog of NCBI NO: 5669047 NR Description: 19S proteasome regulatory complex subunit S6A
  misc_feature (1)..(423): Homolog of NCBI NO: 23197864 NR Description: 26S proteasome AAA-ATPase subunit RPT5a
  misc_feature (1)..(423): Homolog of NCBI NO: 12697589 NR Description: Tat binding protein like protein [Brassica rapa]
  misc_feature (1)..(423): Homolog of NCBI NO: 15230005 NR Description: 26S proteasome AAA-ATPase subunit RPT5a
  misc_feature (1)..(423): Homolog of NCBI NO: 3024434 NR Description: 26S PROTEASE REGULATORY SUBUNIT 6A HOMOLOG
  misc_feature (5)..(423): Homolog of NCBI NO: 3024431 NR Description: 26S protease regulatory subunit 6A homolog
  misc_feature (1)..(423): Homolog of NCBI NO: 15217431 NR Description: 26S protease regulatory subunit 6A
MATAMAEDTSFEGDQLASMTTDDIGRASRLLANEIRILKEESQRTNLDLESVKEKIKENQEKIKLNKQLPYLVGNIVEILEMSPEDDAEEDGANIDLDSQRKGKCVVLKTSTRQTIFLPVVGLVDPDTLKPGDLVGVNKDSYLILDTLPSEYDSRVKAMEVDEKPTEDYNDIGGLEKQIQELVEAIVLPMTHKEQFEKLGIRPPKGVLLYGPPGTGKTLMARACAAQTNATFLKLAGPQLVQMFIGDGAKLVRDAFLLAKEKSPCIIFIDEIDAIGTKRFDSEVSGDREVQRTMLELLNQLDGFSSDDRIKVIAATNRADILDPALMRSGRLDRKIEFPHPTEEARGRILQIHSRKMNVNADVNFEELARSTDDFNGAQLKAVCVEAGMLALRRDATEVNHEDFNEGIIQVQAKKKASLNYYA

SEQ ID NO: 44448 - protein, 419 aa, Arabidopsis thaliana
  peptide (1)..(419): Ceres Seq. ID no. 12462107
  misc_feature (202)..(389): Pfam Name: ATPase family associated with various cellular Pfam Description: ATPase family associated with various cellular
  misc_feature (1)..(419): Homolog of NCBI NO: 1174613 NR Description: 26S PROTEASE REGULATORY SUBUNIT 6A HOMOLOG
  misc_feature (1)..(419): Homolog of NCBI NO: 17297989 NR Description: 26S proteasome regulatory particle triple-A
  misc_feature (1)..(419): Homolog of NCBI NO: 1729860 NR Description: 26S PROTEASE REGULATORY SUBUNIT 6A HOMOLOG
  misc_feature (1)..(419): Homolog of NCBI NO: 5669047 NR Description: 19S proteasome regulatory complex subunit S6A
  misc_feature (1)..(419): Homolog of NCBI NO: 23197864 NR Description: 26S proteasome AAA-ATPase subunit RPT5a
  misc_feature (1)..(419): Homolog of NCBI NO: 12697589 NR Description: Tat binding protein like protein [Brassica rapa]
  misc_feature (1)..(419): Homolog of NCBI NO: 15230005 NR Description: 26S proteasome AAA-ATPase subunit RPT5a
  misc_feature (1)..(419): Homolog of NCBI NO: 3024434 NR Description: 26S PROTEASE REGULATORY SUBUNIT 6A HOMOLOG
  misc_feature (1)..(419): Homolog of NCBI NO: 3024431 NR Description: 26S protease regulatory subunit 6A homolog
  misc_feature (1)..(419): Homolog of NCBI NO: 15217431 NR Description: 26S protease regulatory subunit 6A
MAEDTSFEGDQLASMTTDDIGRASRLLANEIRILKEESQRTNLDLESVKEKIKENQEKIKLNKQLPYLVGNIVEILEMSPEDDAEEDGANIDLDSQRKGKCVVLKTSTRQTIFLPVVGLVDPDTLKPGDLVGVNKDSYLILDTLPSEYDSRVKAMEVDEKPTEDYNDIGGLEKQIQELVEAIVLPMTHKEQFEKLGIRPPKGVLLYGPPGTGKTLMARACAAQTNATFLKLAGPQLVQMFIGDGAKLVRDAFLLAKEKSPCIIFIDEIDAIGTKRFDSEVSGDREVQRTMLELLNQLDGFSSDDRIKVIAATNRADILDPALMRSGRLDRKIEFPHPTEEARGRILQIHSRKMNVNADVNFEELARSTDDFNGAQLKAVCVEAGMLALRRDATEVNHEDFNEGIIQVQAKKKASLNYYA

SEQ ID NO: 44449 - protein, 405 aa, Arabidopsis thaliana
  peptide (1)..(405): Ceres Seq. ID no. 12462108
  misc_feature (188)..(375): Pfam Name: ATPase family associated with various cellular Pfam Description: ATPase family associated with various cellular
  misc_feature (1)..(405): Homolog of NCBI NO: 1174613 NR Description: 26S PROTEASE REGULATORY SUBUNIT 6A HOMOLOG
  misc_feature (1)..(405): Homolog of NCBI NO: 17297989 NR Description: 26S proteasome regulatory particle triple-A
  misc_feature (1)..(405): Homolog of NCBI NO: 1729860 NR Description: 26S PROTEASE REGULATORY SUBUNIT 6A HOMOLOG
  misc_feature (1)..(405): Homolog of NCBI NO: 5669047 NR Description: 19S proteasome regulatory complex subunit S6A
  misc_feature (1)..(405): Homolog of NCBI NO: 23197864 NR Description: 26S proteasome AAA-ATPase subunit RPT5a
  misc_feature (1)..(405): Homolog of NCBI NO: 12697589 NR Description: Tat binding protein like protein [Brassica rapa]
  misc_feature (1)..(405): Homolog of NCBI NO: 15230005 NR Description: 26S proteasome AAA-ATPase subunit RPT5a
  misc_feature (1)..(405): Homolog of NCBI NO: 3024434 NR Description: 26S PROTEASE REGULATORY SUBUNIT 6A HOMOLOG
  misc_feature (1)..(405): Homolog of NCBI NO: 3024431 NR Description: 26S protease regulatory subunit 6A homolog
  misc_feature (1)..(405): Homolog of NCBI NO: 15217431 NR Description: 26S protease regulatory subunit 6A
MTTDDIGRASRLLANEIRILKEESQRTNLDLESVKEKIKENQEKIKLNKQLPYLVGNIVEILEMSPEDDAEEDGANIDLDSQRKGKCVVLKTSTRQTIFLPVVGLVDPDTLKPGDLVGVNKDSYLILDTLPSEYDSRVKAMEVDEKPTEDYNDIGGLEKQIQELVEAIVLPMTHKEQFEKLGIRPPKGVLLYGPPGTGKTLMARACAAQTNATFLKLAGPQLVQMFIGDGAKLVRDAFLLAKEKSPCIIFIDEIDAIGTKRFDSEVSGDREVQRTMLELLNQLDGFSSDDRIKVIAATNRADILDPALMRSGRLDRKIEFPHPTEEARGRILQIHSRKMNVNADVNFEELARSTDDFNGAQLKAVCVEAGMLALRRDATEVNHEDFNEGIIQVQAKKKASLNYYA

SEQ ID NO: 44450 - DNA, 639 bp, Arabidopsis thaliana; identical to SEQ ID NO: 43771
  misc_feature (1)..(639): Ceres Seq. ID no. 13503788
  misc_feature: MA Experiment ID: 108434 Result: Down-regulated in Transcription
  misc_feature: MA Experiment 108434 PARAMETER Experiment Name: At_Root_Tips_cDNA_P Parameter: Tissue Value: Root Tips
  misc_feature: MA Experiment ID: 108435 Result: Down-regulated in Transcription
  misc_feature: MA Experiment 108435 PARAMETER Experiment Name: At_stm_Mutants_cDNA_P Parameter: Plant Line Value: wt Landsburg vs stm
  misc_feature: MA Experiment 108435 PARAMETER Experiment Name: At_stm_Mutants_cDNA_P Parameter: Tissue Value: Shoot Apical Meristem Region
  misc_feature: MA Experiment ID: 108461 Result: Up-regulated in Transcription
  misc_feature: MA Experiment 108461 PARAMETER Experiment Name: At_Germinating_Seeds_cDNA_P Parameter: Age (day) Value: 1 vs. 0
  misc_feature: MA Experiment 108461 PARAMETER Experiment Name: At_Germinating_Seeds_cDNA_P Parameter: Tissue Value: Germinating Seeds
  misc_feature: MA Experiment ID: 108462 Result: Up-regulated in Transcription
  misc_feature: MA Experiment 108462 PARAMETER Experiment Name: At_Germinating_Seeds_cDNA_P Parameter: Age (day) Value: 2 vs. 0
  misc_feature: MA Experiment 108462 PARAMETER Experiment Name: At_Germinating_Seeds_cDNA_P Parameter: Tissue Value: Germinating Seeds
  misc_feature: MA Experiment ID: 108464 Result: Up-regulated in Transcription
  misc_feature: MA Experiment 108464 PARAMETER Experiment Name: At_Germinating_Seeds_cDNA_P Parameter: Age (day) Value: 4 vs. 0
  misc_feature: MA Experiment 108464 PARAMETER Experiment Name: At_Germinating_Seeds_cDNA_P Parameter: Tissue Value: Germinating Seeds
  misc_feature: MA Experiment ID: 108488 Result: Up-regulated in Transcription
  misc_feature: MA Experiment ID: 20000180 Result: Up-regulated in Transcription
  misc_feature: MA Experiment 20000180 PARAMETER Experiment Name: At_Germinating_Seeds_P Parameter: Age (hr) Value: 24 vs. 0
  misc_feature: MA Experiment 20000180 PARAMETER Experiment Name: At_Germinating_Seeds_P Parameter: Tissue Value: Germinating Seeds
  misc_feature: MA Experiment ID: 20000185 Result: Down-regulated in Transcription
  misc_feature: MA Experiment 20000185 PARAMETER Experiment Name: At_Roots__P Parameter: Age (day) Value: 7 vs. 21
  misc_feature: MA Experiment 20000185 PARAMETER Experiment Name: At_Roots__P Parameter: Organism Value: A. thaliana
  misc_feature: MA Experiment 20000185 PARAMETER Experiment Name: At_Roots__P Parameter: Tissue Value: Roots vs. Whole Plant
  misc_feature: MA Experiment ID: 20000264 Result: Down-regulated in Transcription
  misc_feature: MA Experiment 20000264 PARAMETER Experiment Name: At_Open_Flower_P Parameter: Age (day) Value: 21
  misc_feature: MA Experiment 20000264 PARAMETER Experiment Name: At_Open_Flower_P Parameter: Plant Line Value: WS
  misc_feature: MA Experiment 20000264 PARAMETER Experiment Name: At_Open_Flower_P Parameter: Tissue Value: Open Flower vs. Whole Plant
  misc_feature: MA Experiment ID: 20000265 Result: Down-regulated in Transcription
  misc_feature: MA Experiment 20000265 PARAMETER Experiment Name: At_Open_Flower_P Parameter: Age (day) Value: 21
  misc_feature: MA Experiment 20000265 PARAMETER Experiment Name: At_Open_Flower_P Parameter: Plant Line Value: WS
  misc_feature: MA Experiment 20000265 PARAMETER Experiment Name: At_Open_Flower_P Parameter: Tissue Value: Closed Flower vs. Whole Plant
  misc_feature: MA Experiment ID: 20000286 Result: Down-regulated in Transcription
  misc_feature: MA Experiment 20000286 PARAMETER Experiment Name: At_Open_Flower_P Parameter: Age (day) Value: 21
  misc_feature: MA Experiment 20000286 PARAMETER Experiment Name: At_Open_Flower_P Parameter: Plant Line Value: WS
  misc_feature: MA Experiment 20000286 PARAMETER Experiment Name: At_Open_Flower_P Parameter: Tissue Value: Half Open vs. Whole Plant
  misc_feature: MA Experiment ID: 20000437 Result: Down-regulated in Transcription
  misc_feature: MA Experiment 20000437 PARAMETER Experiment Name: At_Drought_P Parameter: Age (day) Value: 8
  misc_feature: MA Experiment 20000437 PARAMETER Experiment Name: At_Drought_P Parameter: Organism Value: A. thaliana
  misc_feature: MA Experiment 20000437 PARAMETER Experiment Name: At_Drought_P Parameter: Plant Line Value: WS
  misc_feature: MA Experiment 20000437 PARAMETER Experiment Name: At_Drought_P Parameter: Timepoint (hr) Value: 24
  misc_feature: MA Experiment 20000437 PARAMETER Experiment Name: At_Drought_P Parameter: Tissue Value: Whole Plant
  misc_feature: MA Experiment 20000437 PARAMETER Experiment Name: At_Drought_P Parameter: Treatment Value: Drought vs. No Drought
  misc_feature: MA Experiment ID: 20000438 Result: Up-regulated in Transcription
  misc_feature: MA Experiment 20000438 PARAMETER Experiment Name: At_Shoots__P Parameter: Age (day) Value: 14
  misc_feature: MA Experiment 20000438 PARAMETER Experiment Name: At_Shoots__P Parameter: Tissue Value: Shoots vs. Whole Plant
  misc_feature: MA Experiment ID: 20000439 Result: Down-regulated in Transcription
  misc_feature: MA Experiment 20000439 PARAMETER Experiment Name: At_Roots__P Parameter: Age (day) Value: 14 vs. 21
  misc_feature: MA Experiment 20000439 PARAMETER Experiment Name: At_Roots__P Parameter: Organism Value: A. thaliana
  misc_feature: MA Experiment 20000439 PARAMETER Experiment Name: At_Roots__P Parameter: Tissue Value: Roots vs. Whole Plant
  misc_feature: MA Experiment ID: 20000794 Result: Down-regulated in Transcription
  misc_feature: MA Experiment 20000794 PARAMETER Experiment Name: At_Petals_P Parameter: Age (day) Value: 23-25 days
  misc_feature: MA Experiment 20000794 PARAMETER Experiment Name: At_Petals_P Parameter: Plant Line Value: WS
  misc_feature: MA Experiment 20000794 PARAMETER Experiment Name: At_Petals_P Parameter: Tissue Value: Petals vs. Whole plant
  misc_feature: MA Experiment ID: 20001557 Result: Down-regulated in Transcription
  misc_feature: MA Experiment 20001557 PARAMETER Experiment Name: At_Drought_Soil_Dry_P Parameter: Age (day) Value: 27
  misc_feature: MA Experiment 20001557 PARAMETER Experiment Name: At_Drought_Soil_Dry_P Parameter: Organism Value: A. thaliana
  misc_feature: MA Experiment 20001557 PARAMETER Experiment Name: At_Drought_Soil_Dry_P Parameter: Plant Line Value: WS
  misc_feature: MA Experiment 20001557 PARAMETER Experiment Name: At_Drought_Soil_Dry_P Parameter: Post Timepoint (hr) Value: 3
  misc_feature: MA Experiment 20001557 PARAMETER Experiment Name: At_Drought_Soil_Dry_P Parameter: Post-Treatment Value: Re-Water vs. No Drought
  misc_feature: MA Experiment 20001557 PARAMETER Experiment Name: At_Drought_Soil_Dry_P Parameter: Timepoint (day) Value: 13
  misc_feature: MA Experiment 20001557 PARAMETER Experiment Name: At_Drought_Soil_Dry_P Parameter: Treatment Value: Drought vs. No Drought
  misc_feature: MA Experiment ID: 20001558 Result: Down-regulated in Transcription
  misc_feature: MA Experiment 20001558 PARAMETER Experiment Name: At_Drought_Soil_Dry_P Parameter: Age (day) Value: 27
  misc_feature: MA Experiment 20001558 PARAMETER Experiment Name: At_Drought_Soil_Dry_P Parameter: Organism Value: A. thaliana
  misc_feature: MA Experiment 20001558 PARAMETER Experiment Name: At_Drought_Soil_Dry_P Parameter: Plant Line Value: WS
  misc_feature: MA Experiment 20001558 PARAMETER Experiment Name: At_Drought_Soil_Dry_P Parameter: Post Timepoint (hr) Value: 6
  misc_feature: MA Experiment 20001558 PARAMETER Experiment Name: At_Drought_Soil_Dry_P Parameter: Post-Treatment Value: Re-Water vs. No Drought
  misc_feature: MA Experiment 20001558 PARAMETER Experiment Name: At_Drought_Soil_Dry_P Parameter: Timepoint (day) Value: 13
  misc_feature: MA Experiment 20001558 PARAMETER Experiment Name: At_Drought_Soil_Dry_P Parameter: Treatment Value: Drought vs. No Drought
  misc_feature: MA Experiment ID: 20001757 Result: Up-regulated in Transcription
  misc_feature: MA Experiment 20001757 PARAMETER Experiment Name: At_50mM_NH4NO3_L-to-H_P Parameter: Timepoint (hr) Value: 6
  misc_feature: MA Experiment 20001757 PARAMETER Experiment Name: At_50mM_NH4NO3_L-to-H_P Parameter: Tissue Value: Leaf
  misc_feature: MA Experiment 20001757 PARAMETER Experiment Name: At_50mM_NH4NO3_L-to-H_P Parameter: Treatment Value: 50mM NH4NO3 vs 100mM Mannitol
  misc_feature: MA Experiment ID: 20001904 Result: Down-regulated in Transcription
  misc_feature: MA Experiment 20001904 PARAMETER Experiment Name: At_Drought_Reproduction_P Parameter: Age (day) Value: 37
  misc_feature: MA Experiment 20001904 PARAMETER Experiment Name: At_Drought_Reproduction_P Parameter: Organism Value: A. thaliana
  misc_feature: MA Experiment 20001904 PARAMETER Experiment Name: At_Drought_Reproduction_P Parameter: Plant Line Value: WS
  misc_feature: MA Experiment 20001904 PARAMETER Experiment Name: At_Drought_Reproduction_P Parameter: Timepoint (day) Value: 7
  misc_feature: MA Experiment 20001904 PARAMETER Experiment Name: At_Drought_Reproduction_P Parameter: Tissue Value: Rosettes
  misc_feature: MA Experiment 20001904 PARAMETER Experiment Name: At_Drought_Reproduction_P Parameter: Treatment Value: Drought vs. No Drought
  misc_feature: MA Experiment ID: 20001905 Result: Down-regulated in Transcription
  misc_feature: MA Experiment 20001905 PARAMETER Experiment Name: At_Drought_Reproduction_P Parameter: Age (day) Value: 40
  misc_feature: MA Experiment 20001905 PARAMETER Experiment Name: At_Drought_Reproduction_P Parameter: Organism Value: A. thaliana
  misc_feature: MA Experiment 20001905 PARAMETER Experiment Name: At_Drought_Reproduction_P Parameter: Plant Line Value: WS
  misc_feature: MA Experiment 20001905 PARAMETER Experiment Name: At_Drought_Reproduction_P Parameter: Timepoint (day) Value: 10
  misc_feature: MA Experiment 20001905 PARAMETER Experiment Name: At_Drought_Reproduction_P Parameter: Tissue Value: Rosettes
  misc_feature: MA Experiment 20001905 PARAMETER Experiment Name: At_Drought_Reproduction_P Parameter: Treatment Value: Drought vs. No Drought
  misc_feature: MA Experiment ID: 20001908 Result: Down-regulated in Transcription
  misc_feature: MA Experiment 20001908 PARAMETER Experiment Name: At_Drought_Reproduction_P Parameter: Age (day) Value: 40
  misc_feature: MA Experiment 20001908 PARAMETER Experiment Name: At_Drought_Reproduction_P Parameter: Organism Value: A. thaliana
  misc_feature: MA Experiment 20001908 PARAMETER Experiment Name: At_Drought_Reproduction_P Parameter: Plant Line Value: WS
  misc_feature: MA Experiment 20001908 PARAMETER Experiment Name: At_Drought_Reproduction_P Parameter: Timepoint (day) Value: 10
  misc_feature: MA Experiment 20001908 PARAMETER Experiment Name: At_Drought_Reproduction_P Parameter: Tissue Value: Siliques
  misc_feature: MA Experiment 20001908 PARAMETER Experiment Name: At_Drought_Reproduction_P Parameter: Treatment Value: Drought vs. No Drought

SEQ ID NO: 44451 - protein, 165 aa, Arabidopsis thaliana; identical to SEQ ID NO: 43772
  peptide (1)..(165): Ceres Seq. ID no. 13503789
  misc_feature (103)..(164): Pfam Name: Photosystem I reaction centre subunit IV / PsaE Pfam Description: Photosystem I reaction centre subunit IV / PsaE
  misc_feature (103)..(164): Pfam Name: Photosystem I reaction centre subunit IV / PsaE Pfam Description: Photosystem I reaction centre subunit IV / PsaE
  misc_feature (38)..(164): Homolog of NCBI NO: 131178 NR Description: Photosystem I reaction center subunit IV,
  misc_feature (25)..(163): Homolog of NCBI NO: 26986114 NR Description: putative photosystem I reaction centre subunit IV
  misc_feature (26)..(163): Homolog of NCBI NO: 2499966 NR Description: Photosystem I reaction center subunit IV A,
  misc_feature (25)..(165): Homolog of NCBI NO: 131176 NR Description: Photosystem I reaction center subunit IV,
  misc_feature (25)..(163): Homolog of NCBI NO: 21555308 NR Description: Photosystem I reaction center subunit IV B,
  misc_feature (38)..(164): Homolog of NCBI NO: 131178 NR Description: Photosystem I reaction center subunit IV,
  misc_feature (26)..(163): Homolog of NCBI NO: 2499966 NR Description: Photosystem I reaction center subunit IV A,
  misc_feature (25)..(163): Homolog of NCBI NO: 21555308 NR Description: Photosystem I reaction center subunit IV B,
  misc_feature (23)..(165): Homolog of NCBI NO: 30688100 NR Description: photosystem I subunit PSI-E - like protein
  misc_feature (25)..(165): Homolog of NCBI NO: 24030202 NR Description: putative photosystem I subunit PSI-E protein
  misc_feature (51)..(165): Homolog of NCBI NO: 22091414 NR Description: putative photosystem I subunit PSI-E [Arabidopsis
  misc_feature (56)..(165): Homolog of NCBI NO: 11692884 NR Description: AT4g28750 [Arabidopsis thaliana]
  misc_feature (23)..(163): Homolog of NCBI NO: 15225331 NR Description: photosystem I reaction center subunit IV -related
  misc_feature (25)..(165): Homolog of NCBI NO: 131176 NR Description: Photosystem I reaction center subunit IV,
  misc_feature (25)..(163): Homolog of NCBI NO: 26986114 NR Description: putative photosystem I reaction centre subunit IV
  misc_feature (23)..(163): Homolog of NCBI NO: 15225331 NR Description: photosystem I reaction center subunit IV -related
  misc_feature (56)..(165): Homolog of NCBI NO: 11692884 NR Description: AT4g28750 [Arabidopsis thaliana]
  misc_feature (51)..(165): Homolog of NCBI NO: 22091414 NR Description: putative photosystem I subunit PSI-E [Arabidopsis
  misc_feature (25)..(165): Homolog of NCBI NO: 24030202 NR Description: putative photosystem I subunit PSI-E protein
  misc_feature (23)..(165): Homolog of NCBI NO: 30688100 NR Description: photosystem I subunit PSI-E - like protein

SEQ ID NO: 44452 - protein, 143 aa, Arabidopsis thaliana; identical to SEQ ID NO: 43773
  peptide (1)..(143): Ceres Seq. ID no. 13503790
  misc_feature (81)..(142): Pfam Name: Photosystem I reaction centre subunit IV / PsaE Pfam Description: Photosystem I reaction centre subunit IV / PsaE
  misc_feature (81)..(142): Pfam Name: Photosystem I reaction centre subunit IV / PsaE Pfam Description: Photosystem I reaction centre subunit IV / PsaE
  misc_feature (16)..(142): Homolog of NCBI NO: 131178 NR Description: Photosystem I reaction center subunit IV,
  misc_feature (3)..(141): Homolog of NCBI NO: 26986114 NR Description: putative photosystem I reaction centre subunit IV
  misc_feature (4)..(141): Homolog of NCBI NO: 2499966 NR Description: Photosystem I reaction center subunit IV A,
  misc_feature (3)..(143): Homolog of NCBI NO: 131176 NR Description: Photosystem I reaction center subunit IV,
  misc_feature (3)..(141): Homolog of NCBI NO: 21555308 NR Description: Photosystem I reaction center subunit IV B,
  misc_feature (16)..(142): Homolog of NCBI NO: 131178 NR Description: Photosystem I reaction center subunit IV,
  misc_feature (4)..(141): Homolog of NCBI NO: 2499966 NR Description: Photosystem I reaction center subunit IV A,
  misc_feature (3)..(141): Homolog of NCBI NO: 21555308 NR Description: Photosystem I reaction center subunit IV B,
  misc_feature (1)..(143): Homolog of NCBI NO: 30688100 NR Description: photosystem I subunit PSI-E - like protein
  misc_feature (3)..(143): Homolog of NCBI NO: 24030202 NR Description: putative photosystem I subunit PSI-E protein
  misc_feature (29)..(143): Homolog of NCBI NO: 22091414 NR Description: putative photosystem I subunit PSI-E [Arabidopsis
  misc_feature (34)..(143): Homolog of NCBI NO: 11692884 NR Description: AT4g28750 [Arabidopsis thaliana]
  misc_feature (1)..(141): Homolog of NCBI NO: 15225331 NR Description: photosystem I reaction center subunit IV -related
  misc_feature (3)..(143): Homolog of NCBI NO: 131176 NR Description: Photosystem I reaction center subunit IV,
  misc_feature (3)..(141): Homolog of NCBI NO: 26986114 NR Description: putative photosystem I reaction centre subunit IV
  misc_feature (1)..(141): Homolog of NCBI NO: 15225331 NR Description: photosystem I reaction center subunit IV -related
  misc_feature (34)..(143): Homolog of NCBI NO: 11692884 NR Description: AT4g28750 [Arabidopsis thaliana]
  misc_feature (29)..(143): Homolog of NCBI NO: 22091414 NR Description: putative photosystem I subunit PSI-E [Arabidopsis
  misc_feature (3)..(143): Homolog of NCBI NO: 24030202 NR Description: putative photosystem I subunit PSI-E protein
  misc_feature (1)..(143): Homolog of NCBI NO: 30688100 NR Description: photosystem I subunit PSI-E - like protein

SEQ ID NO: 44453 - protein, 141 aa, Arabidopsis thaliana; identical to SEQ ID NO: 43774
  peptide (1)..(141): Ceres Seq. ID no. 13503791
  misc_feature (79)..(140): Pfam Name: Photosystem I reaction centre subunit IV / PsaE Pfam Description: Photosystem I reaction centre subunit IV / PsaE
  misc_feature (79)..(140): Pfam Name: Photosystem I reaction centre subunit IV / PsaE Pfam Description: Photosystem I reaction centre subunit IV / PsaE
  misc_feature (14)..(140): Homolog of NCBI NO: 131178 NR Description: Photosystem I reaction center subunit IV,
  misc_feature (1)..(139): Homolog of NCBI NO: 26986114 NR Description: putative photosystem I reaction centre subunit IV
  misc_feature (2)..(139): Homolog of NCBI NO: 2499966 NR Description: Photosystem I reaction center subunit IV A,
  misc_feature (1)..(141): Homolog of NCBI NO: 131176 NR Description: Photosystem I reaction center subunit IV,
  misc_feature (1)..(139): Homolog of NCBI NO: 21555308 NR Description: Photosystem I reaction center subunit IV B,
  misc_feature (14)..(140): Homolog of NCBI NO: 131178 NR Description: Photosystem I reaction center subunit IV,
  misc_feature (2)..(139): Homolog of NCBI NO: 2499966 NR Description: Photosystem I reaction center subunit IV A,
  misc_feature (1)..(139): Homolog of NCBI NO: 21555308 NR Description: Photosystem I reaction center subunit IV B,
  misc_feature (1)..(141): Homolog of NCBI NO: 30688100 NR Description: photosystem I subunit PSI-E - like protein
  misc_feature (1)..(141): Homolog of NCBI NO: 24030202 NR Description: putative photosystem I subunit PSI-E protein
  misc_feature (27)..(141): Homolog of NCBI NO: 22091414 NR Description: putative photosystem I subunit PSI-E [Arabidopsis
  misc_feature (32)..(141): Homolog of NCBI NO: 11692884 NR Description: AT4g28750 [Arabidopsis thaliana]
  misc_feature (1)..(139): Homolog of NCBI NO: 15225331 NR Description: photosystem I reaction center subunit IV -related
  misc_feature (1)..(141): Homolog of NCBI NO: 131176 NR Description: Photosystem I reaction center subunit IV,
  misc_feature (1)..(139): Homolog of NCBI NO: 26986114 NR Description: putative photosystem I reaction centre subunit IV
  misc_feature (1)..(139): Homolog of NCBI NO: 15225331 NR Description: photosystem I reaction center subunit IV -related
  misc_feature (32)..(141): Homolog of NCBI NO: 11692884 NR Description: AT4g28750 [Arabidopsis thaliana]
  misc_feature (27)..(141): Homolog of NCBI NO: 22091414 NR Description: putative photosystem I subunit PSI-E [Arabidopsis
  misc_feature (1)..(141): Homolog of NCBI NO: 24030202 NR Description: putative photosystem I subunit PSI-E protein
  misc_feature (1)..(141): Homolog of NCBI NO: 30688100 NR Description: photosystem I subunit PSI-E - like protein

SEQ ID NO: 44454 - DNA, 1838 bp, Arabidopsis thaliana
  misc_feature (1)..(1838): Ceres Seq. ID no. 12488934
  misc_feature: MA Experiment ID: 20000184 Result: Down-regulated in Transcription
  misc_feature: MA Experiment 20000184 PARAMETER Experiment Name: At_Shoots__P Parameter: Age (day) Value: 7
  misc_feature: MA Experiment 20000184 PARAMETER Experiment Name: At_Shoots__P Parameter: Tissue Value: Shoots vs. Whole Plant
  misc_feature: MA Experiment ID: 20001451 Result: Up-regulated in Transcription
  misc_feature: MA Experiment 20001451 PARAMETER Experiment Name: At_Far-red-induction_P Parameter: Age (day) Value: 7
  misc_feature: MA Experiment 20001451 PARAMETER Experiment Name: At_Far-red-induction_P Parameter: Light Value: Far-red vs. White
  misc_feature: MA Experiment 20001451 PARAMETER Experiment Name: At_Far-red-induction_P Parameter: Organism Value: A. thaliana
  misc_feature: MA Experiment 20001451 PARAMETER Experiment Name: At_Far-red-induction_P Parameter: Plant Line Value: Columbia
  misc_feature: MA Experiment 20001451 PARAMETER Experiment Name: At_Far-red-induction_P Parameter: Timepoint (hr) Value: 24
  misc_feature: MA Experiment 20001451 PARAMETER Experiment Name: At_Far-red-induction_P Parameter: Tissue Value: Whole Plant
atcttcttctaccggagatcgagaaatagccgacgaagttttgttttttgagtaaaacagtattcgtcggacaaccgaagcgaaatccctaatttcccacaacacgaaataccaatttccccaattcgaaaacaaacacggtctgatgtcagacgcaagagataatgatgaccgtgtggatttcgaggagggtagctacagtgagatggaggatgaagtggaggaggaacaagtagaagagtatgaagaggaggaagaagaagatgatgatgatgatgacgttggcaatcagaatgccgaagaacgtgaggtggaggattatggtgatacaaaaggtggggatatggaagatgttcaggaggaaatagctgaagatgacgacaaccatattgatattgagacagcagatgatgatgagaaaccaccatctcctattgatgatgaagatagggaaaagtattcccaccttctttcacttcctcctcatggttctgaagtttttattggtgggctcccaagggatgttggagaagaggacctgagggatctatgtgaagagataggcgagatctttgaggtgagactgatgaaagatagggactctggtgatagcaaaggctatgcttttgtagctttcaaaaccaaagacgttgcacaaaaggccattgaggagttgcacagtaaagagtttaagggaaaaaccataaggtgctctctttccgaaacgaagaataggttgttcattggtaacataccaaagaactggactgaggatgagtttagaaaagtcatagaggatgttggtcctggagtggagaacatcgagctcataaaagacccaacaaataccactcgtaaccgtggttttgcatttgttttgtactataacaatgcatgtgctgattattcaagacagaaaatgatagattctaattttaagcttgagggtaacgctccaactgtgacttgggcagacccaaaaagctctcctgagcattctgctgctgctgctcaggtgaaagccctttatgtcaagaatattccagagaatacctcaacagagcagctaaaggaactctttcagaggcatggagaagtgaccaaaatcgttacacctcctggaaagggtggaaaacgtgattttgggtttgtccactatgctgaaagatctagtgcattgaaggctgtcaaagataccgagagatatgaagtcaatggtcaaccactagaagttgtgcttgctaaaccccaggctgaaaggaagcatgacccttcttcttattcttacggggctgcacctactcctgccccctttgtgcatcccacgtttggtggttttgctgcggctccttacggtgctatgggtgccggtttgggtattgccggtagttttagtcagccaatgatctatggtagaggagcaatgccaacagggatgcaaatggttccaatgcttcttcccgatggccgagttggctatgttctgcaacagcctggtatgccgatggcagcagcaccaccacaacgaccaagaagaaatgaccggaataacggctcaagcggagggtcaggcagagataacagtcatgaacatgatggtaaccgaggaggccgaaggtaccgaccctactagtaaccatagagaaaaataagcaagtagaaaaagaaaaggagaagtgtattgggatttgtttgtagtttgtttttggagaactttaaaaagctctctctcatgtgttataaaatatgaaatcgaaaccttatggtttctggtttgatatggagactgctggggggataggattgagtgattcgatctttaaattatgagacttttt

SEQ ID NO: 44455 - protein, 495 aa, Arabidopsis thaliana
  peptide (1)..(495): Ceres Seq. ID no. 12488935
  misc_feature (118)..(189): Pfam Name: RNA recognition motif. (a.k.a. RRM, RBD, or RNP domain) Pfam Description: RNA recognition motif. (a.k.a. RRM, RBD, or RNP
  misc_feature (118)..(189): Pfam Name: RNA recognition motif. (a.k.a. RRM, RBD, or RNP domain) Pfam Description: RNA recognition motif. (a.k.a. RRM, RBD, or RNP
  misc_feature (62)..(423): Homolog of NCBI NO: 5031755 NR Description: heterogeneous nuclear ribonucleoprotein R [Homo
  misc_feature (62)..(422): Homolog of NCBI NO: 13435603 NR Description: Similar to heterogeneous nuclear
  misc_feature (62)..(422): Homolog of NCBI NO: 28212266 NR Description: heterogeneous nuclear ribonucleoprotein R [Rattus
  misc_feature (17)..(422): Homolog of NCBI NO: 28422490 NR Description: Similar to NS1-associated protein 1 [Danio rerio]
  misc_feature (1)..(192): Homolog of NCBI NO: 7485284 NR Description: hypothetical protein A_TM018A10.14 - Arabidopsis
  misc_feature (62)..(423): Homolog of NCBI NO: 5031755 NR Description: heterogeneous nuclear ribonucleoprotein R [Homo
  misc_feature (62)..(422): Homolog of NCBI NO: 28212266 NR Description: heterogeneous nuclear ribonucleoprotein R [Rattus
  misc_feature (1)..(192): Homolog of NCBI NO: 7485284 NR Description: hypothetical protein A_TM018A10.14 - Arabidopsis
  misc_feature (1)..(495): Homolog of NCBI NO: 18411454 NR Description: RRM-containing protein
  misc_feature (1)..(495): Homolog of NCBI NO: 7485284 NR Description: hypothetical protein A_TM018A10.14 - Arabidopsis
  misc_feature (21)..(495): Homolog of NCBI NO: 37531112 NR Description: putative RNA-binding protein
  misc_feature (28)..(495): Homolog of NCBI NO: 15231284 NR Description: RRM-containing RNA-binding protein, putative
  misc_feature (10)..(475): Homolog of NCBI NO: 29371361 NR Description: putative RNA-binding protein
  misc_feature (17)..(422): Homolog of NCBI NO: 28422490 NR Description: Similar to NS1-associated protein 1 [Danio rerio]
  misc_feature (62)..(422): Homolog of NCBI NO: 13435603 NR Description: Similar to heterogeneous nuclear
  misc_feature (10)..(475): Homolog of NCBI NO: 29371361 NR Description: putative RNA-binding protein
  misc_feature (28)..(495): Homolog of NCBI NO: 15231284 NR Description: RRM-containing RNA-binding protein, putative
  misc_feature (21)..(495): Homolog of NCBI NO: 37531112 NR Description: putative RNA-binding protein
  misc_feature (1)..(495): Homolog of NCBI NO: 7485284 NR Description: hypothetical protein A_TM018A10.14 - Arabidopsis
  misc_feature (1)..(495): Homolog of NCBI NO: 18411454 NR Description: RRM-containing protein
MSDARDNDDRVDFEEGSYSEMEDEVEEEQVEEYEEEEEEDDDDDDVGNQNAEEREVEDYGDTKGGDMEDVQEEIAEDDDNHIDIETADDDEKPPSPIDDEDREKYSHLLSLPPHGSEVFIGGLPRDVGEEDLRDLCEEIGEIFEVRLMKDRDSGDSKGYAFVAFKTKDVAQKAIEELHSKEFKGKTIRCSLSETKNRLFIGNIPKNWTEDEFRKVIEDVGPGVENIELIKDPTNTTRNRGFAFVLYYNNACADYSRQKMIDSNFKLEGNAPTVTWADPKSSPEHSAAAAQVKALYVKNIPENTSTEQLKELFQRHGEVTKIVTPPGKGGKRDFGFVHYAERSSALKAVKDTERYEVNGQPLEVVLAKPQAERKHDPSSYSYGAAPTPAPFVHPTFGGFAAAPYGAMGAGLGIAGSFSQPMIYGRGAMPTGMQMVPMLLPDGRVGYVLQQPGMPMAAAPPQRPRRNDRNNGSSGGSGRDNSHEHDGNRGGRRYRPY

SEQ ID NO: 44456 - protein, 475 aa, Arabidopsis thaliana
  peptide (1)..(475): Ceres Seq. ID no. 12488936
  misc_feature (98)..(169): Pfam Name: RNA recognition motif. (a.k.a. RRM, RBD, or RNP domain) Pfam Description: RNA recognition motif. (a.k.a. RRM, RBD, or RNP
  misc_feature (98)..(169): Pfam Name: RNA recognition motif. (a.k.a. RRM, RBD, or RNP domain) Pfam Description: RNA recognition motif. (a.k.a. RRM, RBD, or RNP
  misc_feature (42)..(403): Homolog of NCBI NO: 5031755 NR Description: heterogeneous nuclear ribonucleoprotein R [Homo
  misc_feature (42)..(402): Homolog of NCBI NO: 13435603 NR Description: Similar to heterogeneous nuclear
  misc_feature (42)..(402): Homolog of NCBI NO: 28212266 NR Description: heterogeneous nuclear ribonucleoprotein R [Rattus
  misc_feature (1)..(402): Homolog of NCBI NO: 28422490 NR Description: Similar to NS1-associated protein 1 [Danio rerio]
  misc_feature (1)..(172): Homolog of NCBI NO: 7485284 NR Description: hypothetical protein A_TM018A10.14 - Arabidopsis
  misc_feature (42)..(403): Homolog of NCBI NO: 5031755 NR Description: heterogeneous nuclear ribonucleoprotein R [Homo
  misc_feature (42)..(402): Homolog of NCBI NO: 28212266 NR Description: heterogeneous nuclear ribonucleoprotein R [Rattus
  misc_feature (1)..(172): Homolog of NCBI NO: 7485284 NR Description: hypothetical protein A_TM018A10.14 - Arabidopsis
  misc_feature (1)..(475): Homolog of NCBI NO: 18411454 NR Description: RRM-containing protein
  misc_feature (1)..(475): Homolog of NCBI NO: 7485284 NR Description: hypothetical protein A_TM018A10.14 - Arabidopsis
  misc_feature (1)..(475): Homolog of NCBI NO: 37531112 NR Description: putative RNA-binding protein
  misc_feature (8)..(475): Homolog of NCBI NO: 15231284 NR Description: RRM-containing RNA-binding protein, putative
  misc_feature (1)..(455): Homolog of NCBI NO: 29371361 NR Description: putative RNA-binding protein
  misc_feature (1)..(402): Homolog of NCBI NO: 28422490 NR Description: Similar to NS1-associated protein 1 [Danio rerio]
  misc_feature (42)..(402): Homolog of NCBI NO: 13435603 NR Description: Similar to heterogeneous nuclear
  misc_feature (1)..(455): Homolog of NCBI NO: 29371361 NR Description: putative RNA-binding protein
  misc_feature (8)..(475): Homolog of NCBI NO: 15231284 NR Description: RRM-containing RNA-binding protein, putative
  misc_feature (1)..(475): Homolog of NCBI NO: 37531112 NR Description: putative RNA-binding protein
  misc_feature (1)..(475): Homolog of NCBI NO: 7485284 NR Description: hypothetical protein A_TM018A10.14 - Arabidopsis
  misc_feature (1)..(475): Homolog of NCBI NO: 18411454 NR Description: RRM-containing protein
MEDEVEEEQVEEYEEEEEEDDDDDDVGNQNAEEREVEDYGDTKGGDMEDVQEEIAEDDDNHIDIETADDDEKPPSPIDDEDREKYSHLLSLPPHGSEVFIGGLPRDVGEEDLRDLCEEIGEIFEVRLMKDRDSGDSKGYAFVAFKTKDVAQKAIEELHSKEFKGKTIRCSLSETKNRLFIGNIPKNWTEDEFRKVIEDVGPGVENIELIKDPTNTTRNRGFAFVLYYNNACADYSRQKMIDSNFKLEGNAPTVTWADPKSSPEHSAAAAQVKALYVKNIPENTSTEQLKELFQRHGEVTKIVTPPGKGGKRDFGFVHYAERSSALKAVKDTERYEVNGQPLEVVLAKPQAERKHDPSSYSYGAAPTPAPFVHPTFGGFAAAPYGAMGAGLGIAGSFSQPMIYGRGAMPTGMQMVPMLLPDGRVGYVLQQPGMPMAAAPPQRPRRNDRNNGSSGGSGRDNSHEHDGNRGGRRYRPY

SEQ ID NO: 44457 - protein, 429 aa, Arabidopsis thaliana
  peptide (1)..(429): Ceres Seq. ID no. 12488937
  misc_feature (52)..(123): Pfam Name: RNA recognition motif. (a.k.a. RRM, RBD, or RNP domain) Pfam Description: RNA recognition motif. (a.k.a. RRM, RBD, or RNP
  misc_feature (52)..(123): Pfam Name: RNA recognition motif. (a.k.a. RRM, RBD, or RNP domain) Pfam Description: RNA recognition motif. (a.k.a. RRM, RBD, or RNP
  misc_feature (1)..(357): Homolog of NCBI NO: 5031755 NR Description: heterogeneous nuclear ribonucleoprotein R [Homo
  misc_feature (1)..(356): Homolog of NCBI NO: 13435603 NR Description: Similar to heterogeneous nuclear
  misc_feature (1)..(356): Homolog of NCBI NO: 28212266 NR Description: heterogeneous nuclear ribonucleoprotein R [Rattus
  misc_feature (1)..(356): Homolog of NCBI NO: 28422490 NR Description: Similar to NS1-associated protein 1 [Danio rerio]
  misc_feature (1)..(126): Homolog of NCBI NO: 7485284 NR Description: hypothetical protein A_TM018A10.14 - Arabidopsis
  misc_feature (1)..(357): Homolog of NCBI NO: 5031755 NR Description: heterogeneous nuclear ribonucleoprotein R [Homo
  misc_feature (1)..(356): Homolog of NCBI NO: 28212266 NR Description: heterogeneous nuclear ribonucleoprotein R [Rattus
  misc_feature (1)..(126): Homolog of NCBI NO: 7485284 NR Description: hypothetical protein A_TM018A10.14 - Arabidopsis
  misc_feature (1)..(429): Homolog of NCBI NO: 18411454 NR Description: RRM-containing protein
  misc_feature (1)..(429): Homolog of NCBI NO: 7485284 NR Description: hypothetical protein A_TM018A10.14 - Arabidopsis
  misc_feature (1)..(429): Homolog of NCBI NO: 37531112 NR Description: putative RNA-binding protein
  misc_feature (1)..(429): Homolog of NCBI NO: 15231284 NR Description: RRM-containing RNA-binding protein, putative
  misc_feature (1)..(409): Homolog of NCBI NO: 29371361 NR Description: putative RNA-binding protein
  misc_feature (1)..(356): Homolog of NCBI NO: 28422490 NR Description: Similar to NS1-associated protein 1 [Danio rerio]
  misc_feature (1)..(356): Homolog of NCBI NO: 13435603 NR Description: Similar to heterogeneous nuclear
  misc_feature (1)..(409): Homolog of NCBI NO: 29371361 NR Description: putative RNA-binding protein
  misc_feature (1)..(429): Homolog of NCBI NO: 15231284 NR Description: RRM-containing RNA-binding protein, putative
  misc_feature (1)..(429): Homolog of NCBI NO: 37531112 NR Description: putative RNA-binding protein
  misc_feature (1)..(429): Homolog of NCBI NO: 7485284 NR Description: hypothetical protein A_TM018A10.14 - Arabidopsis
  misc_feature (1)..(429): Homolog of NCBI NO: 18411454 NR Description: RRM-containing protein
MEDVQEEIAEDDDNHIDIETADDDEKPPSPIDDEDREKYSHLLSLPPHGSEVFIGGLPRDVGEEDLRDLCEEIGEIFEVRLMKDRDSGDSKGYAFVAFKTKDVAQKAIEELHSKEFKGKTIRCSLSETKNRLFIGNIPKNWTEDEFRKVIEDVGPGVENIELIKDPTNTTRNRGFAFVLYYNNACADYSRQKMIDSNFKLEGNAPTVTWADPKSSPEHSAAAAQVKALYVKNIPENTSTEQLKELFQRHGEVTKIVTPPGKGGKRDFGFVHYAERSSALKAVKDTERYEVNGQPLEVVLAKPQAERKHDPSSYSYGAAPTPAPFVHPTFGGFAAAPYGAMGAGLGIAGSFSQPMIYGRGAMPTGMQMVPMLLPDGRVGYVLQQPGMPMAAAPPQRPRRNDRNNGSSGGSGRDNSHEHDGNRGGRRYRPY

SEQ ID NO: 44458 - DNA, 925 bp, Arabidopsis thaliana
  misc_feature (1)..(925): Ceres Seq. ID no. 12489184
  misc_feature: MA Experiment ID: 20000184 Result: Up-regulated in Transcription
  misc_feature: MA Experiment 20000184 PARAMETER Experiment Name: At_Shoots__P Parameter: Age (day) Value: 7
  misc_feature: MA Experiment 20000184 PARAMETER Experiment Name: At_Shoots__P Parameter: Tissue Value: Shoots vs. Whole Plant
  misc_feature: MA Experiment ID: 20001451 Result: Up-regulated in Transcription
  misc_feature: MA Experiment 20001451 PARAMETER Experiment Name: At_Far-red-induction_P Parameter: Age (day) Value: 7
  misc_feature: MA Experiment 20001451 PARAMETER Experiment Name: At_Far-red-induction_P Parameter: Light Value: Far-red vs. White
  misc_feature: MA Experiment 20001451 PARAMETER Experiment Name: At_Far-red-induction_P Parameter: Organism Value: A. thaliana
  misc_feature: MA Experiment 20001451 PARAMETER Experiment Name: At_Far-red-induction_P Parameter: Plant Line Value: Columbia
  misc_feature: MA Experiment 20001451 PARAMETER Experiment Name: At_Far-red-induction_P Parameter: Timepoint (hr) Value: 24
  misc_feature: MA Experiment 20001451 PARAMETER Experiment Name: At_Far-red-induction_P Parameter: Tissue Value: Whole Plant
  misc_feature: MA Experiment ID: 20001557 Result: Up-regulated in Transcription
  misc_feature: MA Experiment 20001557 PARAMETER Experiment Name: At_Drought_Soil_Dry_P Parameter: Age (day) Value: 27
  misc_feature: MA Experiment 20001557 PARAMETER Experiment Name: At_Drought_Soil_Dry_P Parameter: Organism Value: A. thaliana
  misc_feature: MA Experiment 20001557 PARAMETER Experiment Name: At_Drought_Soil_Dry_P Parameter: Plant Line Value: WS
  misc_feature: MA Experiment 20001557 PARAMETER Experiment Name: At_Drought_Soil_Dry_P Parameter: Post Timepoint (hr) Value: 3
  misc_feature: MA Experiment 20001557 PARAMETER Experiment Name: At_Drought_Soil_Dry_P Parameter: Post-Treatment Value: Re-Water vs. No Drought
  misc_feature: MA Experiment 20001557 PARAMETER Experiment Name: At_Drought_Soil_Dry_P Parameter: Timepoint (day) Value: 13
  misc_feature: MA Experiment 20001557 PARAMETER Experiment Name: At_Drought_Soil_Dry_P Parameter: Treatment Value: Drought vs. No Drought
  misc_feature: MA Experiment ID: 20001560 Result: Up-regulated in Transcription
  misc_feature: MA Experiment 20001560 PARAMETER Experiment Name: At_Drought_Soil_Dry_P Parameter: Age (day) Value: 28
  misc_feature: MA Experiment 20001560 PARAMETER Experiment Name: At_Drought_Soil_Dry_P Parameter: Organism Value: A. thaliana
  misc_feature: MA Experiment 20001560 PARAMETER Experiment Name: At_Drought_Soil_Dry_P Parameter: Plant Line Value: WS
  misc_feature: MA Experiment 20001560 PARAMETER Experiment Name: At_Drought_Soil_Dry_P Parameter: Post Timepoint (hr) Value: None
  misc_feature: MA Experiment 20001560 PARAMETER Experiment Name: At_Drought_Soil_Dry_P Parameter: Post-Treatment Value: None
  misc_feature: MA Experiment 20001560 PARAMETER Experiment Name: At_Drought_Soil_Dry_P Parameter: Timepoint (day) Value: 14
  misc_feature: MA Experiment 20001560 PARAMETER Experiment Name: At_Drought_Soil_Dry_P Parameter: Treatment Value: Drought vs. No Drought
  misc_feature: MA Experiment ID: 20001905 Result: Up-regulated in Transcription
  misc_feature: MA Experiment 20001905 PARAMETER Experiment Name: At_Drought_Reproduction_P Parameter: Age (day) Value: 40
  misc_feature: MA Experiment 20001905 PARAMETER Experiment Name: At_Drought_Reproduction_P Parameter: Organism Value: A. thaliana
  misc_feature: MA Experiment 20001905 PARAMETER Experiment Name: At_Drought_Reproduction_P Parameter: Plant Line Value: WS
  misc_feature: MA Experiment 20001905 PARAMETER Experiment Name: At_Drought_Reproduction_P Parameter: Timepoint (day) Value: 10
  misc_feature: MA Experiment 20001905 PARAMETER Experiment Name: At_Drought_Reproduction_P Parameter: Tissue Value: Rosettes
  misc_feature: MA Experiment 20001905 PARAMETER Experiment Name: At_Drought_Reproduction_P Parameter: Treatment Value: Drought vs. No Drought
  misc_feature: MA Experiment ID: 20001911 Result: Down-regulated in Transcription
  misc_feature: MA Experiment 20001911 PARAMETER Experiment Name: At_Drought_Reproduction_P Parameter: Age (day) Value: 40
  misc_feature: MA Experiment 20001911 PARAMETER Experiment Name: At_Drought_Reproduction_P Parameter: Organism Value: A. thaliana
  misc_feature: MA Experiment 20001911 PARAMETER Experiment Name: At_Drought_Reproduction_P Parameter: Plant Line Value: WS
  misc_feature: MA Experiment 20001911 PARAMETER Experiment Name: At_Drought_Reproduction_P Parameter: Timepoint (day) Value: 10
  misc_feature: MA Experiment 20001911 PARAMETER Experiment Name: At_Drought_Reproduction_P Parameter: Tissue Value: Flowers
  misc_feature: MA Experiment 20001911 PARAMETER Experiment Name: At_Drought_Reproduction_P Parameter: Treatment Value: Drought vs. No Drought
actcaacactcacttctatatcacagttttctactaactctttccttattcttgtaccatcctaaatcagtaagtccttaacgtacgcaccatgtgtacgttagagaagcgcggcgatctctttctcctaaccctaaccggcgaagacgagcacagattccaccccgacacgatcgcctctgttctctcgcttcttgaacaagcaaagtctcaatccacaaaaggatccgtcctcatcactaccggtcacggaaagttcttctccaatggctttgacctcgcgtgggctcaatccgctggacacggtgctataaaacggatgcaccaaatggtcaaatcctttaaaccggtgttagccgccctcctcgatcttccaatgccgacgatcgccgccttgaacggccacgcggcagcctcggggctgatgtttgcgctgagccacgactacgttttcatgaggaaagaccgtggggttctatatatgagcgaggtggacatcgggctaccggtgccggactacttctcggcgttggtcgtggctaaggttgggtcaggtatcgcgagaagggagctgttactgagcgggaagaagctcaaaggagaagaagcggtggctctcgggatcgtggactcagcggcgcatgatagtgcggaaggtgtggtggaggctacagtgagccttggagaaagtttggccgctaagaaatggaatggtgaggtgtatgcaaccattaggaagagtttgtatccggagctttgtcggatggttgatttaacggcaaataacttggccactcacaacctctagaaactctcattgtcttgttgggagaaaaatggttgaaatatgaatattgccgacaaaagtcaacgtccatttcactaagcacgtatttgtttctcaccaataaaacataattaatct

SEQ ID NO: 44459 - protein, 238 aa, Arabidopsis thaliana
  peptide (1)..(238): Ceres Seq. ID no. 12489185
  misc_feature (11)..(184): Pfam Name: Enoyl-CoA hydratase/isomerase family Pfam Description: Enoyl-CoA hydratase/isomerase family
  misc_feature (4)..(203): Homolog of NCBI NO: 23108308 NR Description: hypothetical protein [Novosphingobium
  misc_feature (27)..(193): Homolog of NCBI NO: 24214965 NR Description: enoyl-CoA hydratase
  misc_feature (3)..(224): Homolog of NCBI NO: 40739395 NR Description: hypothetical protein AN6767.2 [Aspergillus
  misc_feature (17)..(204): Homolog of NCBI NO: 15828352 NR Description: possible enoyl-CoA hydratase [Mycobacterium
  misc_feature (1)..(219): Homolog of NCBI NO: 23017142 NR Description: hypothetical protein [Thermobifida fusca]
  misc_feature (1)..(222): Homolog of NCBI NO: 34903766 NR Description: unnamed protein product [Oryza sativa (japonica
  misc_feature (1)..(222): Homolog of NCBI NO: 15218713 NR Description: hypothetical protein; protein id: At1g65520.1
  misc_feature (1)..(238): Homolog of NCBI NO: 15236498 NR Description: carnitine racemase like protein
  misc_feature (1)..(238): Homolog of NCBI NO: 21555734 NR Description: carnitine racemase like protein [Arabidopsis
  misc_feature (1)..(238): Homolog of NCBI NO: 15236499 NR Description: carnitine racemase like protein
MCTLEKRGDLFLLTLTGEDEHRFHPDTIASVLSLLEQAKSQSTKGSVLITTGHGKFFSNGFDLAWAQSAGHGAIKRMHQMVKSFKPVLAALLDLPMPTIAALNGHAAASGLMFALSHDYVFMRKDRGVLYMSEVDIGLPVPDYFSALVVAKVGSGIARRELLLSGKKLKGEEAVALGIVDSAAHDSAEGVVEATVSLGESLAAKKWNGEVYATIRKSLYPELCRMVDLTANNLATHNL

SEQ ID NO: 44460 - protein, 162 aa, Arabidopsis thaliana
  peptide (1)..(162): Ceres Seq. ID no. 12489186
  misc_feature (1)..(108): Pfam Name: Enoyl-CoA hydratase/isomerase family Pfam Description: Enoyl-CoA hydratase/isomerase family
  misc_feature (1)..(127): Homolog of NCBI NO: 23108308 NR Description: hypothetical protein [Novosphingobium
  misc_feature (1)..(117): Homolog of NCBI NO: 24214965 NR Description: enoyl-CoA hydratase
  misc_feature (1)..(148): Homolog of NCBI NO: 40739395 NR Description: hypothetical protein AN6767.2 [Aspergillus
  misc_feature (1)..(128): Homolog of NCBI NO: 15828352 NR Description: possible enoyl-CoA hydratase [Mycobacterium
  misc_feature (1)..(143): Homolog of NCBI NO: 23017142 NR Description: hypothetical protein [Thermobifida fusca]
  misc_feature (1)..(146): Homolog of NCBI NO: 34903766 NR Description: unnamed protein product [Oryza sativa (japonica
  misc_feature (1)..(146): Homolog of NCBI NO: 15218713 NR Description: hypothetical protein; protein id: At1g65520.1
  misc_feature (1)..(162): Homolog of NCBI NO: 15236498 NR Description: carnitine racemase like protein
  misc_feature (1)..(162): Homolog of NCBI NO: 21555734 NR Description: carnitine racemase like protein [Arabidopsis
  misc_feature (1)..(162): Homolog of NCBI NO: 15236499 NR Description: carnitine racemase like protein
MHQMVKSFKPVLAALLDLPMPTIAALNGHAAASGLMFALSHDYVFMRKDRGVLYMSEVDIGLPVPDYFSALVVAKVGSGIARRELLLSGKKLKGEEAVALGIVDSAAHDSAEGVVEATVSLGESLAAKKWNGEVYATIRKSLYPELCRMVDLTANNLATHNL

SEQ ID NO: 44461 - protein, 159 aa, Arabidopsis thaliana
  peptide (1)..(159): Ceres Seq. ID no. 12489187
  misc_feature (1)..(105): Pfam Name: Enoyl-CoA hydratase/isomerase family Pfam Description: Enoyl-CoA hydratase/isomerase family
  misc_feature (1)..(124): Homolog of NCBI NO: 23108308 NR Description: hypothetical protein [Novosphingobium
  misc_feature (1)..(114): Homolog of NCBI NO: 24214965 NR Description: enoyl-CoA hydratase
  misc_feature (1)..(145): Homolog of NCBI NO: 40739395 NR Description: hypothetical protein AN6767.2 [Aspergillus
  misc_feature (1)..(125): Homolog of NCBI NO: 15828352 NR Description: possible enoyl-CoA hydratase [Mycobacterium
  misc_feature (1)..(140): Homolog of NCBI NO: 23017142 NR Description: hypothetical protein [Thermobifida fusca]
  misc_feature (1)..(143): Homolog of NCBI NO: 34903766 NR Description: unnamed protein product [Oryza sativa (japonica
  misc_feature (1)..(143): Homolog of NCBI NO: 15218713 NR Description: hypothetical protein; protein id: At1g65520.1
  misc_feature (1)..(159): Homolog of NCBI NO: 15236498 NR Description: carnitine racemase like protein
  misc_feature (1)..(159): Homolog of NCBI NO: 21555734 NR Description: carnitine racemase like protein [Arabidopsis
  misc_feature (1)..(159): Homolog of NCBI NO: 15236499 NR Description: carnitine racemase like protein
MVKSFKPVLAALLDLPMPTIAALNGHAAASGLMFALSHDYVFMRKDRGVLYMSEVDIGLPVPDYFSALVVAKVGSGIARRELLLSGKKLKGEEAVALGIVDSAAHDSAEGVVEATVSLGESLAAKKWNGEVYATIRKSLYPELCRMVDLTANNLATHNL

SEQ ID NO: 44462 - DNA, 1158 bp, Arabidopsis thaliana
  misc_feature (1)..(1158): Ceres Seq. ID no. 13503047
  misc_feature: MA Experiment ID: 20000184 Result: Up-regulated in Transcription
  misc_feature: MA Experiment 20000184 PARAMETER Experiment Name: At_Shoots__P Parameter: Age (day) Value: 7
  misc_feature: MA Experiment 20000184 PARAMETER Experiment Name: At_Shoots__P Parameter: Tissue Value: Shoots vs. Whole Plant
  misc_feature: MA Experiment ID: 20001558 Result: Down-regulated in Transcription
  misc_feature: MA Experiment 20001558 PARAMETER Experiment Name: At_Drought_Soil_Dry_P Parameter: Age (day) Value: 27
  misc_feature: MA Experiment 20001558 PARAMETER Experiment Name: At_Drought_Soil_Dry_P Parameter: Organism Value: A. thaliana
  misc_feature: MA Experiment 20001558 PARAMETER Experiment Name: At_Drought_Soil_Dry_P Parameter: Plant Line Value: WS
  misc_feature: MA Experiment 20001558 PARAMETER Experiment Name: At_Drought_Soil_Dry_P Parameter: Post Timepoint (hr) Value: 6
  misc_feature: MA Experiment 20001558 PARAMETER Experiment Name: At_Drought_Soil_Dry_P Parameter: Post-Treatment Value: Re-Water vs. No Drought
  misc_feature: MA Experiment 20001558 PARAMETER Experiment Name: At_Drought_Soil_Dry_P Parameter: Timepoint (day) Value: 13
  misc_feature: MA Experiment 20001558 PARAMETER Experiment Name: At_Drought_Soil_Dry_P Parameter: Treatment Value: Drought vs. No Drought
atctaatttctctcggctctttcatatttattgaatgttctttgaagaagaagaaggcgacgacacaaaaaccttgcatttgcatccatggcgtcgatgccgagcaaacttcttccagtcctagtctgctacgtttttcttttcccctttgcatcatcatctgattattctggggtatctcttccatcttcgtcgcctaaagtctcggtgggcctgtactacgagtctctctgtccctactgctcttccttcattgttaaccacctcgcgaagctcttcgaagacgatctcatatcaatcgtcgatctccatctctctccgtggggcaataccaagctccgttccgataacgtcactgccgtttgccagcatggggcatttgaatgcttcttggataccgtagaagcttgtgcaattgatgcttggcctaaagtaagcgatcatttcccgttcatatactgtgtcgagaagttggtgactgaacataagtatgacaagtgggagacgtgttatgagaagctcaatctcaactcgaaacctgttgcagattgtctcagcagtggacatgggaatgagcttgctttgcactatgctgcagaaacgaatgcgcttcagcctcctcacaagtatgtgccctgggtagtcgtggatggtcagccactttatgaggactatgaaaacttcataagctacatctgcaaggcttacaaaggtaataaagtacctggcgcatgtaccaaatatgcaaccggcaacttcattcgtagtgtcaaattgaaacgctcccctctggtgtcctggaaaggcgtgaataagatgtgggatgtgttggaacgtatcacaacctctttatcgtcatacatcgacatcaccggcctgctatgaacacttcctgtatctttttcccatgtaacaaaccaccccaaaaagctatctagattctgatatttaatgaatgtgtgtaatctttatgtttcatcaaaatgtatgtttgttgggttgtgagaggcctttcaagaatcacatgttgggtaaaaaacctatttcggtttagacgggttttgtttctcttatttgtttcggtgaagttgtagactgtagtatgaaaggagcctatcagggttgacgatggaacagtagtgaggaccgtgacccact

SEQ ID NO: 44463 - protein, 265 aa, Arabidopsis thaliana
  peptide (1)..(265): Ceres Seq. ID no. 13503048
  misc_feature (39)..(149): Pfam Name: Gamma interferon inducible lysosomal thiol Pfam Description: Gamma interferon inducible lysosomal thiol
  misc_feature (3)..(220): Homolog of NCBI NO: 22328587 NR Description: expressed protein [Arabidopsis thaliana]
  misc_feature (36)..(239): Homolog of NCBI NO: 15235540 NR Description: expressed protein [Arabidopsis thaliana]
  misc_feature (36)..(239): Homolog of NCBI NO: 21593852 NR Description: unknown [Arabidopsis thaliana]
  misc_feature (2)..(217): Homolog of NCBI NO: 21593076 NR Description: unknown [Arabidopsis thaliana]
  misc_feature (2)..(217): Homolog of NCBI NO: 18413888 NR Description: expressed protein [Arabidopsis thaliana]
  misc_feature (1)..(216): Homolog of NCBI NO: 15235523 NR Description: hypothetical protein [Arabidopsis thaliana]
  misc_feature (30)..(216): Homolog of NCBI NO: 30793446 NR Description: 27K protein [Triticum aestivum]
  misc_feature (34)..(216): Homolog of NCBI NO: 15241015 NR Description: hypothetical protein [Arabidopsis thaliana]
  misc_feature (4)..(265): Homolog of NCBI NO: 25406953 NR Description: hypothetical protein [imported] - Arabidopsis
  misc_feature (1)..(265): Homolog of NCBI NO: 18390723 NR Description: expressed protein [Arabidopsis thaliana]
MASMPSKLLPVLVCYVFLFPFASSSDYSGVSLPSSSPKVSVGLYYESLCPYCSSFIVNHLAKLFEDDLISIVDLHLSPWGNTKLRSDNVTAVCQHGAFECFLDTVEACAIDAWPKVSDHFPFIYCVEKLVTEHKYDKWETCYEKLNLNSKPVADCLSSGHGNELALHYAAETNALQPPHKYVPWVVVDGQPLYEDYENFISYICKAYKGNKVPGACTKYATGNFIRSVKLKRSPLVSWKGVNKMWDVLERITTSLSSYIDITGLL

SEQ ID NO: 44464 - protein, 262 aa, Arabidopsis thaliana
  peptide (1)..(262): Ceres Seq. ID no. 13503049
  misc_feature (36)..(146): Pfam Name: Gamma interferon inducible lysosomal thiol Pfam Description: Gamma interferon inducible lysosomal thiol
  misc_feature (1)..(217): Homolog of NCBI NO: 22328587 NR Description: expressed protein [Arabidopsis thaliana]
  misc_feature (33)..(236): Homolog of NCBI NO: 15235540 NR Description: expressed protein [Arabidopsis thaliana]
  misc_feature (33)..(236): Homolog of NCBI NO: 21593852 NR Description: unknown [Arabidopsis thaliana]
  misc_feature (1)..(214): Homolog of NCBI NO: 21593076 NR Description: unknown [Arabidopsis thaliana]
  misc_feature (1)..(214): Homolog of NCBI NO: 18413888 NR Description: expressed protein [Arabidopsis thaliana]
  misc_feature (1)..(213): Homolog of NCBI NO: 15235523 NR Description: hypothetical protein [Arabidopsis thaliana]
  misc_feature (27)..(213): Homolog of NCBI NO: 30793446 NR Description: 27K protein [Triticum aestivum]
  misc_feature (31)..(213): Homolog of NCBI NO: 15241015 NR Description: hypothetical protein [Arabidopsis thaliana]
  misc_feature (1)..(262): Homolog of NCBI NO: 25406953 NR Description: hypothetical protein [imported] - Arabidopsis
  misc_feature (1)..(262): Homolog of NCBI NO: 18390723 NR Description: expressed protein [Arabidopsis thaliana]
MPSKLLPVLVCYVFLFPFASSSDYSGVSLPSSSPKVSVGLYYESLCPYCSSFIVNHLAKLFEDDLISIVDLHLSPWGNTKLRSDNVTAVCQHGAFECFLDTVEACAIDAWPKVSDHFPFIYCVEKLVTEHKYDKWETCYEKLNLNSKPVADCLSSGHGNELALHYAAETNALQPPHKYVPWVVVDGQPLYEDYENFISYICKAYKGNKVPGACTKYATGNFIRSVKLKRSPLVSWKGVNKMWDVLERITTSLSSYIDITGLL

SEQ ID NO: 44465 - DNA, 1364 bp, Arabidopsis thaliana
  misc_feature (1)..(1364): Ceres Seq. ID no. 12599995
  misc_feature: MA Experiment ID: 20000173 Result: Down-regulated in Transcription
  misc_feature: MA Experiment 20000173 PARAMETER Experiment Name: At_42deg_Heat_P Parameter: Age (day) Value: 14
  misc_feature: MA Experiment 20000173 PARAMETER Experiment Name: At_42deg_Heat_P Parameter: Organism Value: A. thaliana
  misc_feature: MA Experiment 20000173 PARAMETER Experiment Name: At_42deg_Heat_P Parameter: Plant Line Value: WS
  misc_feature: MA Experiment 20000173 PARAMETER Experiment Name: At_42deg_Heat_P Parameter: Temperature (deg C) Value: 42 vs. 22
  misc_feature: MA Experiment 20000173 PARAMETER Experiment Name: At_42deg_Heat_P Parameter: Timepoint (hr) Value: 6
  misc_feature: MA Experiment 20000173 PARAMETER Experiment Name: At_42deg_Heat_P Parameter: Tissue Value: Aerial
  misc_feature: MA Experiment ID: 20000184 Result: Up-regulated in Transcription
  misc_feature: MA Experiment 20000184 PARAMETER Experiment Name: At_Shoots__P Parameter: Age (day) Value: 7
  misc_feature: MA Experiment 20000184 PARAMETER Experiment Name: At_Shoots__P Parameter: Tissue Value: Shoots vs. Whole Plant
  misc_feature: MA Experiment ID: 20000185 Result: Down-regulated in Transcription
  misc_feature: MA Experiment 20000185 PARAMETER Experiment Name: At_Roots__P Parameter: Age (day) Value: 7 vs. 21
  misc_feature: MA Experiment 20000185 PARAMETER Experiment Name: At_Roots__P Parameter: Organism Value: A. thaliana
  misc_feature: MA Experiment 20000185 PARAMETER Experiment Name: At_Roots__P Parameter: Tissue Value: Roots vs. Whole Plant
  misc_feature: MA Experiment ID: 20000437 Result: Down-regulated in Transcription
  misc_feature: MA Experiment 20000437 PARAMETER Experiment Name: At_Drought_P Parameter: Age (day) Value: 8
  misc_feature: MA Experiment 20000437 PARAMETER Experiment Name: At_Drought_P Parameter: Organism Value: A. thaliana
  misc_feature: MA Experiment 20000437 PARAMETER Experiment Name: At_Drought_P Parameter: Plant Line Value: WS
  misc_feature: MA Experiment 20000437 PARAMETER Experiment Name: At_Drought_P Parameter: Timepoint (hr) Value: 24
  misc_feature: MA Experiment 20000437 PARAMETER Experiment Name: At_Drought_P Parameter: Tissue Value: Whole Plant
  misc_feature: MA Experiment 20000437 PARAMETER Experiment Name: At_Drought_P Parameter: Treatment Value: Drought vs. No Drought
  misc_feature: MA Experiment ID: 20000438 Result: Up-regulated in Transcription
  misc_feature: MA Experiment 20000438 PARAMETER Experiment Name: At_Shoots__P Parameter: Age (day) Value: 14
  misc_feature: MA Experiment 20000438 PARAMETER Experiment Name: At_Shoots__P Parameter: Tissue Value: Shoots vs. Whole Plant
  misc_feature: MA Experiment ID: 20000573 Result: Down-regulated in Transcription
  misc_feature: MA Experiment 20000573 PARAMETER Experiment Name: At_100uM_ABA_Mutants__P Parameter: Organism Value: A. thaliana
  misc_feature: MA Experiment 20000573 PARAMETER Experiment Name: At_100uM_ABA_Mutants__P Parameter: Plant Line Value: CS22 vs. Ler wt
  misc_feature: MA Experiment 20000573 PARAMETER Experiment Name: At_100uM_ABA_Mutants__P Parameter: Timepoint (hr) Value: N/A
  misc_feature: MA Experiment 20000573 PARAMETER Experiment Name: At_100uM_ABA_Mutants__P Parameter: Tissue Value: Whole Plant
  misc_feature: MA Experiment 20000573 PARAMETER Experiment Name: At_100uM_ABA_Mutants__P Parameter: Treatment Value: None
  misc_feature: MA Experiment ID: 20000574 Result: Down-regulated in Transcription
  misc_feature: MA Experiment 20000574 PARAMETER Experiment Name: At_100uM_ABA_Mutants__P Parameter: Organism Value: A. thaliana
  misc_feature: MA Experiment 20000574 PARAMETER Experiment Name: At_100uM_ABA_Mutants__P Parameter: Plant Line Value: CS23 vs. Ler wt
  misc_feature: MA Experiment 20000574 PARAMETER Experiment Name: At_100uM_ABA_Mutants__P Parameter: Timepoint (hr) Value: N/A
  misc_feature: MA Experiment 20000574 PARAMETER Experiment Name: At_100uM_ABA_Mutants__P Parameter: Tissue Value: Whole Plant
  misc_feature: MA Experiment 20000574 PARAMETER Experiment Name: At_100uM_ABA_Mutants__P Parameter: Treatment Value: None
  misc_feature: MA Experiment ID: 20001247 Result: Up-regulated in Transcription
  misc_feature: MA Experiment 20001247 PARAMETER Experiment Name: At_Far-red-induction_P Parameter: Age (day) Value: 7
  misc_feature: MA Experiment 20001247 PARAMETER Experiment Name: At_Far-red-induction_P Parameter: Light Value: Far-red vs. White
  misc_feature: MA Experiment 20001247 PARAMETER Experiment Name: At_Far-red-induction_P Parameter: Organism Value: A. thaliana
  misc_feature: MA Experiment 20001247 PARAMETER Experiment Name: At_Far-red-induction_P Parameter: Plant Line Value: Columbia
  misc_feature: MA Experiment 20001247 PARAMETER Experiment Name: At_Far-red-induction_P Parameter: Timepoint (hr) Value: 1
  misc_feature: MA Experiment 20001247 PARAMETER Experiment Name: At_Far-red-induction_P Parameter: Tissue Value: Whole Plant
  misc_feature: MA Experiment ID: 20001248 Result: Down-regulated in Transcription
  misc_feature: MA Experiment 20001248 PARAMETER Experiment Name: At_Far-red-induction_P Parameter: Age (day) Value: 7
  misc_feature: MA Experiment 20001248 PARAMETER Experiment Name: At_Far-red-induction_P Parameter: Light Value: Far-red vs. White
  misc_feature: MA Experiment 20001248 PARAMETER Experiment Name: At_Far-red-induction_P Parameter: Organism Value: A. thaliana
  misc_feature: MA Experiment 20001248 PARAMETER Experiment Name: At_Far-red-induction_P Parameter: Plant Line Value: Columbia
  misc_feature: MA Experiment 20001248 PARAMETER Experiment Name: At_Far-red-induction_P Parameter: Timepoint (hr) Value: 4
  misc_feature: MA Experiment 20001248 PARAMETER Experiment Name: At_Far-red-induction_P Parameter: Tissue Value: Whole Plant
  misc_feature: MA Experiment ID: 20001451 Result: Up-regulated in Transcription
  misc_feature: MA Experiment 20001451 PARAMETER Experiment Name: At_Far-red-induction_P Parameter: Age (day) Value: 7
  misc_feature: MA Experiment 20001451 PARAMETER Experiment Name: At_Far-red-induction_P Parameter: Light Value: Far-red vs. White
  misc_feature: MA Experiment 20001451 PARAMETER Experiment Name: At_Far-red-induction_P Parameter: Organism Value: A. thaliana
  misc_feature: MA Experiment 20001451 PARAMETER Experiment Name: At_Far-red-induction_P Parameter: Plant Line Value: Columbia
  misc_feature: MA Experiment 20001451 PARAMETER Experiment Name: At_Far-red-induction_P Parameter: Timepoint (hr) Value: 24
  misc_feature: MA Experiment 20001451 PARAMETER Experiment Name: At_Far-red-induction_P Parameter: Tissue Value: Whole Plant
  misc_feature: MA Experiment ID: 20001757 Result: Up-regulated in Transcription
  misc_feature: MA Experiment 20001757 PARAMETER Experiment Name: At_50mM_NH4NO3_L-to-H_P Parameter: Timepoint (hr) Value: 6
  misc_feature: MA Experiment 20001757 PARAMETER Experiment Name: At_50mM_NH4NO3_L-to-H_P Parameter: Tissue Value: Leaf
  misc_feature: MA Experiment 20001757 PARAMETER Experiment Name: At_50mM_NH4NO3_L-to-H_P Parameter: Treatment Value: 50mM NH4NO3 vs 100mM Mannitol
atgccggggaatttagagccgttggatctcggaatccaaataccataccatttcagatgcccaatctcacttgacctaatgtctgatcccgtaaccatctccaccggccaaacttacgaccgaaccagcatcgactcatggatcgctatgggcaacaccacttgtccagtcacacgtgtcgctctctccgacttcactctcatccctaaccacactctccgccgtcttatccaagaatggtgcgtcgctaaccgctctaacggcgtcgaacggattcctacacctaaacaaccggcggatccaatctccgttaggtcacttctcagtcaagcatccgcaattaccggaactcacgtctctgttcgttcacgcgccgccgctattcgtcgtttgagaggattagctagagatagtgagaagaatcgcgttttgatcgctggtcataacgcgagggagattttggtgaggattttgttcgccgatattgaaacgacgtcgttgtcttcggagcttgtttctgagtcgcttgctcttttggttttattgcatatgacggagacggagtgtgaagctgttgcgtcggatcctagtcgggtcgggtttatgacccgattgttgtttgattcttcgattgaaattagggttaacgccgccgcgttgattgagatggtgttgaccggagcgaaatccatggatctgaaattgatcatttccggatctgattcgatattcgaaggcgttctcgatcttctcaagaatccgatttcatcgcggcgagctttgaagatcggaatcaaagcgattttcgctctctgtctcgtgaaacaaacgagacatctagcgatctccgccggagctccggggattttaatcgaccgtctcgcggcggatttcgataggtgtgatacggagcgaggtttagcgacagtggagcttctttgccgattaccagaaggatgtgctgcgtttggtgagcatgctttgacggtgccgctaatggtgaagacgatattaagagtttcagatagagcgacggagtacgcggcgggagcgttgttggctttatgtacggcggaggaacggtgtagagatgaagctgcggcggcgggattggtgacgcagttgttgcttctggtgcagagtgattgtacggagagagcgaagagaaaagctcagatgcttttgaagcttctcagagactcttggcctgacgattctaccgttcattccgacgatttcaatcgtagcgaagtggcgccgttttgagttttttttttttcttgttaattaagaacttaacgatgtaagattattgtaatgtgactttgtaagttgacccttgaaaagaatgttatacatttgct

SEQ ID NO: 44466 - protein, 421 aa, Arabidopsis thaliana
  peptide (1)..(421): Ceres Seq. ID no. 12599996
  misc_feature (13)..(87): Pfam Name: U-box domain Pfam Description: U-box domain
  misc_feature (3)..(421): Homolog of NCBI NO: 30013683 NR Description: Avr9/Cf-9 rapidly elicited protein 74 [Nicotiana
  misc_feature (8)..(404): Homolog of NCBI NO: 25408431 NR Description: hypothetical protein At2g35930 [imported] -
  misc_feature (1)..(404): Homolog of NCBI NO: 30686609 NR Description: expressed protein [Arabidopsis thaliana]
  misc_feature (9)..(398): Homolog of NCBI NO: 14582200 NR Description: immediate-early fungal elicitor protein CMPG1
  misc_feature (8)..(194): Homolog of NCBI NO: 15231222 NR Description: putative protein; protein id: At3g52450.1
  misc_feature (168)..(408): Homolog of NCBI NO: 15231222 NR Description: putative protein; protein id: At3g52450.1
  misc_feature (1)..(421): Homolog of NCBI NO: 18402223 NR Description: expressed protein
  misc_feature (1)..(421): Homolog of NCBI NO: 26451730 NR Description: unknown protein [Arabidopsis thaliana]
  misc_feature (1)..(421): Homolog of NCBI NO: 15222819 NR Description: hypothetical protein; protein id: At1g49780.1
MPGNLEPLDLGIQIPYHFRCPISLDLMSDPVTISTGQTYDRTSIDSWIAMGNTTCPVTRVALSDFTLIPNHTLRRLIQEWCVANRSNGVERIPTPKQPADPISVRSLLSQASAITGTHVSVRSRAAAIRRLRGLARDSEKNRVLIAGHNAREILVRILFADIETTSLSSELVSESLALLVLLHMTETECEAVASDPSRVGFMTRLLFDSSIEIRVNAAALIEMVLTGAKSMDLKLIISGSDSIFEGVLDLLKNPISSRRALKIGIKAIFALCLVKQTRHLAISAGAPGILIDRLAADFDRCDTERGLATVELLCRLPEGCAAFGEHALTVPLMVKTILRVSDRATEYAAGALLALCTAEERCRDEAAAAGLVTQLLLLVQSDCTERAKRKAQMLLKLLRDSWPDDSTVHSDDFNRSEVAPF

SEQ ID NO: 44467 - protein, 395 aa, Arabidopsis thaliana
  peptide (1)..(395): Ceres Seq. ID no. 12599997
  misc_feature (1)..(61): Pfam Name: U-box domain Pfam Description: U-box domain
  misc_feature (1)..(395): Homolog of NCBI NO: 30013683 NR Description: Avr9/Cf-9 rapidly elicited protein 74 [Nicotiana
  misc_feature (1)..(378): Homolog of NCBI NO: 25408431 NR Description: hypothetical protein At2g35930 [imported] -
  misc_feature (1)..(378): Homolog of NCBI NO: 30686609 NR Description: expressed protein [Arabidopsis thaliana]
  misc_feature (1)..(372): Homolog of NCBI NO: 14582200 NR Description: immediate-early fungal elicitor protein CMPG1
  misc_feature (1)..(168): Homolog of NCBI NO: 15231222 NR Description: putative protein; protein id: At3g52450.1
  misc_feature (142)..(382): Homolog of NCBI NO: 15231222 NR Description: putative protein; protein id: At3g52450.1
  misc_feature (1)..(395): Homolog of NCBI NO: 18402223 NR Description: expressed protein
  misc_feature (1)..(395): Homolog of NCBI NO: 26451730 NR Description: unknown protein [Arabidopsis thaliana]
  misc_feature (1)..(395): Homolog of NCBI NO: 15222819 NR Description: hypothetical protein; protein id: At1g49780.1
MSDPVTISTGQTYDRTSIDSWIAMGNTTCPVTRVALSDFTLIPNHTLRRLIQEWCVANRSNGVERIPTPKQPADPISVRSLLSQASAITGTHVSVRSRAAAIRRLRGLARDSEKNRVLIAGHNAREILVRILFADIETTSLSSELVSESLALLVLLHMTETECEAVASDPSRVGFMTRLLFDSSIEIRVNAAALIEMVLTGAKSMDLKLIISGSDSIFEGVLDLLKNPISSRRALKIGIKAIFALCLVKQTRHLAISAGAPGILIDRLAADFDRCDTERGLATVELLCRLPEGCAAFGEHALTVPLMVKTILRVSDRATEYAAGALLALCTAEERCRDEAAAAGLVTQLLLLVQSDCTERAKRKAQMLLKLLRDSWPDDSTVHSDDFNRSEVAPF

SEQ ID NO: 44468 - protein, 372 aa, Arabidopsis thaliana
  peptide (1)..(372): Ceres Seq. ID no. 12599998
  misc_feature (1)..(372): Homolog of NCBI NO: 30013683 NR Description: Avr9/Cf-9 rapidly elicited protein 74 [Nicotiana
  misc_feature (1)..(355): Homolog of NCBI NO: 25408431 NR Description: hypothetical protein At2g35930 [imported] -
  misc_feature (1)..(355): Homolog of NCBI NO: 30686609 NR Description: expressed protein [Arabidopsis thaliana]
  misc_feature (1)..(349): Homolog of NCBI NO: 14582200 NR Description: immediate-early fungal elicitor protein CMPG1
  misc_feature (1)..(145): Homolog of NCBI NO: 15231222 NR Description: putative protein; protein id: At3g52450.1
  misc_feature (119)..(359): Homolog of NCBI NO: 15231222 NR Description: putative protein; protein id: At3g52450.1
  misc_feature (1)..(372): Homolog of NCBI NO: 18402223 NR Description: expressed protein
  misc_feature (1)..(372): Homolog of NCBI NO: 26451730 NR Description: unknown protein [Arabidopsis thaliana]
  misc_feature (1)..(372): Homolog of NCBI NO: 15222819 NR Description: hypothetical protein; protein id: At1g49780.1
MGNTTCPVTRVALSDFTLIPNHTLRRLIQEWCVANRSNGVERIPTPKQPADPISVRSLLSQASAITGTHVSVRSRAAAIRRLRGLARDSEKNRVLIAGHNAREILVRILFADIETTSLSSELVSESLALLVLLHMTETECEAVASDPSRVGFMTRLLFDSSIEIRVNAAALIEMVLTGAKSMDLKLIISGSDSIFEGVLDLLKNPISSRRALKIGIKAIFALCLVKQTRHLAISAGAPGILIDRLAADFDRCDTERGLATVELLCRLPEGCAAFGEHALTVPLMVKTILRVSDRATEYAAGALLALCTAEERCRDEAAAAGLVTQLLLLVQSDCTERAKRKAQMLLKLLRDSWPDDSTVHSDDFNRSEVAPF

SEQ ID NO: 44469 - DNA, 1173 bp, Arabidopsis thaliana; identical to SEQ ID NO: 41110
  misc_feature (1)..(1173): Ceres Seq. ID no. 13509224
  misc_feature: MA Experiment ID: 20000111 Result: Down-regulated in Transcription
  misc_feature: MA Experiment 20000111 PARAMETER Experiment Name: At_42deg_Heat_cDNA_P Parameter: Temperature (deg C) Value: 42 vs. 22
  misc_feature: MA Experiment 20000111 PARAMETER Experiment Name: At_42deg_Heat_cDNA_P Parameter: Timepoint (hr) Value: 6
  misc_feature: MA Experiment 20000111 PARAMETER Experiment Name: At_42deg_Heat_cDNA_P Parameter: Tissue Value: Aerial

SEQ ID NO: 44470 - protein, 308 aa, Arabidopsis thaliana; identical to SEQ ID NO: 41111
  peptide (1)..(308): Ceres Seq. ID no. 13509225
  misc_feature (6)..(300): Homolog of NCBI NO: 34222684 NR Description: Mitochondrial folate transporter/carrier
  misc_feature (6)..(300): Homolog of NCBI NO: 14042724 NR Description: unnamed protein product [Homo sapiens]
  misc_feature (6)..(300): Homolog of NCBI NO: 34866087 NR Description: similar to mitochondrial folate
  misc_feature (6)..(300): Homolog of NCBI NO: 34222668 NR Description: Mitochondrial folate transporter/carrier
  misc_feature (6)..(300): Homolog of NCBI NO: 27369517 NR Description: mitochondrial folate transporter/carrier [Mus
  misc_feature (265)..(300): Homolog of NCBI NO: 24652037 NR Description: CG8026-PA [Drosophila melanogaster]
  misc_feature (6)..(284): Homolog of NCBI NO: 24652037 NR Description: CG8026-PA [Drosophila melanogaster]
  misc_feature (1)..(308): Homolog of NCBI NO: 10177519 NR Description: contains similarity to peroxisomal membrane
  misc_feature (1)..(308): Homolog of NCBI NO: 18425065 NR Description: mitochondrial carrier protein family [Arabidopsis
  misc_feature (1)..(308): Homolog of NCBI NO: 21537040 NR Description: contains similarity to peroxisomal membrane
  misc_feature (6)..(300): Homolog of NCBI NO: 34222684 NR Description: Mitochondrial folate transporter/carrier
  misc_feature (6)..(300): Homolog of NCBI NO: 14042724 NR Description: unnamed protein product [Homo sapiens]
  misc_feature (6)..(300): Homolog of NCBI NO: 34866087 NR Description: similar to mitochondrial folate
  misc_feature (6)..(300): Homolog of NCBI NO: 34222668 NR Description: Mitochondrial folate transporter/carrier
  misc_feature (6)..(300): Homolog of NCBI NO: 27369517 NR Description: mitochondrial folate transporter/carrier [Mus
  misc_feature (265)..(300): Homolog of NCBI NO: 24652037 NR Description: CG8026-PA [Drosophila melanogaster]
  misc_feature (6)..(284): Homolog of NCBI NO: 24652037 NR Description: CG8026-PA [Drosophila melanogaster]
  misc_feature (1)..(308): Homolog of NCBI NO: 10177519 NR Description: contains similarity to peroxisomal membrane
  misc_feature (1)..(308): Homolog of NCBI NO: 18425065 NR Description: mitochondrial carrier protein family [Arabidopsis
  misc_feature (1)..(308): Homolog of NCBI NO: 21537040 NR Description: contains similarity to peroxisomal membrane

SEQ ID NO: 44471 - protein, 285 aa, Arabidopsis thaliana; identical to SEQ ID NO: 41112
  peptide (1)..(285): Ceres Seq. ID no. 13509226
  misc_feature (1)..(277): Homolog of NCBI NO: 34222684 NR Description: Mitochondrial folate transporter/carrier
  misc_feature (1)..(277): Homolog of NCBI NO: 14042724 NR Description: unnamed protein product [Homo sapiens]
  misc_feature (1)..(277): Homolog of NCBI NO: 34866087 NR Description: similar to mitochondrial folate
  misc_feature (1)..(277): Homolog of NCBI NO: 34222668 NR Description: Mitochondrial folate transporter/carrier
  misc_feature (1)..(277): Homolog of NCBI NO: 27369517 NR Description: mitochondrial folate transporter/carrier [Mus
  misc_feature (242)..(277): Homolog of NCBI NO: 24652037 NR Description: CG8026-PA [Drosophila melanogaster]
  misc_feature (1)..(261): Homolog of NCBI NO: 24652037 NR Description: CG8026-PA [Drosophila melanogaster]
  misc_feature (1)..(285): Homolog of NCBI NO: 10177519 NR Description: contains similarity to peroxisomal membrane
  misc_feature (1)..(285): Homolog of NCBI NO: 18425065 NR Description: mitochondrial carrier protein family [Arabidopsis
  misc_feature (1)..(285): Homolog of NCBI NO: 21537040 NR Description: contains similarity to peroxisomal membrane
  misc_feature (1)..(277): Homolog of NCBI NO: 34222684 NR Description: Mitochondrial folate transporter/carrier
  misc_feature (1)..(277): Homolog of NCBI NO: 14042724 NR Description: unnamed protein product [Homo sapiens]
  misc_feature (1)..(277): Homolog of NCBI NO: 34866087 NR Description: similar to mitochondrial folate
  misc_feature (1)..(277): Homolog of NCBI NO: 34222668 NR Description: Mitochondrial folate transporter/carrier
  misc_feature (1)..(277): Homolog of NCBI NO: 27369517 NR Description: mitochondrial folate transporter/carrier [Mus
  misc_feature (242)..(277): Homolog of NCBI NO: 24652037 NR Description: CG8026-PA [Drosophila melanogaster]
  misc_feature (1)..(261): Homolog of NCBI NO: 24652037 NR Description: CG8026-PA [Drosophila melanogaster]
  misc_feature (1)..(285): Homolog of NCBI NO: 10177519 NR Description: contains similarity to peroxisomal membrane
  misc_feature (1)..(285): Homolog of NCBI NO: 18425065 NR Description: mitochondrial carrier protein family [Arabidopsis
  misc_feature (1)..(285): Homolog of NCBI NO: 21537040 NR Description: contains similarity to peroxisomal membrane

SEQ ID NO: 44472 - DNA, 1675 bp, Arabidopsis thaliana
  misc_feature (1)..(1675): Ceres Seq. ID no. 14306861
  misc_feature: MA Experiment ID: 20000180 Result: Down-regulated in Transcription
  misc_feature: MA Experiment 20000180 PARAMETER Experiment Name: At_Germinating_Seeds_P Parameter: Age (hr) Value: 24 vs. 0
  misc_feature: MA Experiment 20000180 PARAMETER Experiment Name: At_Germinating_Seeds_P Parameter: Tissue Value: Germinating Seeds
  misc_feature: MA Experiment ID: 20000709 Result: Up-regulated in Transcription
  misc_feature: MA Experiment 20000709 PARAMETER Experiment Name: At_15mM_NH4NO3_L-to-H_P Parameter: Age (hr) Value: 14
  misc_feature: MA Experiment 20000709 PARAMETER Experiment Name: At_15mM_NH4NO3_L-to-H_P Parameter: Organism Value: A. thaliana
  misc_feature: MA Experiment 20000709 PARAMETER Experiment Name: At_15mM_NH4NO3_L-to-H_P Parameter: Plant Line Value: WS
  misc_feature: MA Experiment 20000709 PARAMETER Experiment Name: At_15mM_NH4NO3_L-to-H_P Parameter: Timepoint (hr) Value: 4
  misc_feature: MA Experiment 20000709 PARAMETER Experiment Name: At_15mM_NH4NO3_L-to-H_P Parameter: Tissue Value: Aerial
  misc_feature: MA Experiment 20000709 PARAMETER Experiment Name: At_15mM_NH4NO3_L-to-H_P Parameter: Treatment Value: 15mM NH4NO3 vs. 30mM Mannitol
acctctatctctctcttctctgggaggaaaaatggagatatcggttgcatcggtaacaatatcagtagttctagctgttgtgtcatggtggatatggagaactttacagtgggtttggtttaagccaaagatgcttgagcattacctgagaagacaaggtcttgccggaacaccttacacgcctctagtcggcgatttgaagaagaatttcagcatgttgtcggaggcaaggtcgaaacccctcaaactaacggatgacatctcacctcgtgtcgtgccttatcccttgcaaatgttcaagacttacggaaggacttactttacatggtttggacctatcccaaccatcacaataatggatcctgagcaaatcaaggaagtgttcaacaaagtttatgatttccaaaagccgcatacatttcctttggccacaattatagctaaaggactcgctaattatgatggtgataaatgggcaaaacaccgaagaatcatcaacccggcttttcatatagagaagatcaagaatatggtacctgcgttccaccagagctgtagggaagttgttggcgaatgggatcagttagtatcggataaagggtcgtcatgtgaggtagacgtttggcctgggcttgtgagtatgactgcagatgtgatctctcgtactgcatttggcagcagctacaaagaagggcagaggatatttgagctccaagcagaactagcacagctcatcattcaagcttttaggaaagctttcatccctggatatagttatctcccaacaaaaagtaacagaagaatgaaagcagcagccagagaaatccaagttatactaagagggatcgtaaacaaaaggttaagggccagagaagctggtgaagcaccaagcgacgatttgctgggaatacttcttgaatcgaatttgaggcaaacggaaggaaacggaatgagtaccgaggatctgatggaggagtgcaagttgttctatttcgccgggcaagagacaacatcagtacttctggtttggacaatggtgctgttaagccaacaccaagattggcaggctcgtgcacgagaagaagtgaagcaagtgtttggcgataaagaacctgatgcagaaggactcaaccagctcaaagttatgacgatgatattatatgaggtccttaggctatatcctccagtaacccagctgactcgagccattcacaaagagctgaagctaggcgatctgaccctaccaggcggtgttcagatcagtctacctattctgctagtccaacacgacatcgagctgtggggaaacgacgcagcagagttcaatcctgacagatttaaagatggtctttcaaaggcaacaaagagccaagtctccttctttccctttgcgtggggaccgaggatatgcataggccagaactttgccctgttagaggcaaaaatggcaatggcattgattctgcggaggttctcgtttgagatttctccttcctatgttcacgcaccatacacagtcatcaccattcacccacagttcggtgctcagcttatcatgcacaagctctaatcagacaacacatttgtgttgttgtcaaatatacaataaacttgttatacagagatgaatcgagatagatcataatacaaaactcaaatctttccttttatgttc

SEQ ID NO: 44473 - protein, 522 aa, Arabidopsis thaliana
  peptide (1)..(522): Ceres Seq. ID no. 14306862
  misc_feature (97)..(497): Pfam Name: Cytochrome P450 Pfam Description: Cytochrome P450
  misc_feature (10)..(88): Homolog of NCBI NO: 9294385 NR Description: cytochrome P450-like protein [Arabidopsis
  misc_feature (124)..(522): Homolog of NCBI NO: 9294385 NR Description: cytochrome P450-like protein [Arabidopsis
  misc_feature (11)..(522): Homolog of NCBI NO: 15231889 NR Description: cytochrome P450, putative [Arabidopsis thaliana]
  misc_feature (11)..(522): Homolog of NCBI NO: 15231897 NR Description: cytochrome P450, putative [Arabidopsis thaliana]
  misc_feature (11)..(522): Homolog of NCBI NO: 9294386 NR Description: cytochrome P450 [Arabidopsis thaliana]
  misc_feature (11)..(522): Homolog of NCBI NO: 15231899 NR Description: cytochrome P450, putative [Arabidopsis thaliana]
  misc_feature (11)..(522): Homolog of NCBI NO: 15231906 NR Description: cytochrome P450, putative [Arabidopsis thaliana]
  misc_feature (11)..(522): Homolog of NCBI NO: 15231901 NR Description: cytochrome P450, putative [Arabidopsis thaliana]
  misc_feature (11)..(522): Homolog of NCBI NO: 15231903 NR Description: cytochrome P450, putative [Arabidopsis thaliana]
  misc_feature (11)..(522): Homolog of NCBI NO: 15231907 NR Description: cytochrome P450, putative [Arabidopsis thaliana]
PLSLSSLGGKMEISVASVTISVVLAVVSWWIWRTLQWVWFKPKMLEHYLRRQGLAGTPYTPLVGDLKKNFSMLSEARSKPLKLTDDISPRVVPYPLQMFKTYGRTYFTWFGPIPTITIMDPEQIKEVFNKVYDFQKPHTFPLATIIAKGLANYDGDKWAKHRRIINPAFHIEKIKNMVPAFHQSCREVVGEWDQLVSDKGSSCEVDVWPGLVSMTADVISRTAFGSSYKEGQRIFELQAELAQLIIQAFRKAFIPGYSYLPTKSNRRMKAAAREIQVILRGIVNKRLRAREAGEAPSDDLLGILLESNLRQTEGNGMSTEDLMEECKLFYFAGQETTSVLLVWTMVLLSQHQDWQARAREEVKQVFGDKEPDAEGLNQLKVMTMILYEVLRLYPPVTQLTRAIHKELKLGDLTLPGGVQISLPILLVQHDIELWGNDAAEFNPDRFKDGLSKATKSQVSFFPFAWGPRICIGQNFALLEAKMAMALILRRFSFEISPSYVHAPYTVITIHPQFGAQLIMHKL

SEQ ID NO: 44474 - protein, 512 aa, Arabidopsis thaliana
  peptide (1)..(512): Ceres Seq. ID no. 14306863
  misc_feature (87)..(487): Pfam Name: Cytochrome P450 Pfam Description: Cytochrome P450
  misc_feature (1)..(78): Homolog of NCBI NO: 9294385 NR Description: cytochrome P450-like protein [Arabidopsis
  misc_feature (114)..(512): Homolog of NCBI NO: 9294385 NR Description: cytochrome P450-like protein [Arabidopsis
  misc_feature (1)..(512): Homolog of NCBI NO: 15231889 NR Description: cytochrome P450, putative [Arabidopsis thaliana]
  misc_feature (1)..(512): Homolog of NCBI NO: 15231897 NR Description: cytochrome P450, putative [Arabidopsis thaliana]
  misc_feature (1)..(512): Homolog of NCBI NO: 9294386 NR Description: cytochrome P450 [Arabidopsis thaliana]
  misc_feature (1)..(512): Homolog of NCBI NO: 15231899 NR Description: cytochrome P450, putative [Arabidopsis thaliana]
  misc_feature (1)..(512): Homolog of NCBI NO: 15231906 NR Description: cytochrome P450, putative [Arabidopsis thaliana]
  misc_feature (1)..(512): Homolog of NCBI NO: 15231901 NR Description: cytochrome P450, putative [Arabidopsis thaliana]
  misc_feature (1)..(512): Homolog of NCBI NO: 15231903 NR Description: cytochrome P450, putative [Arabidopsis thaliana]
  misc_feature (1)..(512): Homolog of NCBI NO: 15231907 NR Description: cytochrome P450, putative [Arabidopsis thaliana]
MEISVASVTISVVLAVVSWWIWRTLQWVWFKPKMLEHYLRRQGLAGTPYTPLVGDLKKNFSMLSEARSKPLKLTDDISPRVVPYPLQMFKTYGRTYFTWFGPIPTITIMDPEQIKEVFNKVYDFQKPHTFPLATIIAKGLANYDGDKWAKHRRIINPAFHIEKIKNMVPAFHQSCREVVGEWDQLVSDKGSSCEVDVWPGLVSMTADVISRTAFGSSYKEGQRIFELQAELAQLIIQAFRKAFIPGYSYLPTKSNRRMKAAAREIQVILRGIVNKRLRAREAGEAPSDDLLGILLESNLRQTEGNGMSTEDLMEECKLFYFAGQETTSVLLVWTMVLLSQHQDWQARAREEVKQVFGDKEPDAEGLNQLKVMTMILYEVLRLYPPVTQLTRAIHKELKLGDLTLPGGVQISLPILLVQHDIELWGNDAAEFNPDRFKDGLSKATKSQVSFFPFAWGPRICIGQNFALLEAKMAMALILRRFSFEISPSYVHAPYTVITIHPQFGAQLIMHKL

SEQ ID NO: 44475 - protein, 479 aa, Arabidopsis thaliana
  peptide (1)..(479): Ceres Seq. ID no. 14306864
  misc_feature (54)..(454): Pfam Name: Cytochrome P450 Pfam Description: Cytochrome P450
  misc_feature (1)..(45): Homolog of NCBI NO: 9294385 NR Description: cytochrome P450-like protein [Arabidopsis
  misc_feature (81)..(479): Homolog of NCBI NO: 9294385 NR Description: cytochrome P450-like protein [Arabidopsis
  misc_feature (1)..(479): Homolog of NCBI NO: 15231889 NR Description: cytochrome P450, putative [Arabidopsis thaliana]
  misc_feature (1)..(479): Homolog of NCBI NO: 15231897 NR Description: cytochrome P450, putative [Arabidopsis thaliana]
  misc_feature (1)..(479): Homolog of NCBI NO: 9294386 NR Description: cytochrome P450 [Arabidopsis thaliana]
  misc_feature (1)..(479): Homolog of NCBI NO: 15231899 NR Description: cytochrome P450, putative [Arabidopsis thaliana]
  misc_feature (1)..(479): Homolog of NCBI NO: 15231906 NR Description: cytochrome P450, putative [Arabidopsis thaliana]
  misc_feature (1)..(479): Homolog of NCBI NO: 15231901 NR Description: cytochrome P450, putative [Arabidopsis thaliana]
  misc_feature (1)..(479): Homolog of NCBI NO: 15231903 NR Description: cytochrome P450, putative [Arabidopsis thaliana]
  misc_feature (1)..(479): Homolog of NCBI NO: 15231907 NR Description: cytochrome P450, putative [Arabidopsis thaliana]
MLEHYLRRQGLAGTPYTPLVGDLKKNFSMLSEARSKPLKLTDDISPRVVPYPLQMFKTYGRTYFTWFGPIPTITIMDPEQIKEVFNKVYDFQKPHTFPLATIIAKGLANYDGDKWAKHRRIINPAFHIEKIKNMVPAFHQSCREVVGEWDQLVSDKGSSCEVDVWPGLVSMTADVISRTAFGSSYKEGQRIFELQAELAQLIIQAFRKAFIPGYSYLPTKSNRRMKAAAREIQVILRGIVNKRLRAREAGEAPSDDLLGILLESNLRQTEGNGMSTEDLMEECKLFYFAGQETTSVLLVWTMVLLSQHQDWQARAREEVKQVFGDKEPDAEGLNQLKVMTMILYEVLRLYPPVTQLTRAIHKELKLGDLTLPGGVQISLPILLVQHDIELWGNDAAEFNPDRFKDGLSKATKSQVSFFPFAWGPRICIGQNFALLEAKMAMALILRRFSFEISPSYVHAPYTVITIHPQFGAQLIMHKL

SEQ ID NO: 44476 - DNA, 1415 bp, Arabidopsis thaliana
  misc_feature (1)..(1415): Ceres Seq. ID no. 14304435
  misc_feature: MA Experiment ID: 20000184 Result: Up-regulated in Transcription
  misc_feature: MA Experiment 20000184 PARAMETER Experiment Name: At_Shoots__P Parameter: Age (day) Value: 7
  misc_feature: MA Experiment 20000184 PARAMETER Experiment Name: At_Shoots__P Parameter: Tissue Value: Shoots vs. Whole Plant
  misc_feature: MA Experiment ID: 20000211 Result: Up-regulated in Transcription
  misc_feature: MA Experiment 20000211 PARAMETER Experiment Name: At_0.001percent_MeJA__P Parameter: Age (day) Value: 14
  misc_feature: MA Experiment 20000211 PARAMETER Experiment Name: At_0.001percent_MeJA__P Parameter: Organism Value: A. thaliana
  misc_feature: MA Experiment 20000211 PARAMETER Experiment Name: At_0.001percent_MeJA__P Parameter: Plant Line Value: WS
  misc_feature: MA Experiment 20000211 PARAMETER Experiment Name: At_0.001percent_MeJA__P Parameter: Timepoint (hr) Value: 1
  misc_feature: MA Experiment 20000211 PARAMETER Experiment Name: At_0.001percent_MeJA__P Parameter: Tissue Value: Aerial
  misc_feature: MA Experiment 20000211 PARAMETER Experiment Name: At_0.001percent_MeJA__P Parameter: Treatment Value: 0.001percent MeJA vs. No Treatment
  misc_feature: MA Experiment ID: 20000452 Result: Down-regulated in Transcription
  misc_feature: MA Experiment 20000452 PARAMETER Experiment Name: At_CS6879_Shoots-Roots_P Parameter: Age (day) Value: 14
  misc_feature: MA Experiment 20000452 PARAMETER Experiment Name: At_CS6879_Shoots-Roots_P Parameter: Organism Value: A. thaliana
  misc_feature: MA Experiment 20000452 PARAMETER Experiment Name: At_CS6879_Shoots-Roots_P Parameter: Plant Line Value: CS6879 vs. WS
  misc_feature: MA Experiment 20000452 PARAMETER Experiment Name: At_CS6879_Shoots-Roots_P Parameter: Tissue Value: Shoots
  misc_feature: MA Experiment ID: 20000460 Result: Down-regulated in Transcription
  misc_feature: MA Experiment 20000460 PARAMETER Experiment Name: At_10percent_PEG_P Parameter: Age (day) Value: 12
  misc_feature: MA Experiment 20000460 PARAMETER Experiment Name: At_10percent_PEG_P Parameter: Organism Value: A. thaliana
  misc_feature: MA Experiment 20000460 PARAMETER Experiment Name: At_10percent_PEG_P Parameter: Plant Line Value: WS
  misc_feature: MA Experiment 20000460 PARAMETER Experiment Name: At_10percent_PEG_P Parameter: Timepoint (day) Value: 12
  misc_feature: MA Experiment 20000460 PARAMETER Experiment Name: At_10percent_PEG_P Parameter: Tissue Value: Whole Plant
  misc_feature: MA Experiment 20000460 PARAMETER Experiment Name: At_10percent_PEG_P Parameter: Treatment Value: 10percent PEG vs. No Treatment
  misc_feature: MA Experiment ID: 20000495 Result: Up-regulated in Transcription
  misc_feature: MA Experiment 20000495 PARAMETER Experiment Name: At_Guard_Cells_P Parameter: Harvest Date Value: 8/2/2002
  misc_feature: MA Experiment 20000495 PARAMETER Experiment Name: At_Guard_Cells_P Parameter: Organism Value: A. thaliana
  misc_feature: MA Experiment 20000495 PARAMETER Experiment Name: At_Guard_Cells_P Parameter: Tissue Value: Guard Cells vs. Leaves
  misc_feature: MA Experiment ID: 20000527 Result: Down-regulated in Transcription
  misc_feature: MA Experiment 20000527 PARAMETER Experiment Name: At_10percent_PEG_P Parameter: Age (day) Value: 20
  misc_feature: MA Experiment 20000527 PARAMETER Experiment Name: At_10percent_PEG_P Parameter: Organism Value: A. thaliana
  misc_feature: MA Experiment 20000527 PARAMETER Experiment Name: At_10percent_PEG_P Parameter: Plant Line Value: WS
  misc_feature: MA Experiment 20000527 PARAMETER Experiment Name: At_10percent_PEG_P Parameter: Timepoint (day) Value: 20
  misc_feature: MA Experiment 20000527 PARAMETER Experiment Name: At_10percent_PEG_P Parameter: Tissue Value: Whole Plant
  misc_feature: MA Experiment 20000527 PARAMETER Experiment Name: At_10percent_PEG_P Parameter: Treatment Value: 10percent PEG vs. No Treatment
  misc_feature: MA Experiment ID: 20001247 Result: Up-regulated in Transcription
  misc_feature: MA Experiment 20001247 PARAMETER Experiment Name: At_Far-red-induction_P Parameter: Age (day) Value: 7
  misc_feature: MA Experiment 20001247 PARAMETER Experiment Name: At_Far-red-induction_P Parameter: Light Value: Far-red vs. White
  misc_feature: MA Experiment 20001247 PARAMETER Experiment Name: At_Far-red-induction_P Parameter: Organism Value: A. thaliana
  misc_feature: MA Experiment 20001247 PARAMETER Experiment Name: At_Far-red-induction_P Parameter: Plant Line Value: Columbia
  misc_feature: MA Experiment 20001247 PARAMETER Experiment Name: At_Far-red-induction_P Parameter: Timepoint (hr) Value: 1
  misc_feature: MA Experiment 20001247 PARAMETER Experiment Name: At_Far-red-induction_P Parameter: Tissue Value: Whole Plant
  misc_feature: MA Experiment ID: 20001248 Result: Up-regulated in Transcription
  misc_feature: MA Experiment 20001248 PARAMETER Experiment Name: At_Far-red-induction_P Parameter: Age (day) Value: 7
  misc_feature: MA Experiment 20001248 PARAMETER Experiment Name: At_Far-red-induction_P Parameter: Light Value: Far-red vs. White
  misc_feature: MA Experiment 20001248 PARAMETER Experiment Name: At_Far-red-induction_P Parameter: Organism Value: A. thaliana
  misc_feature: MA Experiment 20001248 PARAMETER Experiment Name: At_Far-red-induction_P Parameter: Plant Line Value: Columbia
  misc_feature: MA Experiment 20001248 PARAMETER Experiment Name: At_Far-red-induction_P Parameter: Timepoint (hr) Value: 4
  misc_feature: MA Experiment 20001248 PARAMETER Experiment Name: At_Far-red-induction_P Parameter: Tissue Value: Whole Plant
  misc_feature: MA Experiment ID: 20001906 Result: Up-regulated in Transcription
  misc_feature: MA Experiment 20001906 PARAMETER Experiment Name: At_Drought_Reproduction_P Parameter: Age (day) Value: 35
  misc_feature: MA Experiment 20001906 PARAMETER Experiment Name: At_Drought_Reproduction_P Parameter: Organism Value: A. thaliana
  misc_feature: MA Experiment 20001906 PARAMETER Experiment Name: At_Drought_Reproduction_P Parameter: Plant Line Value: WS
  misc_feature: MA Experiment 20001906 PARAMETER Experiment Name: At_Drought_Reproduction_P Parameter: Timepoint (day) Value: 5
  misc_feature: MA Experiment 20001906 PARAMETER Experiment Name: At_Drought_Reproduction_P Parameter: Tissue Value: Siliques
  misc_feature: MA Experiment 20001906 PARAMETER Experiment Name: At_Drought_Reproduction_P Parameter: Treatment Value: Drought vs. No Drought
agaaaccaaatgtcgttgataataatagaacactttctttctctctctaaaaagcaaaagtagtctagtcactgatttcttctaatcctccggtggagtgagagatgatatctccgacgttgtttcctcctctgcgctttatttctatgtcttccagtggctgttatcttcacagtccagcgagaactcacctgcgttatctcgccggagtttggtttccgctctctttccgtcttctctctttactctcgaaatgtccccgactcttcttcttcttctccggcggttcggattcgacagccgattcccaaagaagacgaccctcttcttcgactatcttctcgggttaacccgaatctacctcccggttcgacccggaaaatagcttttatgtacttaacgacgtcgcctcttccgttcgcgcctctttgggagatgttcttcgacggaatctccaagaatctttacaatgtctacgttcacgcggatccgacccgagaatacgacccgccgttctccggcgtgttcttgaaccgggtcattcactctaaaccctcgctgagacacactcccactctaactgcggcggcgcgtagactactagcacacgcgcttctcgacgatccattgaattacatgtttgcggttatatcaccttcatgcgtaccaattcgctcctttgacttcacttacaagacattagtctcgtcgcgcaagagcttcatcgagatacttaaagacgagccgtggcagttcgataggtggacggcgattgggagacacgcgatgcttccggaggtgaagctcgaggagtttcggatcgggtctcagttttgggttttgaaacggagacacgcgcgtgtggtggcgcgtgatcggcgtatatgggtgaagtttaaccagacgtgcgtgcgggaagactcgtgttatcctgaagaaagttactttcctacccttcttaatatgcgggatccacgtggatgtgtccccgccacgcttactcacgtggactggactgttaacgacggtggtcacccgaggatgtacgagccggaggaagtcgtgcctgagctggtcttgcggcttagaaagactagaccaagatatggtgaggatggaatcaacggttcggagtggtctaaggttgagcggatggatccgtttctgtttgctaggaagttttcaccgcaggctcttgagccgttgctgggtatggctcgaaccgtcttgttcaatgactcagccggtggtgtgtgaatggtttctctaatggtattgttgtaaattcagttttagttttagtttttttttttttcttttttgtggggaaataataattgtaatttaaatgggtagctgggaaaaacaaaaacccgagtataccattatcgtgagtaaaaaagtaaactcgtcct

SEQ ID NO: 44477 - protein, 288 aa, Arabidopsis thaliana
  peptide (1)..(288): Ceres Seq. ID no. 14304436
  misc_feature (34)..(149): Pfam Name: Arabidopsis protein of unknown function, DUF266 Pfam Description: Arabidopsis protein of unknown function, DUF266
  misc_feature (1)..(273): Homolog of NCBI NO: 38637182 NR Description: unknown protein [Oryza sativa (japonica
  misc_feature (1)..(273): Homolog of NCBI NO: 26452247 NR Description: unknown protein [Arabidopsis thaliana]
  misc_feature (1)..(283): Homolog of NCBI NO: 34394888 NR Description: unknown protein [Oryza sativa (japonica
  misc_feature (258)..(283): Homolog of NCBI NO: 15231121 NR Description: expressed protein [Arabidopsis thaliana]
  misc_feature (1)..(235): Homolog of NCBI NO: 15231121 NR Description: expressed protein [Arabidopsis thaliana]
  misc_feature (258)..(283): Homolog of NCBI NO: 30688302 NR Description: expressed protein [Arabidopsis thaliana]
  misc_feature (109)..(235): Homolog of NCBI NO: 30688302 NR Description: expressed protein [Arabidopsis thaliana]
  misc_feature (1)..(107): Homolog of NCBI NO: 30688302 NR Description: expressed protein [Arabidopsis thaliana]
  misc_feature (1)..(285): Homolog of NCBI NO: 15239393 NR Description: hypothetical protein [Arabidopsis thaliana]
  misc_feature (1)..(288): Homolog of NCBI NO: 15236739 NR Description: expressed protein [Arabidopsis thaliana]
MYLTTSPLPFAPLWEMFFDGISKNLYNVYVHADPTREYDPPFSGVFLNRVIHSKPSLRHTPTLTAAARRLLAHALLDDPLNYMFAVISPSCVPIRSFDFTYKTLVSSRKSFIEILKDEPWQFDRWTAIGRHAMLPEVKLEEFRIGSQFWVLKRRHARVVARDRRIWVKFNQTCVREDSCYPEESYFPTLLNMRDPRGCVPATLTHVDWTVNDGGHPRMYEPEEVVPELVLRLRKTRPRYGEDGINGSEWSKVERMDPFLFARKFSPQALEPLLGMARTVLFNDSAGGV

SEQ ID NO: 44478 - protein, 273 aa, Arabidopsis thaliana
  peptide (1)..(273): Ceres Seq. ID no. 14304437
  misc_feature (19)..(134): Pfam Name: Arabidopsis protein of unknown function, DUF266 Pfam Description: Arabidopsis protein of unknown function, DUF266
  misc_feature (1)..(258): Homolog of NCBI NO: 38637182 NR Description: unknown protein [Oryza sativa (japonica
  misc_feature (1)..(258): Homolog of NCBI NO: 26452247 NR Description: unknown protein [Arabidopsis thaliana]
  misc_feature (1)..(268): Homolog of NCBI NO: 34394888 NR Description: unknown protein [Oryza sativa (japonica
  misc_feature (243)..(268): Homolog of NCBI NO: 15231121 NR Description: expressed protein [Arabidopsis thaliana]
  misc_feature (1)..(220): Homolog of NCBI NO: 15231121 NR Description: expressed protein [Arabidopsis thaliana]
  misc_feature (243)..(268): Homolog of NCBI NO: 30688302 NR Description: expressed protein [Arabidopsis thaliana]
  misc_feature (94)..(220): Homolog of NCBI NO: 30688302 NR Description: expressed protein [Arabidopsis thaliana]
  misc_feature (1)..(92): Homolog of NCBI NO: 30688302 NR Description: expressed protein [Arabidopsis thaliana]
  misc_feature (1)..(270): Homolog of NCBI NO: 15239393 NR Description: hypothetical protein [Arabidopsis thaliana]
  misc_feature (1)..(273): Homolog of NCBI NO: 15236739 NR Description: expressed protein [Arabidopsis thaliana]
MFFDGISKNLYNVYVHADPTREYDPPFSGVFLNRVIHSKPSLRHTPTLTAAARRLLAHALLDDPLNYMFAVISPSCVPIRSFDFTYKTLVSSRKSFIEILKDEPWQFDRWTAIGRHAMLPEVKLEEFRIGSQFWVLKRRHARVVARDRRIWVKFNQTCVREDSCYPEESYFPTLLNMRDPRGCVPATLTHVDWTVNDGGHPRMYEPEEVVPELVLRLRKTRPRYGEDGINGSEWSKVERMDPFLFARKFSPQALEPLLGMARTVLFNDSAGGV

SEQ ID NO: 44479 - protein, 206 aa, Arabidopsis thaliana
  peptide (1)..(206): Ceres Seq. ID no. 14304438
  misc_feature (1)..(67): Pfam Name: Arabidopsis protein of unknown function, DUF266 Pfam Description: Arabidopsis protein of unknown function, DUF266
  misc_feature (1)..(191): Homolog of NCBI NO: 38637182 NR Description: unknown protein [Oryza sativa (japonica
  misc_feature (1)..(191): Homolog of NCBI NO: 26452247 NR Description: unknown protein [Arabidopsis thaliana]
  misc_feature (1)..(201): Homolog of NCBI NO: 34394888 NR Description: unknown protein [Oryza sativa (japonica
  misc_feature (176)..(201): Homolog of NCBI NO: 15231121 NR Description: expressed protein [Arabidopsis thaliana]
  misc_feature (1)..(153): Homolog of NCBI NO: 15231121 NR Description: expressed protein [Arabidopsis thaliana]
  misc_feature (176)..(201): Homolog of NCBI NO: 30688302 NR Description: expressed protein [Arabidopsis thaliana]
  misc_feature (27)..(153): Homolog of NCBI NO: 30688302 NR Description: expressed protein [Arabidopsis thaliana]
  misc_feature (1)..(25): Homolog of NCBI NO: 30688302 NR Description: expressed protein [Arabidopsis thaliana]
  misc_feature (1)..(203): Homolog of NCBI NO: 15239393 NR Description: hypothetical protein [Arabidopsis thaliana]
  misc_feature (1)..(206): Homolog of NCBI NO: 15236739 NR Description: expressed protein [Arabidopsis thaliana]
MFAVISPSCVPIRSFDFTYKTLVSSRKSFIEILKDEPWQFDRWTAIGRHAMLPEVKLEEFRIGSQFWVLKRRHARVVARDRRIWVKFNQTCVREDSCYPEESYFPTLLNMRDPRGCVPATLTHVDWTVNDGGHPRMYEPEEVVPELVLRLRKTRPRYGEDGINGSEWSKVERMDPFLFARKFSPQALEPLLGMARTVLFNDSAGGV

SEQ ID NO: 44480 - DNA, 1283 bp, Arabidopsis thaliana
  misc_feature (1)..(1283): Ceres Seq. ID no. 15174469
  misc_feature: MA Experiment ID: 20000166 Result: Up-regulated in Transcription
  misc_feature: MA Experiment 20000166 PARAMETER Experiment Name: At_100uM_ABA_P Parameter: Age (day) Value: 14
  misc_feature: MA Experiment 20000166 PARAMETER Experiment Name: At_100uM_ABA_P Parameter: Organism Value: A. thaliana
  misc_feature: MA Experiment 20000166 PARAMETER Experiment Name: At_100uM_ABA_P Parameter: Plant Line Value: WS
  misc_feature: MA Experiment 20000166 PARAMETER Experiment Name: At_100uM_ABA_P Parameter: Timepoint (hr) Value: 1
  misc_feature: MA Experiment 20000166 PARAMETER Experiment Name: At_100uM_ABA_P Parameter: Tissue Value: Aerial
  misc_feature: MA Experiment 20000166 PARAMETER Experiment Name: At_100uM_ABA_P Parameter: Treatment Value: 100uM ABA vs. No Treatment
  misc_feature: MA Experiment ID: 20000171 Result: Down-regulated in Transcription
  misc_feature: MA Experiment 20000171 PARAMETER Experiment Name: At_42deg_Heat_P Parameter: Age (day) Value: 14
  misc_feature: MA Experiment 20000171 PARAMETER Experiment Name: At_42deg_Heat_P Parameter: Organism Value: A. thaliana
  misc_feature: MA Experiment 20000171 PARAMETER Experiment Name: At_42deg_Heat_P Parameter: Plant Line Value: WS
  misc_feature: MA Experiment 20000171 PARAMETER Experiment Name: At_42deg_Heat_P Parameter: Temperature (deg C) Value: 42 vs. 22
  misc_feature: MA Experiment 20000171 PARAMETER Experiment Name: At_42deg_Heat_P Parameter: Timepoint (hr) Value: 1
  misc_feature: MA Experiment 20000171 PARAMETER Experiment Name: At_42deg_Heat_P Parameter: Tissue Value: Aerial
  misc_feature: MA Experiment ID: 20000173 Result: Down-regulated in Transcription
  misc_feature: MA Experiment 20000173 PARAMETER Experiment Name: At_42deg_Heat_P Parameter: Age (day) Value: 14
  misc_feature: MA Experiment 20000173 PARAMETER Experiment Name: At_42deg_Heat_P Parameter: Organism Value: A. thaliana
  misc_feature: MA Experiment 20000173 PARAMETER Experiment Name: At_42deg_Heat_P Parameter: Plant Line Value: WS
  misc_feature: MA Experiment 20000173 PARAMETER Experiment Name: At_42deg_Heat_P Parameter: Temperature (deg C) Value: 42 vs. 22
  misc_feature: MA Experiment 20000173 PARAMETER Experiment Name: At_42deg_Heat_P Parameter: Timepoint (hr) Value: 6
  misc_feature: MA Experiment 20000173 PARAMETER Experiment Name: At_42deg_Heat_P Parameter: Tissue Value: Aerial
  misc_feature: MA Experiment ID: 20000180 Result: Up-regulated in Transcription
  misc_feature: MA Experiment 20000180 PARAMETER Experiment Name: At_Germinating_Seeds_P Parameter: Age (hr) Value: 24 vs. 0
  misc_feature: MA Experiment 20000180 PARAMETER Experiment Name: At_Germinating_Seeds_P Parameter: Tissue Value: Germinating Seeds
  misc_feature: MA Experiment ID: 20000185 Result: Up-regulated in Transcription
  misc_feature: MA Experiment 20000185 PARAMETER Experiment Name: At_Roots__P Parameter: Age (day) Value: 7 vs. 21
  misc_feature: MA Experiment 20000185 PARAMETER Experiment Name: At_Roots__P Parameter: Organism Value: A. thaliana
  misc_feature: MA Experiment 20000185 PARAMETER Experiment Name: At_Roots__P Parameter: Tissue Value: Roots vs. Whole Plant
  misc_feature: MA Experiment ID: 20000214 Result: Down-regulated in Transcription
  misc_feature: MA Experiment 20000214 PARAMETER Experiment Name: At_4deg_Cold_P Parameter: Timepoint (hr) Value: 6
  misc_feature: MA Experiment ID: 20000227 Result: Down-regulated in Transcription
  misc_feature: MA Experiment 20000227 PARAMETER Experiment Name: At_Root-Tips-vs-Tops_P Parameter: Tissue Value: Root Tips vs. Root Tops
  misc_feature: MA Experiment ID: 20000234 Result: Down-regulated in Transcription
  misc_feature: MA Experiment 20000234 PARAMETER Experiment Name: At_Siliques_P Parameter: Age (day) Value: 21
  misc_feature: MA Experiment 20000234 PARAMETER Experiment Name: At_Siliques_P Parameter: Organism Value: A. thaliana
  misc_feature: MA Experiment 20000234 PARAMETER Experiment Name: At_Siliques_P Parameter: Plant Line Value: WS
  misc_feature: MA Experiment 20000234 PARAMETER Experiment Name: At_Siliques_P Parameter: Tissue Value: Less Than 5mm Siliques vs. Whole Plant
  misc_feature: MA Experiment ID: 20000235 Result: Down-regulated in Transcription
  misc_feature: MA Experiment 20000235 PARAMETER Experiment Name: At_Siliques_P Parameter: Age (day) Value: 21
  misc_feature: MA Experiment 20000235 PARAMETER Experiment Name: At_Siliques_P Parameter: Organism Value: A. thaliana
  misc_feature: MA Experiment 20000235 PARAMETER Experiment Name: At_Siliques_P Parameter: Plant Line Value: WS
  misc_feature: MA Experiment 20000235 PARAMETER Experiment Name: At_Siliques_P Parameter: Tissue Value: 5-10mm Siliques vs. Whole Plant
  misc_feature: MA Experiment ID: 20000265 Result: Down-regulated in Transcription
  misc_feature: MA Experiment 20000265 PARAMETER Experiment Name: At_Open_Flower_P Parameter: Age (day) Value: 21
  misc_feature: MA Experiment 20000265 PARAMETER Experiment Name: At_Open_Flower_P Parameter: Plant Line Value: WS
  misc_feature: MA Experiment 20000265 PARAMETER Experiment Name: At_Open_Flower_P Parameter: Tissue Value: Closed Flower vs. Whole Plant
  misc_feature: MA Experiment ID: 20000439 Result: Up-regulated in Transcription
  misc_feature: MA Experiment 20000439 PARAMETER Experiment Name: At_Roots__P Parameter: Age (day) Value: 14 vs. 21
  misc_feature: MA Experiment 20000439 PARAMETER Experiment Name: At_Roots__P Parameter: Organism Value: A. thaliana
  misc_feature: MA Experiment 20000439 PARAMETER Experiment Name: At_Roots__P Parameter: Tissue Value: Roots vs. Whole Plant
  misc_feature: MA Experiment ID: 20000445 Result: Up-regulated in Transcription
  misc_feature: MA Experiment 20000445 PARAMETER Experiment Name: At_100uM_NAA__P Parameter: Age (day) Value: 14
  misc_feature: MA Experiment 20000445 PARAMETER Experiment Name: At_100uM_NAA__P Parameter: Organism Value: A. thaliana
  misc_feature: MA Experiment 20000445 PARAMETER Experiment Name: At_100uM_NAA__P Parameter: Plant Line Value: WS
  misc_feature: MA Experiment 20000445 PARAMETER Experiment Name: At_100uM_NAA__P Parameter: Timepoint (hr) Value: 6
  misc_feature: MA Experiment 20000445 PARAMETER Experiment Name: At_100uM_NAA__P Parameter: Tissue Value: Aerial
  misc_feature: MA Experiment 20000445 PARAMETER Experiment Name: At_100uM_NAA__P Parameter: Treatment Value: 100uM NAA vs. No Treatment
  misc_feature: MA Experiment ID: 20001554 Result: Up-regulated in Transcription
  misc_feature: MA Experiment 20001554 PARAMETER Experiment Name: At_Drought_Soil_Dry_P Parameter: Age (day) Value: 21
  misc_feature: MA Experiment 20001554 PARAMETER Experiment Name: At_Drought_Soil_Dry_P Parameter: Organism Value: A. thaliana
  misc_feature: MA Experiment 20001554 PARAMETER Experiment Name: At_Drought_Soil_Dry_P Parameter: Plant Line Value: WS
  misc_feature: MA Experiment 20001554 PARAMETER Experiment Name: At_Drought_Soil_Dry_P Parameter: Post Timepoint (hr) Value: None
  misc_feature: MA Experiment 20001554 PARAMETER Experiment Name: At_Drought_Soil_Dry_P Parameter: Post-Treatment Value: None
  misc_feature: MA Experiment 20001554 PARAMETER Experiment Name: At_Drought_Soil_Dry_P Parameter: Timepoint (day) Value: 7
  misc_feature: MA Experiment 20001554 PARAMETER Experiment Name: At_Drought_Soil_Dry_P Parameter: Treatment Value: Drought vs. No Drought
  misc_feature: MA Experiment ID: 20001555 Result: Up-regulated in Transcription
  misc_feature: MA Experiment 20001555 PARAMETER Experiment Name: At_Drought_Soil_Dry_P Parameter: Age (day) Value: 24
  misc_feature: MA Experiment 20001555 PARAMETER Experiment Name: At_Drought_Soil_Dry_P Parameter: Organism Value: A. thaliana
  misc_feature: MA Experiment 20001555 PARAMETER Experiment Name: At_Drought_Soil_Dry_P Parameter: Plant Line Value: WS
  misc_feature: MA Experiment 20001555 PARAMETER Experiment Name: At_Drought_Soil_Dry_P Parameter: Post Timepoint (hr) Value: None
  misc_feature: MA Experiment 20001555 PARAMETER Experiment Name: At_Drought_Soil_Dry_P Parameter: Post-Treatment Value: None
  misc_feature: MA Experiment 20001555 PARAMETER Experiment Name: At_Drought_Soil_Dry_P Parameter: Timepoint (day) Value: 10
  misc_feature: MA Experiment 20001555 PARAMETER Experiment Name: At_Drought_Soil_Dry_P Parameter: Treatment Value: Drought vs. No Drought
  misc_feature: MA Experiment ID: 20001559 Result: Up-regulated in Transcription
  misc_feature: MA Experiment 20001559 PARAMETER Experiment Name: At_Drought_Soil_Dry_P Parameter: Age (day) Value: 28
  misc_feature: MA Experiment 20001559 PARAMETER Experiment Name: At_Drought_Soil_Dry_P Parameter: Organism Value: A. thaliana
  misc_feature: MA Experiment 20001559 PARAMETER Experiment Name: At_Drought_Soil_Dry_P Parameter: Plant Line Value: WS
  misc_feature: MA Experiment 20001559 PARAMETER Experiment Name: At_Drought_Soil_Dry_P Parameter: Post Timepoint (hr) Value: 29
  misc_feature: MA Experiment 20001559 PARAMETER Experiment Name: At_Drought_Soil_Dry_P Parameter: Post-Treatment Value: Re-Water vs. No Drought
  misc_feature: MA Experiment 20001559 PARAMETER Experiment Name: At_Drought_Soil_Dry_P Parameter: Timepoint (day) Value: 14
  misc_feature: MA Experiment 20001559 PARAMETER Experiment Name: At_Drought_Soil_Dry_P Parameter: Treatment Value: Drought vs. No Drought
  misc_feature: MA Experiment ID: 20001560 Result: Down-regulated in Transcription
  misc_feature: MA Experiment 20001560 PARAMETER Experiment Name: At_Drought_Soil_Dry_P Parameter: Age (day) Value: 28
  misc_feature: MA Experiment 20001560 PARAMETER Experiment Name: At_Drought_Soil_Dry_P Parameter: Organism Value: A. thaliana
  misc_feature: MA Experiment 20001560 PARAMETER Experiment Name: At_Drought_Soil_Dry_P Parameter: Plant Line Value: WS
  misc_feature: MA Experiment 20001560 PARAMETER Experiment Name: At_Drought_Soil_Dry_P Parameter: Post Timepoint (hr) Value: None
  misc_feature: MA Experiment 20001560 PARAMETER Experiment Name: At_Drought_Soil_Dry_P Parameter: Post-Treatment Value: None
  misc_feature: MA Experiment 20001560 PARAMETER Experiment Name: At_Drought_Soil_Dry_P Parameter: Timepoint (day) Value: 14
  misc_feature: MA Experiment 20001560 PARAMETER Experiment Name: At_Drought_Soil_Dry_P Parameter: Treatment Value: Drought vs. No Drought
  misc_feature: MA Experiment ID: 20001911 Result: Down-regulated in Transcription
  misc_feature: MA Experiment 20001911 PARAMETER Experiment Name: At_Drought_Reproduction_P Parameter: Age (day) Value: 40
  misc_feature: MA Experiment 20001911 PARAMETER Experiment Name: At_Drought_Reproduction_P Parameter: Organism Value: A. thaliana
  misc_feature: MA Experiment 20001911 PARAMETER Experiment Name: At_Drought_Reproduction_P Parameter: Plant Line Value: WS
  misc_feature: MA Experiment 20001911 PARAMETER Experiment Name: At_Drought_Reproduction_P Parameter: Timepoint (day) Value: 10
  misc_feature: MA Experiment 20001911 PARAMETER Experiment Name: At_Drought_Reproduction_P Parameter: Tissue Value: Flowers
  misc_feature: MA Experiment 20001911 PARAMETER Experiment Name: At_Drought_Reproduction_P Parameter: Treatment Value: Drought vs. No Drought
ctctggctctctttctcttaacgtgatcataacgtgattcgaaaattggatatagataggtttcttgttggatcttgatccctctggaaaaggaggggagaatagcagttcatgatgggattttgtatctgcccgttggagtcacctgcgagattactatggagtacaagcttcttccgccataagatcatgatcttctaatccttcctacttcttcccatctttttaatcatcttctcgctatctctgcttcctctttctctctgtttcctctttctcagaactcagaagtagttgttgttttatttctgttgatcaaaaatggaatccaattcgtttttcttcgatccatctgcttcacacggcaacagcatgttcttccttgggaatctcaatcccgtcgtccaaggaggaggagcaagatcgatgatgaacatggaggaaacatcaaagcgaaggcccttctttagctcccctgaggatctctacgacgatgacttttacgacgaccagttgcctgaaaagaagcgtcgcctcactaccgaacaagtgcatctgctggagaaaagcttcgagacagagaacaagctagagcctgaacgcaagactcagcttgccaagaagcttggtctacagccaaggcaagtggctgtctggtttcagaatcgccgagctcgttggaaaacaaaacagcttgagagagactacgatcttctcaagtccacttacgaccaacttctttctaactacgactccatcgtcatggacaacgataagctcagatccgaggttacttccctgaccgaaaagcttcagggcaaacaagagacagctaatgaaccacctggtcaagtgcccgaaccaaaccaacttgatccggtttacattaatgcggcagcaatcaaaaccgaggaccggttaagttcagggagcgttgggagcgcggtactagacgacgacgcacctcaactactagacagctgtgactcttacttcccaagcatcgtacccatccaagacaacagcaacgccagtgatcatgacaatgaccggagctgtttcgccgacgtctttgtgcccaccacttcaccgtcgcacgatcatcacggtgaatcattggctttctggggatggccttagaaaaccactctgataataaatgtgtgtttatttaagttcaagagtcatcttcttgttgtttccatgttgacgataattgttgactcgtggaataattccgctgttcaacggtatttttatcagttgcattatatgcttttacg

SEQ ID NO: 44481 - protein, 272 aa, Arabidopsis thaliana
  peptide (1)..(272): Ceres Seq. ID no. 15174470
  misc_feature (68)..(122): Pfam Name: Homeobox domain Pfam Description: Homeobox domain
  misc_feature (36)..(173): Homolog of NCBI NO: 7446244 NR Description: homeotic protein - carrot
  misc_feature (32)..(242): Homolog of NCBI NO: 15148918 NR Description: homeodomain leucine zipper protein HDZ2
  misc_feature (11)..(168): Homolog of NCBI NO: 37573050 NR Description: homeodomain leucine zipper protein
  misc_feature (11)..(168): Homolog of NCBI NO: 5006855 NR Description: homeodomain leucine zipper protein [Oryza sativa]
  misc_feature (64)..(163): Homolog of NCBI NO: 166754 NR Description: homeobox protein
  misc_feature (63)..(269): Homolog of NCBI NO: 15148920 NR Description: homeodomain leucine zipper protein HDZ3
  misc_feature (1)..(225): Homolog of NCBI NO: 18034441 NR Description: homeodomain leucine zipper protein CPHB-5
  misc_feature (1)..(272): Homolog of NCBI NO: 15232122 NR Description: homeobox-leucine zipper protein HAT5 (HD-ZIP
MESNSFFFDPSASHGNSMFFLGNLNPVVQGGGARSMMNMEETSKRRPFFSSPEDLYDDDFYDDQLPEKKRRLTTEQVHLLEKSFETENKLEPERKTQLAKKLGLQPRQVAVWFQNRRARWKTKQLERDYDLLKSTYDQLLSNYDSIVMDNDKLRSEVTSLTEKLQGKQETANEPPGQVPEPNQLDPVYINAAAIKTEDRLSSGSVGSAVLDDDAPQLLDSCDSYFPSIVPIQDNSNASDHDNDRSCFADVFVPTTSPSHDHHGESLAFWGWP

SEQ ID NO: 44482 - protein, 255 aa, Arabidopsis thaliana
  peptide (1)..(255): Ceres Seq. ID no. 15174471
  misc_feature (51)..(105): Pfam Name: Homeobox domain Pfam Description: Homeobox domain
  misc_feature (19)..(156): Homolog of NCBI NO: 7446244 NR Description: homeotic protein - carrot
  misc_feature (15)..(225): Homolog of NCBI NO: 15148918 NR Description: homeodomain leucine zipper protein HDZ2
  misc_feature (1)..(151): Homolog of NCBI NO: 37573050 NR Description: homeodomain leucine zipper protein
  misc_feature (1)..(151): Homolog of NCBI NO: 5006855 NR Description: homeodomain leucine zipper protein [Oryza sativa]
  misc_feature (47)..(146): Homolog of NCBI NO: 166754 NR Description: homeobox protein
  misc_feature (46)..(252): Homolog of NCBI NO: 15148920 NR Description: homeodomain leucine zipper protein HDZ3
  misc_feature (1)..(208): Homolog of NCBI NO: 18034441 NR Description: homeodomain leucine zipper protein CPHB-5
  misc_feature (1)..(255): Homolog of NCBI NO: 15232122 NR Description: homeobox-leucine zipper protein HAT5 (HD-ZIP
MFFLGNLNPVVQGGGARSMMNMEETSKRRPFFSSPEDLYDDDFYDDQLPEKKRRLTTEQVHLLEKSFETENKLEPERKTQLAKKLGLQPRQVAVWFQNRRARWKTKQLERDYDLLKSTYDQLLSNYDSIVMDNDKLRSEVTSLTEKLQGKQETANEPPGQVPEPNQLDPVYINAAAIKTEDRLSSGSVGSAVLDDDAPQLLDSCDSYFPSIVPIQDNSNASDHDNDRSCFADVFVPTTSPSHDHHGESLAFWGWP

SEQ ID NO: 44483 - protein, 237 aa, Arabidopsis thaliana
  peptide (1)..(237): Ceres Seq. ID no. 15174472
  misc_feature (33)..(87): Pfam Name: Homeobox domain Pfam Description: Homeobox domain
  misc_feature (1)..(138): Homolog of NCBI NO: 7446244 NR Description: homeotic protein - carrot
  misc_feature (1)..(207): Homolog of NCBI NO: 15148918 NR Description: homeodomain leucine zipper protein HDZ2
  misc_feature (1)..(133): Homolog of NCBI NO: 37573050 NR Description: homeodomain leucine zipper protein
  misc_feature (1)..(133): Homolog of NCBI NO: 5006855 NR Description: homeodomain leucine zipper protein [Oryza sativa]
  misc_feature (29)..(128): Homolog of NCBI NO: 166754 NR Description: homeobox protein
  misc_feature (28)..(234): Homolog of NCBI NO: 15148920 NR Description: homeodomain leucine zipper protein HDZ3
  misc_feature (1)..(190): Homolog of NCBI NO: 18034441 NR Description: homeodomain leucine zipper protein CPHB-5
  misc_feature (1)..(237): Homolog of NCBI NO: 15232122 NR Description: homeobox-leucine zipper protein HAT5 (HD-ZIP
MMNMEETSKRRPFFSSPEDLYDDDFYDDQLPEKKRRLTTEQVHLLEKSFETENKLEPERKTQLAKKLGLQPRQVAVWFQNRRARWKTKQLERDYDLLKSTYDQLLSNYDSIVMDNDKLRSEVTSLTEKLQGKQETANEPPGQVPEPNQLDPVYINAAAIKTEDRLSSGSVGSAVLDDDAPQLLDSCDSYFPSIVPIQDNSNASDHDNDRSCFADVFVPTTSPSHDHHGESLAFWGWP

SEQ ID NO: 44484 - DNA, 602 bp, Arabidopsis thaliana
  misc_feature (1)..(602): Ceres Seq. ID no. 12466041
  misc_feature: MA Experiment ID: 20000180 Result: Up-regulated in Transcription
  misc_feature: MA Experiment 20000180 PARAMETER Experiment Name: At_Germinating_Seeds_P Parameter: Age (hr) Value: 24 vs. 0
  misc_feature: MA Experiment 20000180 PARAMETER Experiment Name: At_Germinating_Seeds_P Parameter: Tissue Value: Germinating Seeds
  misc_feature: MA Experiment ID: 20000184 Result: Up-regulated in Transcription
  misc_feature: MA Experiment 20000184 PARAMETER Experiment Name: At_Shoots__P Parameter: Age (day) Value: 7
  misc_feature: MA Experiment 20000184 PARAMETER Experiment Name: At_Shoots__P Parameter: Tissue Value: Shoots vs. Whole Plant
  misc_feature: MA Experiment ID: 20000185 Result: Down-regulated in Transcription
  misc_feature: MA Experiment 20000185 PARAMETER Experiment Name: At_Roots__P Parameter: Age (day) Value: 7 vs. 21
  misc_feature: MA Experiment 20000185 PARAMETER Experiment Name: At_Roots__P Parameter: Organism Value: A. thaliana
  misc_feature: MA Experiment 20000185 PARAMETER Experiment Name: At_Roots__P Parameter: Tissue Value: Roots vs. Whole Plant
  misc_feature: MA Experiment ID: 20000234 Result: Up-regulated in Transcription
  misc_feature: MA Experiment 20000234 PARAMETER Experiment Name: At_Siliques_P Parameter: Age (day) Value: 21
  misc_feature: MA Experiment 20000234 PARAMETER Experiment Name: At_Siliques_P Parameter: Organism Value: A. thaliana
  misc_feature: MA Experiment 20000234 PARAMETER Experiment Name: At_Siliques_P Parameter: Plant Line Value: WS
  misc_feature: MA Experiment 20000234 PARAMETER Experiment Name: At_Siliques_P Parameter: Tissue Value: Less Than 5mm Siliques vs. Whole Plant
  misc_feature: MA Experiment ID: 20000235 Result: Up-regulated in Transcription
  misc_feature: MA Experiment 20000235 PARAMETER Experiment Name: At_Siliques_P Parameter: Age (day) Value: 21
  misc_feature: MA Experiment 20000235 PARAMETER Experiment Name: At_Siliques_P Parameter: Organism Value: A. thaliana
  misc_feature: MA Experiment 20000235 PARAMETER Experiment Name: At_Siliques_P Parameter: Plant Line Value: WS
  misc_feature: MA Experiment 20000235 PARAMETER Experiment Name: At_Siliques_P Parameter: Tissue Value: 5-10mm Siliques vs. Whole Plant
  misc_feature: MA Experiment ID: 20000437 Result: Down-regulated in Transcription
  misc_feature: MA Experiment 20000437 PARAMETER Experiment Name: At_Drought_P Parameter: Age (day) Value: 8
  misc_feature: MA Experiment 20000437 PARAMETER Experiment Name: At_Drought_P Parameter: Organism Value: A. thaliana
  misc_feature: MA Experiment 20000437 PARAMETER Experiment Name: At_Drought_P Parameter: Plant Line Value: WS
  misc_feature: MA Experiment 20000437 PARAMETER Experiment Name: At_Drought_P Parameter: Timepoint (hr) Value: 24
  misc_feature: MA Experiment 20000437 PARAMETER Experiment Name: At_Drought_P Parameter: Tissue Value: Whole Plant
  misc_feature: MA Experiment 20000437 PARAMETER Experiment Name: At_Drought_P Parameter: Treatment Value: Drought vs. No Drought
  misc_feature: MA Experiment ID: 20000438 Result: Up-regulated in Transcription
  misc_feature: MA Experiment 20000438 PARAMETER Experiment Name: At_Shoots__P Parameter: Age (day) Value: 14
  misc_feature: MA Experiment 20000438 PARAMETER Experiment Name: At_Shoots__P Parameter: Tissue Value: Shoots vs. Whole Plant
  misc_feature: MA Experiment ID: 20000439 Result: Down-regulated in Transcription
  misc_feature: MA Experiment 20000439 PARAMETER Experiment Name: At_Roots__P Parameter: Age (day) Value: 14 vs. 21
  misc_feature: MA Experiment 20000439 PARAMETER Experiment Name: At_Roots__P Parameter: Organism Value: A. thaliana
  misc_feature: MA Experiment 20000439 PARAMETER Experiment Name: At_Roots__P Parameter: Tissue Value: Roots vs. Whole Plant
  misc_feature: MA Experiment ID: 20000460 Result: Down-regulated in Transcription
  misc_feature: MA Experiment 20000460 PARAMETER Experiment Name: At_10percent_PEG_P Parameter: Age (day) Value: 12
  misc_feature: MA Experiment 20000460 PARAMETER Experiment Name: At_10percent_PEG_P Parameter: Organism Value: A. thaliana
  misc_feature: MA Experiment 20000460 PARAMETER Experiment Name: At_10percent_PEG_P Parameter: Plant Line Value: WS
  misc_feature: MA Experiment 20000460 PARAMETER Experiment Name: At_10percent_PEG_P Parameter: Timepoint (day) Value: 12
  misc_feature: MA Experiment 20000460 PARAMETER Experiment Name: At_10percent_PEG_P Parameter: Tissue Value: Whole Plant
  misc_feature: MA Experiment 20000460 PARAMETER Experiment Name: At_10percent_PEG_P Parameter: Treatment Value: 10percent PEG vs. No Treatment
  misc_feature: MA Experiment ID: 20000794 Result: Down-regulated in Transcription
  misc_feature: MA Experiment 20000794 PARAMETER Experiment Name: At_Petals_P Parameter: Age (day) Value: 23-25 days
  misc_feature: MA Experiment 20000794 PARAMETER Experiment Name: At_Petals_P Parameter: Plant Line Value: WS
  misc_feature: MA Experiment 20000794 PARAMETER Experiment Name: At_Petals_P Parameter: Tissue Value: Petals vs. Whole plant
  misc_feature: MA Experiment ID: 20001247 Result: Up-regulated in Transcription
  misc_feature: MA Experiment 20001247 PARAMETER Experiment Name: At_Far-red-induction_P Parameter: Age (day) Value: 7
  misc_feature: MA Experiment 20001247 PARAMETER Experiment Name: At_Far-red-induction_P Parameter: Light Value: Far-red vs. White
  misc_feature: MA Experiment 20001247 PARAMETER Experiment Name: At_Far-red-induction_P Parameter: Organism Value: A. thaliana
  misc_feature: MA Experiment 20001247 PARAMETER Experiment Name: At_Far-red-induction_P Parameter: Plant Line Value: Columbia
  misc_feature: MA Experiment 20001247 PARAMETER Experiment Name: At_Far-red-induction_P Parameter: Timepoint (hr) Value: 1
  misc_feature: MA Experiment 20001247 PARAMETER Experiment Name: At_Far-red-induction_P Parameter: Tissue Value: Whole Plant
  misc_feature: MA Experiment ID: 20001248 Result: Down-regulated in Transcription
  misc_feature: MA Experiment 20001248 PARAMETER Experiment Name: At_Far-red-induction_P Parameter: Age (day) Value: 7
  misc_feature: MA Experiment 20001248 PARAMETER Experiment Name: At_Far-red-induction_P Parameter: Light Value: Far-red vs. White
  misc_feature: MA Experiment 20001248 PARAMETER Experiment Name: At_Far-red-induction_P Parameter: Organism Value: A. thaliana
  misc_feature: MA Experiment 20001248 PARAMETER Experiment Name: At_Far-red-induction_P Parameter: Plant Line Value: Columbia
  misc_feature: MA Experiment 20001248 PARAMETER Experiment Name: At_Far-red-induction_P Parameter: Timepoint (hr) Value: 4
  misc_feature: MA Experiment 20001248 PARAMETER Experiment Name: At_Far-red-induction_P Parameter: Tissue Value: Whole Plant
  misc_feature: MA Experiment ID: 20001559 Result: Down-regulated in Transcription
  misc_feature: MA Experiment 20001559 PARAMETER Experiment Name: At_Drought_Soil_Dry_P Parameter: Age (day) Value: 28
  misc_feature: MA Experiment 20001559 PARAMETER Experiment Name: At_Drought_Soil_Dry_P Parameter: Organism Value: A. thaliana
  misc_feature: MA Experiment 20001559 PARAMETER Experiment Name: At_Drought_Soil_Dry_P Parameter: Plant Line Value: WS
  misc_feature: MA Experiment 20001559 PARAMETER Experiment Name: At_Drought_Soil_Dry_P Parameter: Post Timepoint (hr) Value: 29
  misc_feature: MA Experiment 20001559 PARAMETER Experiment Name: At_Drought_Soil_Dry_P Parameter: Post-Treatment Value: Re-Water vs. No Drought
  misc_feature: MA Experiment 20001559 PARAMETER Experiment Name: At_Drought_Soil_Dry_P Parameter: Timepoint (day) Value: 14
  misc_feature: MA Experiment 20001559 PARAMETER Experiment Name: At_Drought_Soil_Dry_P Parameter: Treatment Value: Drought vs. No Drought
  misc_feature: MA Experiment ID: 20001757 Result: Up-regulated in Transcription
  misc_feature: MA Experiment 20001757 PARAMETER Experiment Name: At_50mM_NH4NO3_L-to-H_P Parameter: Timepoint (hr) Value: 6
  misc_feature: MA Experiment 20001757 PARAMETER Experiment Name: At_50mM_NH4NO3_L-to-H_P Parameter: Tissue Value: Leaf
  misc_feature: MA Experiment 20001757 PARAMETER Experiment Name: At_50mM_NH4NO3_L-to-H_P Parameter: Treatment Value: 50mM NH4NO3 vs 100mM Mannitol
ataatcctcaaaaatctcaactttatctcccaaaacacaaaacaaaaaaaaatggcttccactgctctctcaagcgccatcgtcggaacttcattcatccgtcgttccccagctccaatcagtctccgttcccttccatcagccaacacacaatccctcttcggtctcaaatcaggcaccgctcgtggtggacgtgtcacagccatggctacatacaaggtgagctagaggttgagtgtgacgacgacgtctacgttcttgatgctgctgaggaagctggaatcgatttgccttactcttgccgtgctggttcttgttcgagctgtgctggtaaagttgtgtctggatctgttgatcagtctgaccagagtttccttgatgatgaacagatttgtgaagggtttgttctcacttgtgctgcttaccctacctctgatgttaccattgaaacccacaaagaagaagacattgtttaagcctcacctactcaccagcttttgatggtttaaaaatcatgtctttataattgagtttgttgttacaaaactattgttatctgttgttattgttcctggtttggctcaccatcaatcgatgacatt

SEQ ID NO: 44485 - protein, 157 aa, Arabidopsis thaliana
  peptide (1)..(157): Ceres Seq. ID no. 12466042
  misc_feature (72)..(144): Pfam Name: 2Fe-2S iron-sulfur cluster binding domain Pfam Description: 2Fe-2S iron-sulfur cluster binding domain
  misc_feature (73)..(157): Homolog of NCBI NO: 631998 NR Description: ferredoxin [2Fe-2S] - parsley
  misc_feature (72)..(157): Homolog of NCBI NO: 119980 NR Description: FERREDOXIN
  misc_feature (72)..(156): Homolog of NCBI NO: 364015 NR Description: ferredoxin LFdA
  misc_feature (72)..(157): Homolog of NCBI NO: 119959 NR Description: FERREDOXIN, LEAF L-A
  misc_feature (72)..(157): Homolog of NCBI NO: 947124 NR Description: ferredoxin component a1
  misc_feature (72)..(157): Homolog of NCBI NO: 81707 NR Description: ferredoxin [2Fe-2S] A, leaf - radish
  misc_feature (73)..(156): Homolog of NCBI NO: 119937 NR Description: Ferredoxin I, chloroplast precursor (Fd I)
  misc_feature (72)..(127): Homolog of NCBI NO: 16604416 NR Description: At1g10960/T19D16_12 [Arabidopsis thaliana]
  misc_feature (72)..(157): Homolog of NCBI NO: 15220256 NR Description: ferredoxin precusor isolog
  misc_feature (72)..(157): Homolog of NCBI NO: 15219837 NR Description: ferrodoxin precursor
NPQKSQLYLPKHKTKKNGFHCSLKRHRRNFIHPSFPSSNQSPFPSISQHTIPLRSQIRHRSWWTCHSHGYIQGELEVECDDDVYVLDAAEEAGIDLPYSCRAGSCSSCAGKVVSGSVDQSDQSFLDDEQICEGFVLTCAAYPTSDVTIETHKEEDIV

SEQ ID NO: 44486 - protein, 79 aa, Arabidopsis thaliana
  peptide (1)..(79): Ceres Seq. ID no. 12466043
MLLRKLESICLTLAVLVLVRAVLVKLCLDLLISLTRVSLMMNRFVKGLFSLVLLTLPLMLPLKPTKKKTLFKPHLLTSF

SEQ ID NO: 44487 - DNA, 1381 bp, Arabidopsis thaliana
  misc_feature (1)..(1381): Ceres Seq. ID no. 12489347
  misc_feature: MA Experiment ID: 20000184 Result: Down-regulated in Transcription
  misc_feature: MA Experiment 20000184 PARAMETER Experiment Name: At_Shoots__P Parameter: Age (day) Value: 7
  misc_feature: MA Experiment 20000184 PARAMETER Experiment Name: At_Shoots__P Parameter: Tissue Value: Shoots vs. Whole Plant
  misc_feature: MA Experiment ID: 20001247 Result: Up-regulated in Transcription
  misc_feature: MA Experiment 20001247 PARAMETER Experiment Name: At_Far-red-induction_P Parameter: Age (day) Value: 7
  misc_feature: MA Experiment 20001247 PARAMETER Experiment Name: At_Far-red-induction_P Parameter: Light Value: Far-red vs. White
  misc_feature: MA Experiment 20001247 PARAMETER Experiment Name: At_Far-red-induction_P Parameter: Organism Value: A. thaliana
  misc_feature: MA Experiment 20001247 PARAMETER Experiment Name: At_Far-red-induction_P Parameter: Plant Line Value: Columbia
  misc_feature: MA Experiment 20001247 PARAMETER Experiment Name: At_Far-red-induction_P Parameter: Timepoint (hr) Value: 1
  misc_feature: MA Experiment 20001247 PARAMETER Experiment Name: At_Far-red-induction_P Parameter: Tissue Value: Whole Plant
  misc_feature: MA Experiment ID: 20001248 Result: Up-regulated in Transcription
  misc_feature: MA Experiment 20001248 PARAMETER Experiment Name: At_Far-red-induction_P Parameter: Age (day) Value: 7
  misc_feature: MA Experiment 20001248 PARAMETER Experiment Name: At_Far-red-induction_P Parameter: Light Value: Far-red vs. White
  misc_feature: MA Experiment 20001248 PARAMETER Experiment Name: At_Far-red-induction_P Parameter: Organism Value: A. thaliana
  misc_feature: MA Experiment 20001248 PARAMETER Experiment Name: At_Far-red-induction_P Parameter: Plant Line Value: Columbia
  misc_feature: MA Experiment 20001248 PARAMETER Experiment Name: At_Far-red-induction_P Parameter: Timepoint (hr) Value: 4
  misc_feature: MA Experiment 20001248 PARAMETER Experiment Name: At_Far-red-induction_P Parameter: Tissue Value: Whole Plant
  misc_feature: MA Experiment ID: 20001450 Result: Up-regulated in Transcription
  misc_feature: MA Experiment 20001450 PARAMETER Experiment Name: At_Far-red-induction_P Parameter: Age (day) Value: 7
  misc_feature: MA Experiment 20001450 PARAMETER Experiment Name: At_Far-red-induction_P Parameter: Light Value: Far-red vs. White
  misc_feature: MA Experiment 20001450 PARAMETER Experiment Name: At_Far-red-induction_P Parameter: Organism Value: A. thaliana
  misc_feature: MA Experiment 20001450 PARAMETER Experiment Name: At_Far-red-induction_P Parameter: Plant Line Value: Columbia
  misc_feature: MA Experiment 20001450 PARAMETER Experiment Name: At_Far-red-induction_P Parameter: Timepoint (hr) Value: 8
  misc_feature: MA Experiment 20001450 PARAMETER Experiment Name: At_Far-red-induction_P Parameter: Tissue Value: Whole Plant
  misc_feature: MA Experiment ID: 20001560 Result: Down-regulated in Transcription
  misc_feature: MA Experiment 20001560 PARAMETER Experiment Name: At_Drought_Soil_Dry_P Parameter: Age (day) Value: 28
  misc_feature: MA Experiment 20001560 PARAMETER Experiment Name: At_Drought_Soil_Dry_P Parameter: Organism Value: A. thaliana
  misc_feature: MA Experiment 20001560 PARAMETER Experiment Name: At_Drought_Soil_Dry_P Parameter: Plant Line Value: WS
  misc_feature: MA Experiment 20001560 PARAMETER Experiment Name: At_Drought_Soil_Dry_P Parameter: Post Timepoint (hr) Value: None
  misc_feature: MA Experiment 20001560 PARAMETER Experiment Name: At_Drought_Soil_Dry_P Parameter: Post-Treatment Value: None
  misc_feature: MA Experiment 20001560 PARAMETER Experiment Name: At_Drought_Soil_Dry_P Parameter: Timepoint (day) Value: 14
  misc_feature: MA Experiment 20001560 PARAMETER Experiment Name: At_Drought_Soil_Dry_P Parameter: Treatment Value: Drought vs. No Drought
  misc_feature: MA Experiment ID: 20001905 Result: Down-regulated in Transcription
  misc_feature: MA Experiment 20001905 PARAMETER Experiment Name: At_Drought_Reproduction_P Parameter: Age (day) Value: 40
  misc_feature: MA Experiment 20001905 PARAMETER Experiment Name: At_Drought_Reproduction_P Parameter: Organism Value: A. thaliana
  misc_feature: MA Experiment 20001905 PARAMETER Experiment Name: At_Drought_Reproduction_P Parameter: Plant Line Value: WS
  misc_feature: MA Experiment 20001905 PARAMETER Experiment Name: At_Drought_Reproduction_P Parameter: Timepoint (day) Value: 10
  misc_feature: MA Experiment 20001905 PARAMETER Experiment Name: At_Drought_Reproduction_P Parameter: Tissue Value: Rosettes
  misc_feature: MA Experiment 20001905 PARAMETER Experiment Name: At_Drought_Reproduction_P Parameter: Treatment Value: Drought vs. No Drought
aaaagctgtctctttagctctgacgttgtttcctgtcgaagtcgcagactcgtcatcacagctcaggcgagtaattctgagtttcttctatctacgcgcaatatctctcaaaggaggcctcttcaaaggtaccacaatcatatcctctcgtttctatctgaagaatcagagagaagagatatatagaggatgcctgtgatctccaaagcttcatctaccaccaccaattcatcgattccttcgtgttctaggattggaggtcagctttgtgtgtggcctggtttgagacaactttgcctcaggaaaagcttattatacggagtaatgtggttattatccatgccactgaaaacattgcgtggagctagaaaaactcttaagattactcacttttgtagcatttccaacatgccatcctcattaaaaatcgaactggtgccctgcagtaaggacaactatgcttatctgttgcacgatgaagacaccggaacagttggagtcgttgatccttctgaggctgcacctgttatagaagcattgagcaggaagaattggaatttaacttacattttgaatactcatcatcatgatgatcacattggggggaatgctgaattgaaagaaaggtatggcgcaaaggtgattggatcagctgtagataaagatcggattcctggaattgacatacttctgaaggatagtgataagtggatgtttgctggccatgaggttcggatacttgacactcctggccatacacaaggccatattagcttctactttcccgggtcagcgacaatattcacaggagacctgatatatagcttatcctgtggtaccctttcagaaggtacccctgagcagatgctttcatcactccaaaagatcgtgtctctaccagacgatacaaatatatactgcggccgtgaaaacacagcaggcaatctcaagtttgctctatccgtagaaccaaagaatgaaactcttcagtcctatgcaactcgagtcgcccatcttcgcagccaggggctcccatcgattccaacgactgtcaaggttgagaaagcgtgtaacccattcctcagaatatcgagcaaagatatccgaaaatctttaagcattccagactcagcaaccgaagctgaagcattgcgtcgtatacagagagccagagatcgtttctgaaaacttgggtatattttcttatttgtatagaaaaatttgcaagtcaatcatcagctgcaaagatcaatattttatatgttttgggctttcttcagttatcatttgaagttgtgtattcaacacaaaaaaatctaaatatttagtttaaactcaattattaaattatgagattttcaagtgtaatgaatgcttcaac

SEQ ID NO: 44488 - protein, 331 aa, Arabidopsis thaliana
  peptide (1)..(331): Ceres Seq. ID no. 12489348
  misc_feature (88)..(246): Pfam Name: Metallo-beta-lactamase superfamily Pfam Description: Metallo-beta-lactamase superfamily
  misc_feature (1)..(331): Homolog of NCBI NO: 21070362 NR Description: glyoxalase II [Pennisetum glaucum]
  misc_feature (1)..(331): Homolog of NCBI NO: 16209608 NR Description: glyoxalase II [Oryza sativa]
  misc_feature (21)..(331): Homolog of NCBI NO: 25406895 NR Description: hypothetical protein [imported] - Arabidopsis
  misc_feature (1)..(331): Homolog of NCBI NO: 18390616 NR Description: glyoxalase II, putative (hydroxyacylglutathione
  misc_feature (1)..(331): Homolog of NCBI NO: 15224661 NR Description: glyoxalase II, putative (hydroxyacylglutathione
  misc_feature (1)..(331): Homolog of NCBI NO: 30679573 NR Description: glyoxalase II, putative (hydroxyacylglutathione
  misc_feature (1)..(331): Homolog of NCBI NO: 30684920 NR Description: glyoxalase II, putative (hydroxyacylglutathione
  misc_feature (83)..(331): Homolog of NCBI NO: 25310959 NR Description: probable glyoxalase II [imported] - Arabidopsis
  misc_feature (1)..(331): Homolog of NCBI NO: 2570340 NR Description: glyoxalase II mitochondrial isozyme [Arabidopsis
  misc_feature (1)..(331): Homolog of NCBI NO: 18406237 NR Description: glyoxalase II (hydroxyacylglutathione
MPVISKASSTTTNSSIPSCSRIGGQLCVWPGLRQLCLRKSLLYGVMWLLSMPLKTLRGARKTLKITHFCSISNMPSSLKIELVPCSKDNYAYLLHDEDTGTVGVVDPSEAAPVIEALSRKNWNLTYILNTHHHDDHIGGNAELKERYGAKVIGSAVDKDRIPGIDILLKDSDKWMFAGHEVRILDTPGHTQGHISFYFPGSATIFTGDLIYSLSCGTLSEGTPEQMLSSLQKIVSLPDDTNIYCGRENTAGNLKFALSVEPKNETLQSYATRVAHLRSQGLPSIPTTVKVEKACNPFLRISSKDIRKSLSIPDSATEAEALRRIQRARDRF

SEQ ID NO: 44489 - protein, 286 aa, Arabidopsis thaliana
  peptide (1)..(286): Ceres Seq. ID no. 12489349
  misc_feature (43)..(201): Pfam Name: Metallo-beta-lactamase superfamily Pfam Description: Metallo-beta-lactamase superfamily
  misc_feature (1)..(286): Homolog of NCBI NO: 21070362 NR Description: glyoxalase II [Pennisetum glaucum]
  misc_feature (1)..(286): Homolog of NCBI NO: 16209608 NR Description: glyoxalase II [Oryza sativa]
  misc_feature (1)..(286): Homolog of NCBI NO: 25406895 NR Description: hypothetical protein [imported] - Arabidopsis
  misc_feature (1)..(286): Homolog of NCBI NO: 18390616 NR Description: glyoxalase II, putative (hydroxyacylglutathione
  misc_feature (1)..(286): Homolog of NCBI NO: 15224661 NR Description: glyoxalase II, putative (hydroxyacylglutathione
  misc_feature (1)..(286): Homolog of NCBI NO: 30679573 NR Description: glyoxalase II, putative (hydroxyacylglutathione
  misc_feature (1)..(286): Homolog of NCBI NO: 30684920 NR Description: glyoxalase II, putative (hydroxyacylglutathione
  misc_feature (38)..(286): Homolog of NCBI NO: 25310959 NR Description: probable glyoxalase II [imported] - Arabidopsis
  misc_feature (1)..(286): Homolog of NCBI NO: 2570340 NR Description: glyoxalase II mitochondrial isozyme [Arabidopsis
  misc_feature (1)..(286): Homolog of NCBI NO: 18406237 NR Description: glyoxalase II (hydroxyacylglutathione
MWLLSMPLKTLRGARKTLKITHFCSISNMPSSLKIELVPCSKDNYAYLLHDEDTGTVGVVDPSEAAPVIEALSRKNWNLTYILNTHHHDDHIGGNAELKERYGAKVIGSAVDKDRIPGIDILLKDSDKWMFAGHEVRILDTPGHTQGHISFYFPGSATIFTGDLIYSLSCGTLSEGTPEQMLSSLQKIVSLPDDTNIYCGRENTAGNLKFALSVEPKNETLQSYATRVAHLRSQGLPSIPTTVKVEKACNPFLRISSKDIRKSLSIPDSATEAEALRRIQRARDRF

SEQ ID NO: 44490 - protein, 281 aa, Arabidopsis thaliana
  peptide (1)..(281): Ceres Seq. ID no. 12489350
  misc_feature (38)..(196): Pfam Name: Metallo-beta-lactamase superfamily Pfam Description: Metallo-beta-lactamase superfamily
  misc_feature (1)..(281): Homolog of NCBI NO: 21070362 NR Description: glyoxalase II [Pennisetum glaucum]
  misc_feature (1)..(281): Homolog of NCBI NO: 16209608 NR Description: glyoxalase II [Oryza sativa]
  misc_feature (1)..(281): Homolog of NCBI NO: 25406895 NR Description: hypothetical protein [imported] - Arabidopsis
  misc_feature (1)..(281): Homolog of NCBI NO: 18390616 NR Description: glyoxalase II, putative (hydroxyacylglutathione
  misc_feature (1)..(281): Homolog of NCBI NO: 15224661 NR Description: glyoxalase II, putative (hydroxyacylglutathione
  misc_feature (1)..(281): Homolog of NCBI NO: 30679573 NR Description: glyoxalase II, putative (hydroxyacylglutathione
  misc_feature (1)..(281): Homolog of NCBI NO: 30684920 NR Description: glyoxalase II, putative (hydroxyacylglutathione
  misc_feature (33)..(281): Homolog of NCBI NO: 25310959 NR Description: probable glyoxalase II [imported] - Arabidopsis
  misc_feature (1)..(281): Homolog of NCBI NO: 2570340 NR Description: glyoxalase II mitochondrial isozyme [Arabidopsis
  misc_feature (1)..(281): Homolog of NCBI NO: 18406237 NR Description: glyoxalase II (hydroxyacylglutathione
MPLKTLRGARKTLKITHFCSISNMPSSLKIELVPCSKDNYAYLLHDEDTGTVGVVDPSEAAPVIEALSRKNWNLTYILNTHHHDDHIGGNAELKERYGAKVIGSAVDKDRIPGIDILLKDSDKWMFAGHEVRILDTPGHTQGHISFYFPGSATIFTGDLIYSLSCGTLSEGTPEQMLSSLQKIVSLPDDTNIYCGRENTAGNLKFALSVEPKNETLQSYATRVAHLRSQGLPSIPTTVKVEKACNPFLRISSKDIRKSLSIPDSATEAEALRRIQRARDRF

SEQ ID NO: 44491 - DNA, 1062 bp, Arabidopsis thaliana
  misc_feature (1)..(1062): Ceres Seq. ID no. 13509522
  misc_feature: MA Experiment ID: 108434 Result: Down-regulated in Transcription
  misc_feature: MA Experiment 108434 PARAMETER Experiment Name: At_Root_Tips_cDNA_P Parameter: Tissue Value: Root Tips
  misc_feature: MA Experiment ID: 108469 Result: Up-regulated in Transcription
  misc_feature: MA Experiment ID: 108576 Result: Up-regulated in Transcription
  misc_feature: MA Experiment 108576 PARAMETER Experiment Name: At_42deg_Heat_cDNA_P Parameter: Temperature (deg C) Value: 42 vs. 22
  misc_feature: MA Experiment 108576 PARAMETER Experiment Name: At_42deg_Heat_cDNA_P Parameter: Timepoint (hr) Value: 1
  misc_feature: MA Experiment 108576 PARAMETER Experiment Name: At_42deg_Heat_cDNA_P Parameter: Tissue Value: Aerial
  misc_feature: MA Experiment ID: 108595 Result: Up-regulated in Transcription
  misc_feature: MA Experiment 108595 PARAMETER Experiment Name: At_Ler-pi_Ovule_cDNA_P Parameter: Plant Line Value: null
  misc_feature: MA Experiment ID: 20000030 Result: Down-regulated in Transcription
  misc_feature: MA Experiment 20000030 PARAMETER Experiment Name: At_CS6630_Roots_cDNA_P Parameter: Plant Line Value: CS6630 vs. WS
  misc_feature: MA Experiment 20000030 PARAMETER Experiment Name: At_CS6630_Roots_cDNA_P Parameter: Tissue Value: Roots
  misc_feature: MA Experiment ID: 20000224 Result: Down-regulated in Transcription
  misc_feature: MA Experiment ID: 20000314 Result: Down-regulated in Transcription
  misc_feature: MA Experiment 20000314 PARAMETER Experiment Name: At_14day_Shoots-Roots_Sub_P Parameter: Age (day) Value: 14
  misc_feature: MA Experiment 20000314 PARAMETER Experiment Name: At_14day_Shoots-Roots_Sub_P Parameter: Organism Value: A. thaliana
  misc_feature: MA Experiment 20000314 PARAMETER Experiment Name: At_14day_Shoots-Roots_Sub_P Parameter: Plant Line Value: WS
  misc_feature: MA Experiment 20000314 PARAMETER Experiment Name: At_14day_Shoots-Roots_Sub_P Parameter: Tissue Value: Roots vs. Whole Plant
  misc_feature: MA Experiment ID: 20000315 Result: Down-regulated in Transcription
  misc_feature: MA Experiment 20000315 PARAMETER Experiment Name: At_14day_Shoots-Roots_Sub_P Parameter: Age (day) Value: 14
  misc_feature: MA Experiment 20000315 PARAMETER Experiment Name: At_14day_Shoots-Roots_Sub_P Parameter: Organism Value: A. thaliana
  misc_feature: MA Experiment 20000315 PARAMETER Experiment Name: At_14day_Shoots-Roots_Sub_P Parameter: Plant Line Value: WS
  misc_feature: MA Experiment 20000315 PARAMETER Experiment Name: At_14day_Shoots-Roots_Sub_P Parameter: Tissue Value: Shoots vs. Whole Plant
  misc_feature: MA Experiment ID: 20000347 Result: Up-regulated in Transcription
  misc_feature: MA Experiment 20000347 PARAMETER Experiment Name: At_2mM_SA_Sub_P Parameter: Age (day) Value: 14
  misc_feature: MA Experiment 20000347 PARAMETER Experiment Name: At_2mM_SA_Sub_P Parameter: Organism Value: A. thaliana
  misc_feature: MA Experiment 20000347 PARAMETER Experiment Name: At_2mM_SA_Sub_P Parameter: Plant Line Value: WS
  misc_feature: MA Experiment 20000347 PARAMETER Experiment Name: At_2mM_SA_Sub_P Parameter: Timepoint (hr) Value: 6
  misc_feature: MA Experiment 20000347 PARAMETER Experiment Name: At_2mM_SA_Sub_P Parameter: Tissue Value: Aerial
  misc_feature: MA Experiment 20000347 PARAMETER Experiment Name: At_2mM_SA_Sub_P Parameter: Treatment Value: 2mM SA vs. No Treatment
  misc_feature: MA Experiment ID: 20000355 Result: Down-regulated in Transcription
  misc_feature: MA Experiment 20000355 PARAMETER Experiment Name: At_Siliques_Sub_P Parameter: Age (day) Value: 21
  misc_feature: MA Experiment 20000355 PARAMETER Experiment Name: At_Siliques_Sub_P Parameter: Organism Value: A. thaliana
  misc_feature: MA Experiment 20000355 PARAMETER Experiment Name: At_Siliques_Sub_P Parameter: Plant Line Value: WS
  misc_feature: MA Experiment 20000355 PARAMETER Experiment Name: At_Siliques_Sub_P Parameter: Tissue Value: Less Than 5mm Siliques vs. Whole Plant
  misc_feature: MA Experiment ID: 20000440 Result: Down-regulated in Transcription
  misc_feature: MA Experiment 20000440 PARAMETER Experiment Name: At_Closed-Flower__Sub_P Parameter: Tissue Value: Closed Flower vs. Whole Plant
aaagaggaaaatcccaacaataaagagcaaaagatcttacagctcataatatttcgttaattatcaaattgctaataggtataaagttttgtaatttacttttcaggagaaaaaaatgggtcaagctttgggttgtattcaagttgatcagtcgaatgtagcaatcaaagagacttttgggaaattcgacgaagttcttgagccgggttgtcactgtttgccatggtgtttgggaagtcaagtcgctggtcacctttctttacgtgttcaacagctcgatgttcgctgcgagacaaagactaaggataatgtgtttgtcacggttgttgcttccattcaataccgtgccttagcggagagtgctcaagatgctttttacaagctcagcaacacgaggaatcagattcaagcttatgtctttgatgtgatccgagcaagtgtacctaagctggatctagactctacctttgagcaaaagaatgacattgcaaaaaccgttgagactgagctcgaaaaggctatgtcgcattacgggtatgagattgttcagacactgattgtggatatcgagcctgatgtgcacgtcaagagggcaatgaatgagatcaatgctgcttctagaatgagagaggcagcgagtgagaaagctgaggcagagaagattctgcagatcaagcgtgctgagggagaagctgaatcgaaatacctttcaggtatgggtatagcccgtcagagacaagccattgtggacggtctgagaaacagcgtcctcgccttctccgagtctgttccaggaacatcttccaaagacgtgatggatatggttcttgtgactcagtactttgacacattgaaggaaattggtgcttcttcgaagtcaaactcggtgttcataccgcacggtccaggcgctgttagggacattgcttcacagatcagggatggtcttcttcagggtaactctgctgctgagtagagaaatgtctcaaagtacaaaaaggctttttcagagttttagagttgtgttactacttgctactcagtttatcttttagcggttgg

SEQ ID NO: 44492 - protein, 286 aa, Arabidopsis thaliana; identical to SEQ ID NO: 23094
  peptide (1)..(286): Ceres Seq. ID no. 13509523
  misc_feature (1)..(282): Homolog of NCBI NO: 13194676 NR Description: hypersensitivity-induced response-like protein
  misc_feature (1)..(282): Homolog of NCBI NO: 7716468 NR Description: hypersensitive-induced response protein [Zea mays]
  misc_feature (1)..(282): Homolog of NCBI NO: 9998903 NR Description: putative membrane protein [Zea mays]
  misc_feature (1)..(283): Homolog of NCBI NO: 28476864 NR Description: hypersensitive-induced reaction protein 2
  misc_feature (1)..(280): Homolog of NCBI NO: 14150732 NR Description: hypersensitive-induced response protein [Oryza
  misc_feature (1)..(281): Homolog of NCBI NO: 23345042 NR Description: hypersensitive-induced reaction protein 1
  misc_feature (1)..(284): Homolog of NCBI NO: 15241939 NR Description: hypersensitive-induced response protein
  misc_feature (1)..(282): Homolog of NCBI NO: 7716466 NR Description: hypersensitive-induced response protein [Zea mays]
  misc_feature (1)..(284): Homolog of NCBI NO: 3928150 NR Description: hypothetical protein [Cicer arietinum]
  misc_feature (1)..(286): Homolog of NCBI NO: 15222481 NR Description: expressed protein [Arabidopsis thaliana]

SEQ ID NO: 44493 - protein, 151 aa, Arabidopsis thaliana; identical to SEQ ID NO: 23095
  peptide (1)..(151): Ceres Seq. ID no. 13509524
  misc_feature (1)..(147): Homolog of NCBI NO: 13194676 NR Description: hypersensitivity-induced response-like protein
  misc_feature (1)..(147): Homolog of NCBI NO: 7716468 NR Description: hypersensitive-induced response protein [Zea mays]
  misc_feature (1)..(147): Homolog of NCBI NO: 9998903 NR Description: putative membrane protein [Zea mays]
  misc_feature (1)..(148): Homolog of NCBI NO: 28476864 NR Description: hypersensitive-induced reaction protein 2
  misc_feature (1)..(145): Homolog of NCBI NO: 14150732 NR Description: hypersensitive-induced response protein [Oryza
  misc_feature (1)..(146): Homolog of NCBI NO: 23345042 NR Description: hypersensitive-induced reaction protein 1
  misc_feature (1)..(149): Homolog of NCBI NO: 15241939 NR Description: hypersensitive-induced response protein
  misc_feature (1)..(147): Homolog of NCBI NO: 7716466 NR Description: hypersensitive-induced response protein [Zea mays]
  misc_feature (1)..(149): Homolog of NCBI NO: 3928150 NR Description: hypothetical protein [Cicer arietinum]
  misc_feature (1)..(151): Homolog of NCBI NO: 15222481 NR Description: expressed protein [Arabidopsis thaliana]

SEQ ID NO: 44494 - DNA, 1602 bp, Arabidopsis thaliana
  misc_feature (1)..(1602): Ceres Seq. ID no. 15174457
  misc_feature: MA Experiment ID: 20000171 Result: Up-regulated in Transcription
  misc_feature: MA Experiment 20000171 PARAMETER Experiment Name: At_42deg_Heat_P Parameter: Age (day) Value: 14
  misc_feature: MA Experiment 20000171 PARAMETER Experiment Name: At_42deg_Heat_P Parameter: Organism Value: A. thaliana
  misc_feature: MA Experiment 20000171 PARAMETER Experiment Name: At_42deg_Heat_P Parameter: Plant Line Value: WS
  misc_feature: MA Experiment 20000171 PARAMETER Experiment Name: At_42deg_Heat_P Parameter: Temperature (deg C) Value: 42 vs. 22
  misc_feature: MA Experiment 20000171 PARAMETER Experiment Name: At_42deg_Heat_P Parameter: Timepoint (hr) Value: 1
  misc_feature: MA Experiment 20000171 PARAMETER Experiment Name: At_42deg_Heat_P Parameter: Tissue Value: Aerial
  misc_feature: MA Experiment ID: 20000265 Result: Up-regulated in Transcription
  misc_feature: MA Experiment 20000265 PARAMETER Experiment Name: At_Open_Flower_P Parameter: Age (day) Value: 21
  misc_feature: MA Experiment 20000265 PARAMETER Experiment Name: At_Open_Flower_P Parameter: Plant Line Value: WS
  misc_feature: MA Experiment 20000265 PARAMETER Experiment Name: At_Open_Flower_P Parameter: Tissue Value: Closed Flower vs. Whole Plant
  misc_feature: MA Experiment ID: 20000286 Result: Up-regulated in Transcription
  misc_feature: MA Experiment 20000286 PARAMETER Experiment Name: At_Open_Flower_P Parameter: Age (day) Value: 21
  misc_feature: MA Experiment 20000286 PARAMETER Experiment Name: At_Open_Flower_P Parameter: Plant Line Value: WS
  misc_feature: MA Experiment 20000286 PARAMETER Experiment Name: At_Open_Flower_P Parameter: Tissue Value: Half Open vs. Whole Plant
  misc_feature: MA Experiment ID: 20000794 Result: Up-regulated in Transcription
  misc_feature: MA Experiment 20000794 PARAMETER Experiment Name: At_Petals_P Parameter: Age (day) Value: 23-25 days
  misc_feature: MA Experiment 20000794 PARAMETER Experiment Name: At_Petals_P Parameter: Plant Line Value: WS
  misc_feature: MA Experiment 20000794 PARAMETER Experiment Name: At_Petals_P Parameter: Tissue Value: Petals vs. Whole plant
  misc_feature: MA Experiment ID: 20001910 Result: Up-regulated in Transcription
  misc_feature: MA Experiment 20001910 PARAMETER Experiment Name: At_Drought_Reproduction_P Parameter: Age (day) Value: 37
  misc_feature: MA Experiment 20001910 PARAMETER Experiment Name: At_Drought_Reproduction_P Parameter: Organism Value: A. thaliana
  misc_feature: MA Experiment 20001910 PARAMETER Experiment Name: At_Drought_Reproduction_P Parameter: Plant Line Value: WS
  misc_feature: MA Experiment 20001910 PARAMETER Experiment Name: At_Drought_Reproduction_P Parameter: Timepoint (day) Value: 7
  misc_feature: MA Experiment 20001910 PARAMETER Experiment Name: At_Drought_Reproduction_P Parameter: Tissue Value: Flowers
  misc_feature: MA Experiment 20001910 PARAMETER Experiment Name: At_Drought_Reproduction_P Parameter: Treatment Value: Drought vs. No Drought
  misc_feature: MA Experiment ID: 20001911 Result: Up-regulated in Transcription
  misc_feature: MA Experiment 20001911 PARAMETER Experiment Name: At_Drought_Reproduction_P Parameter: Age (day) Value: 40
  misc_feature: MA Experiment 20001911 PARAMETER Experiment Name: At_Drought_Reproduction_P Parameter: Organism Value: A. thaliana
  misc_feature: MA Experiment 20001911 PARAMETER Experiment Name: At_Drought_Reproduction_P Parameter: Plant Line Value: WS
  misc_feature: MA Experiment 20001911 PARAMETER Experiment Name: At_Drought_Reproduction_P Parameter: Timepoint (day) Value: 10
  misc_feature: MA Experiment 20001911 PARAMETER Experiment Name: At_Drought_Reproduction_P Parameter: Tissue Value: Flowers
  misc_feature: MA Experiment 20001911 PARAMETER Experiment Name: At_Drought_Reproduction_P Parameter: Treatment Value: Drought vs. No Drought
aaagaaaaagtctattagagatcgatgaaggattaaagacgatcaataacggagatagagatcgattacaataatggatgaagagtatgatgtgattgtccttgggactggtcttaaggagtgtatccttagtggcctcctctctgtcgatggcctcaaggtactacatatggatagaaacgactactatggaggagaatcatcctctcttaacctcactcagctatggaagcgttttaggggaagtgacactcctgaagaaaatcttggagcaagcagagaatacaatgtcgatatgatcccaaagtttataatggctaatggactccttgttcaaaccctaatccacaccgatgttaccaagtatcttaactttaaggccgttgatggtagctttgtctacaagaaaggcaagatctacaaagtcccagccactgatgtggaagccctgaaatcgccattgatgggtcttttcgagaagcgacgtgcgagaaagttctttatctatgtgcaagactatgatgagaaggatcctaagtctcacgaaggacttgacctaagcaaagtcactgctagagagatcatctcaaagtatggacttgaagatgacacaatcgacttcatagggcatgccttagcgcttcacaacgatgatgactacttggatcaacccgccattgattttgttaagagaatcaagctctatgcggagtctctggctcgattccaaggaggatccccttacatctatccgttgtacggtctaggagagctgccacaggcttttgcacgtttgagtgctgtgtacggtgggacttacatgctcaacaagcccgaatgcaaggtagagtttgatggttctggaaaagctattggtgtcacttctgcaggagaaactgctaaatgcaagaaagttgtatgtgatccttcttacctgtctgaaaaggttaagaaagttggaaaagtaactcgagcggtgtgtataatgagccatcctattccagacacaaatgatgctcactcggttcaaatcattcttcctcagaagcaactcggtcgcaaatcagacatgtacttgttctgttgctcatacgctcacaatgtggcaccaaagggcaaatacatagcttttgtctctgcagaagctgaaactgacaatccagaagaggagcttaaacccggaatcgaattgcttggacctactgatgagatcttctatcattcttatgacacatacgttccaaccaatattcaagaagaagataactgtttcatctctgctacttacgatgcaacaacacatttcgagagtacagttgtagatgtacttgacatgtacaccaagatcactggaaagactcttgatttgtctgtggacttgagtgctgcaagtgctgctgcagagaattgataacttgcgtttttccttccgctgagtggttttaaattgcaagtgattgtttatttttctattggataaagacataaagttcaaagtaacacaagtttgcgtttttgttcatcttacttaaaacactggttgattttgctttcatttgtattttttttttttgagaaatacttacctttctaagtttattt

SEQ ID NO: 44495 - protein, 445 aa, Arabidopsis thaliana
  peptide (1)..(445): Ceres Seq. ID no. 15174458
  misc_feature (1)..(438): Pfam Name: GDP dissociation inhibitor Pfam Description: GDP dissociation inhibitor
  misc_feature (1)..(444): Homolog of NCBI NO: 15224814 NR Description: GDP dissociation inhibitor [Arabidopsis thaliana]
  misc_feature (1)..(445): Homolog of NCBI NO: 33146460 NR Description: putative GDP dissociation inhibitor
  misc_feature (1)..(444): Homolog of NCBI NO: 15232210 NR Description: Rab GDP dissociation inhibitor [Arabidopsis
  misc_feature (1)..(444): Homolog of NCBI NO: 7489479 NR Description: GDP dissociation inhibitor protein - rice
  misc_feature (1)..(442): Homolog of NCBI NO: 7489478 NR Description: GDP dissociation inhibitor protein - rice
  misc_feature (1)..(444): Homolog of NCBI NO: 40204891 NR Description: GDP dissociation inhibitor [Medicago truncatula]
  misc_feature (1)..(444): Homolog of NCBI NO: 3175990 NR Description: GDP dissociation inhibitor [Cicer arietinum]
  misc_feature (8)..(444): Homolog of NCBI NO: 8439465 NR Description: GDP dissociation inhibitor [Lycopersicon
  misc_feature (1)..(444): Homolog of NCBI NO: 7489133 NR Description: GDP dissociation inhibitor - common tobacco
  misc_feature (1)..(445): Homolog of NCBI NO: 15242440 NR Description: GDP dissociation inhibitor [Arabidopsis thaliana]
MDEEYDVIVLGTGLKECILSGLLSVDGLKVLHMDRNDYYGGESSSLNLTQLWKRFRGSDTPEENLGASREYNVDMIPKFIMANGLLVQTLIHTDVTKYLNFKAVDGSFVYKKGKIYKVPATDVEALKSPLMGLFEKRRARKFFIYVQDYDEKDPKSHEGLDLSKVTAREIISKYGLEDDTIDFIGHALALHNDDDYLDQPAIDFVKRIKLYAESLARFQGGSPYIYPLYGLGELPQAFARLSAVYGGTYMLNKPECKVEFDGSGKAIGVTSAGETAKCKKVVCDPSYLSEKVKKVGKVTRAVCIMSHPIPDTNDAHSVQIILPQKQLGRKSDMYLFCCSYAHNVAPKGKYIAFVSAEAETDNPEEELKPGIELLGPTDEIFYHSYDTYVPTNIQEEDNCFISATYDATTHFESTVVDVLDMYTKITGKTLDLSVDLSAASAAAEN

SEQ ID NO: 44496 - protein, 413 aa, Arabidopsis thaliana
  peptide (1)..(413): Ceres Seq. ID no. 15174459
  misc_feature (1)..(406): Pfam Name: GDP dissociation inhibitor Pfam Description: GDP dissociation inhibitor
  misc_feature (1)..(412): Homolog of NCBI NO: 15224814 NR Description: GDP dissociation inhibitor [Arabidopsis thaliana]
  misc_feature (1)..(413): Homolog of NCBI NO: 33146460 NR Description: putative GDP dissociation inhibitor
  misc_feature (1)..(412): Homolog of NCBI NO: 15232210 NR Description: Rab GDP dissociation inhibitor [Arabidopsis
  misc_feature (1)..(412): Homolog of NCBI NO: 7489479 NR Description: GDP dissociation inhibitor protein - rice
  misc_feature (1)..(410): Homolog of NCBI NO: 7489478 NR Description: GDP dissociation inhibitor protein - rice
  misc_feature (1)..(412): Homolog of NCBI NO: 40204891 NR Description: GDP dissociation inhibitor [Medicago truncatula]
  misc_feature (1)..(412): Homolog of NCBI NO: 3175990 NR Description: GDP dissociation inhibitor [Cicer arietinum]
  misc_feature (1)..(412): Homolog of NCBI NO: 8439465 NR Description: GDP dissociation inhibitor [Lycopersicon
  misc_feature (1)..(412): Homolog of NCBI NO: 7489133 NR Description: GDP dissociation inhibitor - common tobacco
  misc_feature (1)..(413): Homolog of NCBI NO: 15242440 NR Description: GDP dissociation inhibitor [Arabidopsis thaliana]
MDRNDYYGGESSSLNLTQLWKRFRGSDTPEENLGASREYNVDMIPKFIMANGLLVQTLIHTDVTKYLNFKAVDGSFVYKKGKIYKVPATDVEALKSPLMGLFEKRRARKFFIYVQDYDEKDPKSHEGLDLSKVTAREIISKYGLEDDTIDFIGHALALHNDDDYLDQPAIDFVKRIKLYAESLARFQGGSPYIYPLYGLGELPQAFARLSAVYGGTYMLNKPECKVEFDGSGKAIGVTSAGETAKCKKVVCDPSYLSEKVKKVGKVTRAVCIMSHPIPDTNDAHSVQIILPQKQLGRKSDMYLFCCSYAHNVAPKGKYIAFVSAEAETDNPEEELKPGIELLGPTDEIFYHSYDTYVPTNIQEEDNCFISATYDATTHFESTVVDVLDMYTKITGKTLDLSVDLSAASAAAEN

SEQ ID NO: 44497 - protein, 371 aa, Arabidopsis thaliana
  peptide (1)..(371): Ceres Seq. ID no. 15174460
  misc_feature (1)..(364): Pfam Name: GDP dissociation inhibitor Pfam Description: GDP dissociation inhibitor
  misc_feature (1)..(370): Homolog of NCBI NO: 15224814 NR Description: GDP dissociation inhibitor [Arabidopsis thaliana]
  misc_feature (1)..(371): Homolog of NCBI NO: 33146460 NR Description: putative GDP dissociation inhibitor
  misc_feature (1)..(370): Homolog of NCBI NO: 15232210 NR Description: Rab GDP dissociation inhibitor [Arabidopsis
  misc_feature (1)..(370): Homolog of NCBI NO: 7489479 NR Description: GDP dissociation inhibitor protein - rice
  misc_feature (1)..(368): Homolog of NCBI NO: 7489478 NR Description: GDP dissociation inhibitor protein - rice
  misc_feature (1)..(370): Homolog of NCBI NO: 40204891 NR Description: GDP dissociation inhibitor [Medicago truncatula]
  misc_feature (1)..(370): Homolog of NCBI NO: 3175990 NR Description: GDP dissociation inhibitor [Cicer arietinum]
  misc_feature (1)..(370): Homolog of NCBI NO: 8439465 NR Description: GDP dissociation inhibitor [Lycopersicon
  misc_feature (1)..(370): Homolog of NCBI NO: 7489133 NR Description: GDP dissociation inhibitor - common tobacco
  misc_feature (1)..(371): Homolog of NCBI NO: 15242440 NR Description: GDP dissociation inhibitor [Arabidopsis thaliana]
MIPKFIMANGLLVQTLIHTDVTKYLNFKAVDGSFVYKKGKIYKVPATDVEALKSPLMGLFEKRRARKFFIYVQDYDEKDPKSHEGLDLSKVTAREIISKYGLEDDTIDFIGHALALHNDDDYLDQPAIDFVKRIKLYAESLARFQGGSPYIYPLYGLGELPQAFARLSAVYGGTYMLNKPECKVEFDGSGKAIGVTSAGETAKCKKVVCDPSYLSEKVKKVGKVTRAVCIMSHPIPDTNDAHSVQIILPQKQLGRKSDMYLFCCSYAHNVAPKGKYIAFVSAEAETDNPEEELKPGIELLGPTDEIFYHSYDTYVPTNIQEEDNCFISATYDATTHFESTVVDVLDMYTKITGKTLDLSVDLSAASAAAEN

SEQ ID NO: 44498 - DNA, 1620 bp, Arabidopsis thaliana
  misc_feature (1)..(1620): Ceres Seq. ID no. 14306838
  misc_feature: MA Experiment ID: 108667 Result: Up-regulated in Transcription
  misc_feature: MA Experiment 108667 PARAMETER Experiment Name: At_2mM_SA_cDNA_P Parameter: Plant Line Value: WS
  misc_feature: MA Experiment 108667 PARAMETER Experiment Name: At_2mM_SA_cDNA_P Parameter: Timepoint (hr) Value: 1
  misc_feature: MA Experiment 108667 PARAMETER Experiment Name: At_2mM_SA_cDNA_P Parameter: Treatment Value: 2mM SA vs. No Treatment
  misc_feature: MA Experiment ID: 20000087 Result: Down-regulated in Transcription
  misc_feature: MA Experiment 20000087 PARAMETER Experiment Name: At_100uM_ABA_Mutants_cDNA_P Parameter: Plant Line Value: WS
  misc_feature: MA Experiment 20000087 PARAMETER Experiment Name: At_100uM_ABA_Mutants_cDNA_P Parameter: Timepoint (hr) Value: 6
  misc_feature: MA Experiment 20000087 PARAMETER Experiment Name: At_100uM_ABA_Mutants_cDNA_P Parameter: Tissue Value: Aerial
  misc_feature: MA Experiment 20000087 PARAMETER Experiment Name: At_100uM_ABA_Mutants_cDNA_P Parameter: Treatment Value: 100uM ABA vs. No Treatment
  misc_feature: MA Experiment ID: 20000112 Result: Up-regulated in Transcription
  misc_feature: MA Experiment 20000112 PARAMETER Experiment Name: At_42deg_Heat_cDNA_P Parameter: Temperature (deg C) Value: 42 vs. 22
  misc_feature: MA Experiment 20000112 PARAMETER Experiment Name: At_42deg_Heat_cDNA_P Parameter: Timepoint (hr) Value: 2
  misc_feature: MA Experiment 20000112 PARAMETER Experiment Name: At_42deg_Heat_cDNA_P Parameter: Tissue Value: Aerial
  misc_feature: MA Experiment ID: 20000113 Result: Up-regulated in Transcription
  misc_feature: MA Experiment 20000113 PARAMETER Experiment Name: At_42deg_Heat_cDNA_P Parameter: Temperature (deg C) Value: 42 vs. 22
  misc_feature: MA Experiment 20000113 PARAMETER Experiment Name: At_42deg_Heat_cDNA_P Parameter: Timepoint (hr) Value: 8
  misc_feature: MA Experiment 20000113 PARAMETER Experiment Name: At_42deg_Heat_cDNA_P Parameter: Tissue Value: Aerial
  misc_feature: MA Experiment ID: 20000185 Result: Down-regulated in Transcription
  misc_feature: MA Experiment 20000185 PARAMETER Experiment Name: At_Roots__P Parameter: Age (day) Value: 7 vs. 21
  misc_feature: MA Experiment 20000185 PARAMETER Experiment Name: At_Roots__P Parameter: Organism Value: A. thaliana
  misc_feature: MA Experiment 20000185 PARAMETER Experiment Name: At_Roots__P Parameter: Tissue Value: Roots vs. Whole Plant
  misc_feature: MA Experiment ID: 20000268 Result: Down-regulated in Transcription
  misc_feature: MA Experiment 20000268 PARAMETER Experiment Name: At_100mM_NaCl__P Parameter: Age (day) Value: 14
  misc_feature: MA Experiment 20000268 PARAMETER Experiment Name: At_100mM_NaCl__P Parameter: Organism Value: A. thaliana
  misc_feature: MA Experiment 20000268 PARAMETER Experiment Name: At_100mM_NaCl__P Parameter: Plant Line Value: WS
  misc_feature: MA Experiment 20000268 PARAMETER Experiment Name: At_100mM_NaCl__P Parameter: Timepoint (hr) Value: 6
  misc_feature: MA Experiment 20000268 PARAMETER Experiment Name: At_100mM_NaCl__P Parameter: Tissue Value: Whole Plant
  misc_feature: MA Experiment 20000268 PARAMETER Experiment Name: At_100mM_NaCl__P Parameter: Treatment Value: 100mM NaCl vs. No Treatment
  misc_feature: MA Experiment ID: 20000439 Result: Down-regulated in Transcription
  misc_feature: MA Experiment 20000439 PARAMETER Experiment Name: At_Roots__P Parameter: Age (day) Value: 14 vs. 21
  misc_feature: MA Experiment 20000439 PARAMETER Experiment Name: At_Roots__P Parameter: Organism Value: A. thaliana
  misc_feature: MA Experiment 20000439 PARAMETER Experiment Name: At_Roots__P Parameter: Tissue Value: Roots vs. Whole Plant
  misc_feature: MA Experiment ID: 20000495 Result: Down-regulated in Transcription
  misc_feature: MA Experiment 20000495 PARAMETER Experiment Name: At_Guard_Cells_P Parameter: Harvest Date Value: 8/2/2002
  misc_feature: MA Experiment 20000495 PARAMETER Experiment Name: At_Guard_Cells_P Parameter: Organism Value: A. thaliana
  misc_feature: MA Experiment 20000495 PARAMETER Experiment Name: At_Guard_Cells_P Parameter: Tissue Value: Guard Cells vs. Leaves
  misc_feature: MA Experiment ID: 20000794 Result: Down-regulated in Transcription
  misc_feature: MA Experiment 20000794 PARAMETER Experiment Name: At_Petals_P Parameter: Age (day) Value: 23-25 days
  misc_feature: MA Experiment 20000794 PARAMETER Experiment Name: At_Petals_P Parameter: Plant Line Value: WS
  misc_feature: MA Experiment 20000794 PARAMETER Experiment Name: At_Petals_P Parameter: Tissue Value: Petals vs. Whole plant
  misc_feature: MA Experiment ID: 20001554 Result: Down-regulated in Transcription
  misc_feature: MA Experiment 20001554 PARAMETER Experiment Name: At_Drought_Soil_Dry_P Parameter: Age (day) Value: 21
  misc_feature: MA Experiment 20001554 PARAMETER Experiment Name: At_Drought_Soil_Dry_P Parameter: Organism Value: A. thaliana
  misc_feature: MA Experiment 20001554 PARAMETER Experiment Name: At_Drought_Soil_Dry_P Parameter: Plant Line Value: WS
  misc_feature: MA Experiment 20001554 PARAMETER Experiment Name: At_Drought_Soil_Dry_P Parameter: Post Timepoint (hr) Value: None
  misc_feature: MA Experiment 20001554 PARAMETER Experiment Name: At_Drought_Soil_Dry_P Parameter: Post-Treatment Value: None
  misc_feature: MA Experiment 20001554 PARAMETER Experiment Name: At_Drought_Soil_Dry_P Parameter: Timepoint (day) Value: 7
  misc_feature: MA Experiment 20001554 PARAMETER Experiment Name: At_Drought_Soil_Dry_P Parameter: Treatment Value: Drought vs. No Drought
  misc_feature: MA Experiment ID: 20001555 Result: Down-regulated in Transcription
  misc_feature: MA Experiment 20001555 PARAMETER Experiment Name: At_Drought_Soil_Dry_P Parameter: Age (day) Value: 24
  misc_feature: MA Experiment 20001555 PARAMETER Experiment Name: At_Drought_Soil_Dry_P Parameter: Organism Value: A. thaliana
  misc_feature: MA Experiment 20001555 PARAMETER Experiment Name: At_Drought_Soil_Dry_P Parameter: Plant Line Value: WS
  misc_feature: MA Experiment 20001555 PARAMETER Experiment Name: At_Drought_Soil_Dry_P Parameter: Post Timepoint (hr) Value: None
  misc_feature: MA Experiment 20001555 PARAMETER Experiment Name: At_Drought_Soil_Dry_P Parameter: Post-Treatment Value: None
  misc_feature: MA Experiment 20001555 PARAMETER Experiment Name: At_Drought_Soil_Dry_P Parameter: Timepoint (day) Value: 10
  misc_feature: MA Experiment 20001555 PARAMETER Experiment Name: At_Drought_Soil_Dry_P Parameter: Treatment Value: Drought vs. No Drought
  misc_feature: MA Experiment ID: 20001556 Result: Down-regulated in Transcription
  misc_feature: MA Experiment 20001556 PARAMETER Experiment Name: At_Drought_Soil_Dry_P Parameter: Age (day) Value: 26
  misc_feature: MA Experiment 20001556 PARAMETER Experiment Name: At_Drought_Soil_Dry_P Parameter: Organism Value: A. thaliana
  misc_feature: MA Experiment 20001556 PARAMETER Experiment Name: At_Drought_Soil_Dry_P Parameter: Plant Line Value: WS
  misc_feature: MA Experiment 20001556 PARAMETER Experiment Name: At_Drought_Soil_Dry_P Parameter: Post Timepoint (hr) Value: None
  misc_feature: MA Experiment 20001556 PARAMETER Experiment Name: At_Drought_Soil_Dry_P Parameter: Post-Treatment Value: None
  misc_feature: MA Experiment 20001556 PARAMETER Experiment Name: At_Drought_Soil_Dry_P Parameter: Timepoint (day) Value: 12
  misc_feature: MA Experiment 20001556 PARAMETER Experiment Name: At_Drought_Soil_Dry_P Parameter: Treatment Value: Drought vs. No Drought
  misc_feature: MA Experiment ID: 20001557 Result: Up-regulated in Transcription
  misc_feature: MA Experiment 20001557 PARAMETER Experiment Name: At_Drought_Soil_Dry_P Parameter: Age (day) Value: 27
  misc_feature: MA Experiment 20001557 PARAMETER Experiment Name: At_Drought_Soil_Dry_P Parameter: Organism Value: A. thaliana
  misc_feature: MA Experiment 20001557 PARAMETER Experiment Name: At_Drought_Soil_Dry_P Parameter: Plant Line Value: WS
  misc_feature: MA Experiment 20001557 PARAMETER Experiment Name: At_Drought_Soil_Dry_P Parameter: Post Timepoint (hr) Value: 3
  misc_feature: MA Experiment 20001557 PARAMETER Experiment Name: At_Drought_Soil_Dry_P Parameter: Post-Treatment Value: Re-Water vs. No Drought
  misc_feature: MA Experiment 20001557 PARAMETER Experiment Name: At_Drought_Soil_Dry_P Parameter: Timepoint (day) Value: 13
  misc_feature: MA Experiment 20001557 PARAMETER Experiment Name: At_Drought_Soil_Dry_P Parameter: Treatment Value: Drought vs. No Drought
  misc_feature: MA Experiment ID: 20001558 Result: Up-regulated in Transcription
  misc_feature: MA Experiment 20001558 PARAMETER Experiment Name: At_Drought_Soil_Dry_P Parameter: Age (day) Value: 27
  misc_feature: MA Experiment 20001558 PARAMETER Experiment Name: At_Drought_Soil_Dry_P Parameter: Organism Value: A. thaliana
  misc_feature: MA Experiment 20001558 PARAMETER Experiment Name: At_Drought_Soil_Dry_P Parameter: Plant Line Value: WS
  misc_feature: MA Experiment 20001558 PARAMETER Experiment Name: At_Drought_Soil_Dry_P Parameter: Post Timepoint (hr) Value: 6
  misc_feature: MA Experiment 20001558 PARAMETER Experiment Name: At_Drought_Soil_Dry_P Parameter: Post-Treatment Value: Re-Water vs. No Drought
  misc_feature: MA Experiment 20001558 PARAMETER Experiment Name: At_Drought_Soil_Dry_P Parameter: Timepoint (day) Value: 13
  misc_feature: MA Experiment 20001558 PARAMETER Experiment Name: At_Drought_Soil_Dry_P Parameter: Treatment Value: Drought vs. No Drought
  misc_feature: MA Experiment ID: 20001560 Result: Up-regulated in Transcription
  misc_feature: MA Experiment 20001560 PARAMETER Experiment Name: At_Drought_Soil_Dry_P Parameter: Age (day) Value: 28
  misc_feature: MA Experiment 20001560 PARAMETER Experiment Name: At_Drought_Soil_Dry_P Parameter: Organism Value: A. thaliana
  misc_feature: MA Experiment 20001560 PARAMETER Experiment Name: At_Drought_Soil_Dry_P Parameter: Plant Line Value: WS
  misc_feature: MA Experiment 20001560 PARAMETER Experiment Name: At_Drought_Soil_Dry_P Parameter: Post Timepoint (hr) Value: None
  misc_feature: MA Experiment 20001560 PARAMETER Experiment Name: At_Drought_Soil_Dry_P Parameter: Post-Treatment Value: None
  misc_feature: MA Experiment 20001560 PARAMETER Experiment Name: At_Drought_Soil_Dry_P Parameter: Timepoint (day) Value: 14
  misc_feature: MA Experiment 20001560 PARAMETER Experiment Name: At_Drought_Soil_Dry_P Parameter: Treatment Value: Drought vs. No Drought
atcttcttgctttcttcacttcttcaactctttgagttatttatttccagaagcttcatagtttctggaaaatgctaatccactagcggaataaaagacagatctttaatccactatagaaaccgcgttttctgaaaatgcggttgcgttttccgatgaaatctgccgttttagcgtttgctatctttctggtgtttattccactgttttccgtcggaatacggatgattccgggaagactcaccgccgtatccgccaccgtcggaaatggctttgatctggggtcgttcgtggaagctccggagtacagaaacggcaaggagtgcgtgtctcaatcgttaaacagagagaacttcgtgtcgtcttgcgacgcttcgttagttcatgtagctatgacgcttgactcagagtacttacgtggctcaatcgcagccgttcattccatgctccgccacgcgtcatgtccagaaaacgtcttcttccatctcatcgctgcagagtttgacccggcgagtccacgcgttctgagtcaactcgtccgatctactttcccgtcgctaaacttcaaagtatacattttccgggaagatacggtgatcaaccttatctcttcttcaatcagacaagctttagagaatccattgaactatgctcggaactacctcggagatattcttgatccatgcgtagacagagtcatttacctagactcggacatcatcgtcgtcgacgacataacaaagctttggaacacgactttaacagagtcaagaatcatcggagctccggagtattgtcacgctaacttcacaaagtacttcacttcagggttctggtccgacccggctttacccggattcttctcgggtcgaaagccttgttatttcaacacgggtgtgatggtgatggatctagttagatggagagaaggaaactacagagaaaagcttgaaacttggatgcagatacagaagaagaagagaatctacgatttgggttctttgcctccgtttcttctagtcttcgcagggaacgttgaagcaattgatcataggtggaaccaacatggtctaggaggagacaatgtacgaggaagttgtaggtctttgcataaaggaccagtgagtttgttgcattggagtgggaaaggtaagccatgggtgagacttgatgagaagagaccgtgtccgttggatcatttatgggaaccgtatgatttatatgagcataagattgaaagagctaaagatcagtctttgtttgggttctcttctttgtctgagttaacagaagattcaagctttttctgaagagttgtgtaagtcaacaacattctttttacttgtttttgtagttttgggttattacaaatacattgttgagttgttgagagatatatttttttgactgttggttgtgtaaaaaattgactagtgagaaaagagtttgtagaagctattgatgaggactagttaggagaattttttgtttggaatttgtattttgttgtgttctttccctaaatggttatgttgatctcaattttctgtatgtggagtcttttcaagaatatgcagcaagtgttgttagcctgaaataaaacccaagtttgttaaactg

SEQ ID NO: 44499 - protein, 390 aa, Arabidopsis thaliana
  peptide (1)..(390): Ceres Seq. ID no. 14306839
  misc_feature (30)..(364): Homolog of NCBI NO: 18391493 NR Description: glycosyltransferase family 8 [Arabidopsis
  misc_feature (47)..(364): Homolog of NCBI NO: 15217851 NR Description: glycosyltransferase family 8 [Arabidopsis
  misc_feature (51)..(364): Homolog of NCBI NO: 21554300 NR Description: putative glycosyl transferase [Arabidopsis
  misc_feature (51)..(364): Homolog of NCBI NO: 15235247 NR Description: glycosyltransferase family 8 [Arabidopsis
  misc_feature (50)..(364): Homolog of NCBI NO: 22331906 NR Description: glycosyltransferase family 8 [Arabidopsis
  misc_feature (50)..(364): Homolog of NCBI NO: 11281926 NR Description: hypothetical protein F26K9.90 - Arabidopsis
  misc_feature (44)..(368): Homolog of NCBI NO: 30689156 NR Description: galactinol synthase, putative [Arabidopsis
  misc_feature (16)..(362): Homolog of NCBI NO: 12003394 NR Description: Avr9/Cf-9 rapidly elicited protein 231 [Nicotiana
  misc_feature (12)..(389): Homolog of NCBI NO: 15221684 NR Description: glycosyltransferase family 8 [Arabidopsis
  misc_feature (1)..(390): Homolog of NCBI NO: 18409445 NR Description: glycosyltransferase family 8 [Arabidopsis
MRLRFPMKSAVLAFAIFLVFIPLFSVGIRMIPGRLTAVSATVGNGFDLGSFVEAPEYRNGKECVSQSLNRENFVSSCDASLVHVAMTLDSEYLRGSIAAVHSMLRHASCPENVFFHLIAAEFDPASPRVLSQLVRSTFPSLNFKVYIFREDTVINLISSSIRQALENPLNYARNYLGDILDPCVDRVIYLDSDIIVVDDITKLWNTTLTESRIIGAPEYCHANFTKYFTSGFWSDPALPGFFSGRKPCYFNTGVMVMDLVRWREGNYREKLETWMQIQKKKRIYDLGSLPPFLLVFAGNVEAIDHRWNQHGLGGDNVRGSCRSLHKGPVSLLHWSGKGKPWVRLDEKRPCPLDHLWEPYDLYEHKIERAKDQSLFGFSSLSELTEDSSFF

SEQ ID NO: 44500 - protein, 384 aa, Arabidopsis thaliana
  peptide (1)..(384): Ceres Seq. ID no. 14306840
  misc_feature (24)..(358): Homolog of NCBI NO: 18391493 NR Description: glycosyltransferase family 8 [Arabidopsis
  misc_feature (41)..(358): Homolog of NCBI NO: 15217851 NR Description: glycosyltransferase family 8 [Arabidopsis
  misc_feature (45)..(358): Homolog of NCBI NO: 21554300 NR Description: putative glycosyl transferase [Arabidopsis
  misc_feature (45)..(358): Homolog of NCBI NO: 15235247 NR Description: glycosyltransferase family 8 [Arabidopsis
  misc_feature (44)..(358): Homolog of NCBI NO: 22331906 NR Description: glycosyltransferase family 8 [Arabidopsis
  misc_feature (44)..(358): Homolog of NCBI NO: 11281926 NR Description: hypothetical protein F26K9.90 - Arabidopsis
  misc_feature (38)..(362): Homolog of NCBI NO: 30689156 NR Description: galactinol synthase, putative [Arabidopsis
  misc_feature (10)..(356): Homolog of NCBI NO: 12003394 NR Description: Avr9/Cf-9 rapidly elicited protein 231 [Nicotiana
  misc_feature (6)..(383): Homolog of NCBI NO: 15221684 NR Description: glycosyltransferase family 8 [Arabidopsis
  misc_feature (1)..(384): Homolog of NCBI NO: 18409445 NR Description: glycosyltransferase family 8 [Arabidopsis
MKSAVLAFAIFLVFIPLFSVGIRMIPGRLTAVSATVGNGFDLGSFVEAPEYRNGKECVSQSLNRENFVSSCDASLVHVAMTLDSEYLRGSIAAVHSMLRHASCPENVFFHLIAAEFDPASPRVLSQLVRSTFPSLNFKVYIFREDTVINLISSSIRQALENPLNYARNYLGDILDPCVDRVIYLDSDIIVVDDITKLWNTTLTESRIIGAPEYCHANFTKYFTSGFWSDPALPGFFSGRKPCYFNTGVMVMDLVRWREGNYREKLETWMQIQKKKRIYDLGSLPPFLLVFAGNVEAIDHRWNQHGLGGDNVRGSCRSLHKGPVSLLHWSGKGKPWVRLDEKRPCPLDHLWEPYDLYEHKIERAKDQSLFGFSSLSELTEDSSFF

SEQ ID NO: 44501 - protein, 361 aa, Arabidopsis thaliana
  peptide (1)..(361): Ceres Seq. ID no. 14306841
  misc_feature (1)..(335): Homolog of NCBI NO: 18391493 NR Description: glycosyltransferase family 8 [Arabidopsis
  misc_feature (18)..(335): Homolog of NCBI NO: 15217851 NR Description: glycosyltransferase family 8 [Arabidopsis
  misc_feature (22)..(335): Homolog of NCBI NO: 21554300 NR Description: putative glycosyl transferase [Arabidopsis
  misc_feature (22)..(335): Homolog of NCBI NO: 15235247 NR Description: glycosyltransferase family 8 [Arabidopsis
  misc_feature (21)..(335): Homolog of NCBI NO: 22331906 NR Description: glycosyltransferase family 8 [Arabidopsis
  misc_feature (21)..(335): Homolog of NCBI NO: 11281926 NR Description: hypothetical protein F26K9.90 - Arabidopsis
  misc_feature (15)..(339): Homolog of NCBI NO: 30689156 NR Description: galactinol synthase, putative [Arabidopsis
  misc_feature (1)..(333): Homolog of NCBI NO: 12003394 NR Description: Avr9/Cf-9 rapidly elicited protein 231 [Nicotiana
  misc_feature (1)..(360): Homolog of NCBI NO: 15221684 NR Description: glycosyltransferase family 8 [Arabidopsis
  misc_feature (1)..(361): Homolog of NCBI NO: 18409445 NR Description: glycosyltransferase family 8 [Arabidopsis
MIPGRLTAVSATVGNGFDLGSFVEAPEYRNGKECVSQSLNRENFVSSCDASLVHVAMTLDSEYLRGSIAAVHSMLRHASCPENVFFHLIAAEFDPASPRVLSQLVRSTFPSLNFKVYIFREDTVINLISSSIRQALENPLNYARNYLGDILDPCVDRVIYLDSDIIVVDDITKLWNTTLTESRIIGAPEYCHANFTKYFTSGFWSDPALPGFFSGRKPCYFNTGVMVMDLVRWREGNYREKLETWMQIQKKKRIYDLGSLPPFLLVFAGNVEAIDHRWNQHGLGGDNVRGSCRSLHKGPVSLLHWSGKGKPWVRLDEKRPCPLDHLWEPYDLYEHKIERAKDQSLFGFSSLSELTEDSSFF

SEQ ID NO: 44502 - DNA, 1123 bp, Arabidopsis thaliana
  misc_feature (1)..(1123): Ceres Seq. ID no. 13509866
  misc_feature: MA Experiment ID: 20000166 Result: Down-regulated in Transcription
  misc_feature: MA Experiment 20000166 PARAMETER Experiment Name: At_100uM_ABA_P Parameter: Age (day) Value: 14
  misc_feature: MA Experiment 20000166 PARAMETER Experiment Name: At_100uM_ABA_P Parameter: Organism Value: A. thaliana
  misc_feature: MA Experiment 20000166 PARAMETER Experiment Name: At_100uM_ABA_P Parameter: Plant Line Value: WS
  misc_feature: MA Experiment 20000166 PARAMETER Experiment Name: At_100uM_ABA_P Parameter: Timepoint (hr) Value: 1
  misc_feature: MA Experiment 20000166 PARAMETER Experiment Name: At_100uM_ABA_P Parameter: Tissue Value: Aerial
  misc_feature: MA Experiment 20000166 PARAMETER Experiment Name: At_100uM_ABA_P Parameter: Treatment Value: 100uM ABA vs. No Treatment
  misc_feature: MA Experiment ID: 20000184 Result: Up-regulated in Transcription
  misc_feature: MA Experiment 20000184 PARAMETER Experiment Name: At_Shoots__P Parameter: Age (day) Value: 7
  misc_feature: MA Experiment 20000184 PARAMETER Experiment Name: At_Shoots__P Parameter: Tissue Value: Shoots vs. Whole Plant
  misc_feature: MA Experiment ID: 20000286 Result: Up-regulated in Transcription
  misc_feature: MA Experiment 20000286 PARAMETER Experiment Name: At_Open_Flower_P Parameter: Age (day) Value: 21
  misc_feature: MA Experiment 20000286 PARAMETER Experiment Name: At_Open_Flower_P Parameter: Plant Line Value: WS
  misc_feature: MA Experiment 20000286 PARAMETER Experiment Name: At_Open_Flower_P Parameter: Tissue Value: Half Open vs. Whole Plant
  misc_feature: MA Experiment ID: 20001247 Result: Up-regulated in Transcription
  misc_feature: MA Experiment 20001247 PARAMETER Experiment Name: At_Far-red-induction_P Parameter: Age (day) Value: 7
  misc_feature: MA Experiment 20001247 PARAMETER Experiment Name: At_Far-red-induction_P Parameter: Light Value: Far-red vs. White
  misc_feature: MA Experiment 20001247 PARAMETER Experiment Name: At_Far-red-induction_P Parameter: Organism Value: A. thaliana
  misc_feature: MA Experiment 20001247 PARAMETER Experiment Name: At_Far-red-induction_P Parameter: Plant Line Value: Columbia
  misc_feature: MA Experiment 20001247 PARAMETER Experiment Name: At_Far-red-induction_P Parameter: Timepoint (hr) Value: 1
  misc_feature: MA Experiment 20001247 PARAMETER Experiment Name: At_Far-red-induction_P Parameter: Tissue Value: Whole Plant
  misc_feature: MA Experiment ID: 20001248 Result: Up-regulated in Transcription
  misc_feature: MA Experiment 20001248 PARAMETER Experiment Name: At_Far-red-induction_P Parameter: Age (day) Value: 7
  misc_feature: MA Experiment 20001248 PARAMETER Experiment Name: At_Far-red-induction_P Parameter: Light Value: Far-red vs. White
  misc_feature: MA Experiment 20001248 PARAMETER Experiment Name: At_Far-red-induction_P Parameter: Organism Value: A. thaliana
  misc_feature: MA Experiment 20001248 PARAMETER Experiment Name: At_Far-red-induction_P Parameter: Plant Line Value: Columbia
  misc_feature: MA Experiment 20001248 PARAMETER Experiment Name: At_Far-red-induction_P Parameter: Timepoint (hr) Value: 4
  misc_feature: MA Experiment 20001248 PARAMETER Experiment Name: At_Far-red-induction_P Parameter: Tissue Value: Whole Plant
aaacacgccactaggagctaccatctctgttttattgctgcttctgcttcctcttccattactcgtcttaaaacaaaggagaaagagtcaagagacatgcatgcgaagacagactcggaggcaacaagcatcgacgcagcggctttgtctccgccgcgttcagcgattagacctctttactatgtacagagtccatcaaaccatgacgtggagaagatgtcatttggttctggttgcagcctaatgggttcacctacacatccacattactaccattgctcaccaatccatcactcccgtgagtcatccacctctcgcttctctgaccgtgctctcctctcttacaagtccatccgtgaacgtcgccgatacatcaacgacggagacgacaaaactgacggcggagatgacgacgacccgtttcggaatgtgcgactctacgtttggttgctcctctccgtaatcttcttgttcacagtcttctctcttatactctggggtgctagcaaatcctaccctcccaaagttactgtaaaggggatgctggtgagggacttgaacttgcaggcagggaacgatcttagcggagtgcctacggacatgttgtctcttaattcgacggtcaggatatattaccgtaacccatcaactttctttgccgtccacgtcactgcttctcctcttctccttcactactccaacctcctactatcctccggtgagatgaacaagttcacggttggtagaaatggcgaaacgaacgtagtgacggtggtgcaaggccatcagattcccctctacggtggtgtttctttccatcttgatacactctccctgccgcttaatctcactatcgtcctccattcaaaagcttacattttgggaagactcgtcacctccaagttctatacaaggatcatctgctcattcactctcgacgccaaccatctcccaaaatccatctctcttctccgctcctgtattccttaacactgattacacgtgtgtggatgtgtgttcttgtatcttttgccatcaaatattttaatccatcaagtacaacatcaacatttntacatgccacagtcaaataagtgatcacatatatagatgacaccgcttt

SEQ ID NO: 44503 - protein, 329 aa, Arabidopsis thaliana
  peptide (1)..(329): Ceres Seq. ID no. 13509867
  misc_feature (33)..(327): Homolog of NCBI NO: 9294055 NR Description: gene_id:MOB24.18~unknown protein [Arabidopsis
  misc_feature (279)..(327): Homolog of NCBI NO: 18401556 NR Description: expressed protein [Arabidopsis thaliana]
  misc_feature (33)..(271): Homolog of NCBI NO: 18401556 NR Description: expressed protein [Arabidopsis thaliana]
  misc_feature (279)..(327): Homolog of NCBI NO: 28416677 NR Description: At5g42860 [Arabidopsis thaliana]
  misc_feature (33)..(271): Homolog of NCBI NO: 28416677 NR Description: At5g42860 [Arabidopsis thaliana]
  misc_feature (33)..(328): Homolog of NCBI NO: 38345517 NR Description: OSJNBa0039K24.20 [Oryza sativa (japonica
  misc_feature (279)..(327): Homolog of NCBI NO: 15239097 NR Description: expressed protein [Arabidopsis thaliana]
  misc_feature (33)..(271): Homolog of NCBI NO: 15239097 NR Description: expressed protein [Arabidopsis thaliana]
  misc_feature (4)..(328): Homolog of NCBI NO: 5777621 NR Description: CAA30379.1 protein [Oryza sativa]
  misc_feature (33)..(329): Homolog of NCBI NO: 15227481 NR Description: expressed protein [Arabidopsis thaliana]
KHATRSYHLCFIAASASSSITRLKTKEKESRDMHAKTDSEATSIDAAALSPPRSAIRPLYYVQSPSNHDVEKMSFGSGCSLMGSPTHPHYYHCSPIHHSRESSTSRFSDRALLSYKSIRERRRYINDGDDKTDGGDDDDPFRNVRLYVWLLLSVIFLFTVFSLILWGASKSYPPKVTVKGMLVRDLNLQAGNDLSGVPTDMLSLNSTVRIYYRNPSTFFAVHVTASPLLLHYSNLLLSSGEMNKFTVGRNGETNVVTVVQGHQIPLYGGVSFHLDTLSLPLNLTIVLHSKAYILGRLVTSKFYTRIICSFTLDANHLPKSISLLRSCIP

SEQ ID NO: 44504 - protein, 297 aa, Arabidopsis thaliana
  peptide (1)..(297): Ceres Seq. ID no. 13509868
  misc_feature (1)..(295): Homolog of NCBI NO: 9294055 NR Description: gene_id:MOB24.18~unknown protein [Arabidopsis
  misc_feature (247)..(295): Homolog of NCBI NO: 18401556 NR Description: expressed protein [Arabidopsis thaliana]
  misc_feature (1)..(239): Homolog of NCBI NO: 18401556 NR Description: expressed protein [Arabidopsis thaliana]
  misc_feature (247)..(295): Homolog of NCBI NO: 28416677 NR Description: At5g42860 [Arabidopsis thaliana]
  misc_feature (1)..(239): Homolog of NCBI NO: 28416677 NR Description: At5g42860 [Arabidopsis thaliana]
  misc_feature (1)..(296): Homolog of NCBI NO: 38345517 NR Description: OSJNBa0039K24.20 [Oryza sativa (japonica
  misc_feature (247)..(295): Homolog of NCBI NO: 15239097 NR Description: expressed protein [Arabidopsis thaliana]
  misc_feature (1)..(239): Homolog of NCBI NO: 15239097 NR Description: expressed protein [Arabidopsis thaliana]
  misc_feature (1)..(296): Homolog of NCBI NO: 5777621 NR Description: CAA30379.1 protein [Oryza sativa]
  misc_feature (1)..(297): Homolog of NCBI NO: 15227481 NR Description: expressed protein [Arabidopsis thaliana]
MHAKTDSEATSIDAAALSPPRSAIRPLYYVQSPSNHDVEKMSFGSGCSLMGSPTHPHYYHCSPIHHSRESSTSRFSDRALLSYKSIRERRRYINDGDDKTDGGDDDDPFRNVRLYVWLLLSVIFLFTVFSLILWGASKSYPPKVTVKGMLVRDLNLQAGNDLSGVPTDMLSLNSTVRIYYRNPSTFFAVHVTASPLLLHYSNLLLSSGEMNKFTVGRNGETNVVTVVQGHQIPLYGGVSFHLDTLSLPLNLTIVLHSKAYILGRLVTSKFYTRIICSFTLDANHLPKSISLLRSCIP

SEQ ID NO: 44505 - protein, 257 aa, Arabidopsis thaliana
  peptide (1)..(257): Ceres Seq. ID no. 13509869
  misc_feature (1)..(255): Homolog of NCBI NO: 9294055 NR Description: gene_id:MOB24.18~unknown protein [Arabidopsis
  misc_feature (207)..(255): Homolog of NCBI NO: 18401556 NR Description: expressed protein [Arabidopsis thaliana]
  misc_feature (1)..(199): Homolog of NCBI NO: 18401556 NR Description: expressed protein [Arabidopsis thaliana]
  misc_feature (207)..(255): Homolog of NCBI NO: 28416677 NR Description: At5g42860 [Arabidopsis thaliana]
  misc_feature (1)..(199): Homolog of NCBI NO: 28416677 NR Description: At5g42860 [Arabidopsis thaliana]
  misc_feature (1)..(256): Homolog of NCBI NO: 38345517 NR Description: OSJNBa0039K24.20 [Oryza sativa (japonica
  misc_feature (207)..(255): Homolog of NCBI NO: 15239097 NR Description: expressed protein [Arabidopsis thaliana]
  misc_feature (1)..(199): Homolog of NCBI NO: 15239097 NR Description: expressed protein [Arabidopsis thaliana]
  misc_feature (1)..(256): Homolog of NCBI NO: 5777621 NR Description: CAA30379.1 protein [Oryza sativa]
  misc_feature (1)..(257): Homolog of NCBI NO: 15227481 NR Description: expressed protein [Arabidopsis thaliana]
MSFGSGCSLMGSPTHPHYYHCSPIHHSRESSTSRFSDRALLSYKSIRERRRYINDGDDKTDGGDDDDPFRNVRLYVWLLLSVIFLFTVFSLILWGASKSYPPKVTVKGMLVRDLNLQAGNDLSGVPTDMLSLNSTVRIYYRNPSTFFAVHVTASPLLLHYSNLLLSSGEMNKFTVGRNGETNVVTVVQGHQIPLYGGVSFHLDTLSLPLNLTIVLHSKAYILGRLVTSKFYTRIICSFTLDANHLPKSISLLRSCIP

SEQ ID NO: 44506 - DNA, 1736 bp, Arabidopsis thaliana
  misc_feature (1)..(1736): Ceres Seq. ID no. 13509533
  misc_feature: MA Experiment ID: 20000184 Result: Down-regulated in Transcription
  misc_feature: MA Experiment 20000184 PARAMETER Experiment Name: At_Shoots__P Parameter: Age (day) Value: 7
  misc_feature: MA Experiment 20000184 PARAMETER Experiment Name: At_Shoots__P Parameter: Tissue Value: Shoots vs. Whole Plant
  misc_feature: MA Experiment ID: 20000214 Result: Down-regulated in Transcription
  misc_feature: MA Experiment 20000214 PARAMETER Experiment Name: At_4deg_Cold_P Parameter: Timepoint (hr) Value: 6
  misc_feature: MA Experiment ID: 20000496 Result: Up-regulated in Transcription
  misc_feature: MA Experiment 20000496 PARAMETER Experiment Name: At_Guard_Cells_P Parameter: Harvest Date Value: 7/19/2002
  misc_feature: MA Experiment 20000496 PARAMETER Experiment Name: At_Guard_Cells_P Parameter: Organism Value: Canola
  misc_feature: MA Experiment 20000496 PARAMETER Experiment Name: At_Guard_Cells_P Parameter: Tissue Value: Guard Cells vs. Leaves
  misc_feature: MA Experiment ID: 20001450 Result: Up-regulated in Transcription
  misc_feature: MA Experiment 20001450 PARAMETER Experiment Name: At_Far-red-induction_P Parameter: Age (day) Value: 7
  misc_feature: MA Experiment 20001450 PARAMETER Experiment Name: At_Far-red-induction_P Parameter: Light Value: Far-red vs. White
  misc_feature: MA Experiment 20001450 PARAMETER Experiment Name: At_Far-red-induction_P Parameter: Organism Value: A. thaliana
  misc_feature: MA Experiment 20001450 PARAMETER Experiment Name: At_Far-red-induction_P Parameter: Plant Line Value: Columbia
  misc_feature: MA Experiment 20001450 PARAMETER Experiment Name: At_Far-red-induction_P Parameter: Timepoint (hr) Value: 8
  misc_feature: MA Experiment 20001450 PARAMETER Experiment Name: At_Far-red-induction_P Parameter: Tissue Value: Whole Plant
  misc_feature: MA Experiment ID: 20001905 Result: Up-regulated in Transcription
  misc_feature: MA Experiment 20001905 PARAMETER Experiment Name: At_Drought_Reproduction_P Parameter: Age (day) Value: 40
  misc_feature: MA Experiment 20001905 PARAMETER Experiment Name: At_Drought_Reproduction_P Parameter: Organism Value: A. thaliana
  misc_feature: MA Experiment 20001905 PARAMETER Experiment Name: At_Drought_Reproduction_P Parameter: Plant Line Value: WS
  misc_feature: MA Experiment 20001905 PARAMETER Experiment Name: At_Drought_Reproduction_P Parameter: Timepoint (day) Value: 10
  misc_feature: MA Experiment 20001905 PARAMETER Experiment Name: At_Drought_Reproduction_P Parameter: Tissue Value: Rosettes
  misc_feature: MA Experiment 20001905 PARAMETER Experiment Name: At_Drought_Reproduction_P Parameter: Treatment Value: Drought vs. No Drought
gttgtcctaaaattagggttcttccttgtgaatattgcttgatctaggaaactaatcaggatctgggtttgtcttttggatctagggttttattatagcatttctgggttctttgttgaccaagaagaagatttgtattgatggaatgttgttgatgttgttgtgaacagtgagaaatcaataagatgttggagaaagagtttttcacggagtatggtgaagcaagtcaatatcagatccaagaagttgttggcaaaggaagctacggagttgttgcttctgcggaatgtccacacacgggaggcaaagtagccatcaagaagatgacaaatgtgtttgaacatgtctcagatgctattcgtatcctcagagagatcaagcttctcaggcttcttcgacatcctgatatcgtggagatcaagcatatcatgcttcctccttgtcgcaaggaattcaaagatatatatgttgtttttgagttgatggagtctgatcttcaccacgttcttaaggtaaatgacgacctcactcctcagcatcatcaattcttcttgtaccaacttcttcgtggcttaaaattcatgcactcagctcatgtgttccatagagatctgaagcctaagaacatcctcgctaatgctgattgcaaaatcaagatctgtgatttaggacttgctcgtgtctcctttactgattccccttctgctgtgttttggactgactacgttgctacaagatggtaccgtgcgccagagctctgtggttccttctattctaactacacgccggcgattgacatgtggagtgttgggtgcatatttgcagagatgctaactggaaaacctttgtttcctggcaaaaacgttgtgcaccagctagaactcgtgactgatctgcttggaactccgtcgccgataactctatccaggattcggaatgagaaggctagaaagtatttgggaaacatgaggcgaaaggatcctgtacctttcacccataaattccccaatatcgatcctgtggcgctgaagttacttcagcgtttgatcgcttttgacccaaaggaccgtccctctgcagaagaggcattggctgatccgtattttcaaggattggcaaatgtggactatgaaccatcgaggcaacctatctcgaaacttgagtttgagtttgagaggaggaaattgactcgcgatgacgtgagggaactcatgtacagagaggaatctcttaaaacttttttttttgttctctttctggatatgaaacagattttggagtatcatccacagatgttgcaagagtatctacaaggagaagagaacataaactctcattttctatacccaagagaaagtgtgtcttactttggtgaatcaatcttgatatccagcggagttgatcagttcaaacaagagtttgcccgactcgaagaacacaacgacgatgaagaggaacacaactccccaccacatcagagaaagtacacttcactccctagagaacgggtgtgctcatcagaagacgaaggttctgattcagttcatgctcaatcgtcttcagcttcagtggtgtttacacctccacagactccaaacacagcaactggcttatcatcacagaaggcgtcacaagtagacaaagcagcaactccggtaaaacggtctgcatgtctaatgaggagtgatagtatctgtgcttcaagatgtgttggtgtctcctctgcagtgtcatag

SEQ ID NO: 44507 - protein, 516 aa, Arabidopsis thaliana
  peptide (1)..(516): Ceres Seq. ID no. 13509534
  misc_feature (16)..(307): Pfam Name: Protein kinase domain Pfam Description: Protein kinase domain
  misc_feature (5)..(382): Homolog of NCBI NO: 25406284 NR Description: probable MAP kinase F25P22.9 [imported] -
  misc_feature (1)..(382): Homolog of NCBI NO: 7106542 NR Description: ATMPK8 [Arabidopsis thaliana]
  misc_feature (5)..(382): Homolog of NCBI NO: 6689924 NR Description: MAP kinase homolog [Oryza sativa]
  misc_feature (5)..(382): Homolog of NCBI NO: 5815410 NR Description: blast and wounding induced mitogen-activated
  misc_feature (1)..(382): Homolog of NCBI NO: 15220976 NR Description: mitogen-activated protein kinase (MAPK), putative
  misc_feature (2)..(379): Homolog of NCBI NO: 7106544 NR Description: ATMPK9 [Arabidopsis thaliana]
  misc_feature (2)..(379): Homolog of NCBI NO: 18401750 NR Description: mitogen-activated protein kinase (MAPK), putative
  misc_feature (2)..(379): Homolog of NCBI NO: 9294059 NR Description: MAP kinase [Arabidopsis thaliana]
  misc_feature (1)..(388): Homolog of NCBI NO: 30677926 NR Description: mitogen-activated protein kinase (MAPK), putative
  misc_feature (1)..(516): Homolog of NCBI NO: 25410906 NR Description: probable MAP kinase [imported] - Arabidopsis
MLEKEFFTEYGEASQYQIQEVVGKGSYGVVASAECPHTGGKVAIKKMTNVFEHVSDAIRILREIKLLRLLRHPDIVEIKHIMLPPCRKEFKDIYVVFELMESDLHHVLKVNDDLTPQHHQFFLYQLLRGLKFMHSAHVFHRDLKPKNILANADCKIKICDLGLARVSFTDSPSAVFWTDYVATRWYRAPELCGSFYSNYTPAIDMWSVGCIFAEMLTGKPLFPGKNVVHQLELVTDLLGTPSPITLSRIRNEKARKYLGNMRRKDPVPFTHKFPNIDPVALKLLQRLIAFDPKDRPSAEEALADPYFQGLANVDYEPSRQPISKLEFEFERRKLTRDDVRELMYREESLKTFFFVLFLDMKQILEYHPQMLQEYLQGEENINSHFLYPRESVSYFGESILISSGVDQFKQEFARLEEHNDDEEEHNSPPHQRKYTSLPRERVCSSEDEGSDSVHAQSSSASVVFTPPQTPNTATGLSSQKASQVDKAATPVKRSACLMRSDSICASRCVGVSSAVS

SEQ ID NO: 44508 - protein, 470 aa, Arabidopsis thaliana
  peptide (1)..(470): Ceres Seq. ID no. 13509535
  misc_feature (1)..(261): Pfam Name: Protein kinase domain Pfam Description: Protein kinase domain
  misc_feature (1)..(336): Homolog of NCBI NO: 25406284 NR Description: probable MAP kinase F25P22.9 [imported] -
  misc_feature (1)..(336): Homolog of NCBI NO: 7106542 NR Description: ATMPK8 [Arabidopsis thaliana]
  misc_feature (1)..(336): Homolog of NCBI NO: 6689924 NR Description: MAP kinase homolog [Oryza sativa]
  misc_feature (1)..(336): Homolog of NCBI NO: 5815410 NR Description: blast and wounding induced mitogen-activated
  misc_feature (1)..(336): Homolog of NCBI NO: 15220976 NR Description: mitogen-activated protein kinase (MAPK), putative
  misc_feature (1)..(333): Homolog of NCBI NO: 7106544 NR Description: ATMPK9 [Arabidopsis thaliana]
  misc_feature (1)..(333): Homolog of NCBI NO: 18401750 NR Description: mitogen-activated protein kinase (MAPK), putative
  misc_feature (1)..(333): Homolog of NCBI NO: 9294059 NR Description: MAP kinase [Arabidopsis thaliana]
  misc_feature (1)..(342): Homolog of NCBI NO: 30677926 NR Description: mitogen-activated protein kinase (MAPK), putative
  misc_feature (1)..(470): Homolog of NCBI NO: 25410906 NR Description: probable MAP kinase [imported] - Arabidopsis
MTNVFEHVSDAIRILREIKLLRLLRHPDIVEIKHIMLPPCRKEFKDIYVVFELMESDLHHVLKVNDDLTPQHHQFFLYQLLRGLKFMHSAHVFHRDLKPKNILANADCKIKICDLGLARVSFTDSPSAVFWTDYVATRWYRAPELCGSFYSNYTPAIDMWSVGCIFAEMLTGKPLFPGKNVVHQLELVTDLLGTPSPITLSRIRNEKARKYLGNMRRKDPVPFTHKFPNIDPVALKLLQRLIAFDPKDRPSAEEALADPYFQGLANVDYEPSRQPISKLEFEFERRKLTRDDVRELMYREESLKTFFFVLFLDMKQILEYHPQMLQEYLQGEENINSHFLYPRESVSYFGESILISSGVDQFKQEFARLEEHNDDEEEHNSPPHQRKYTSLPRERVCSSEDEGSDSVHAQSSSASVVFTPPQTPNTATGLSSQKASQVDKAATPVKRSACLMRSDSICASRCVGVSSAVS

SEQ ID NO: 44509 - protein, 435 aa, Arabidopsis thaliana
  peptide (1)..(435): Ceres Seq. ID no. 13509536
  misc_feature (1)..(226): Pfam Name: Protein kinase domain Pfam Description: Protein kinase domain
  misc_feature (1)..(301): Homolog of NCBI NO: 25406284 NR Description: probable MAP kinase F25P22.9 [imported] -
  misc_feature (1)..(301): Homolog of NCBI NO: 7106542 NR Description: ATMPK8 [Arabidopsis thaliana]
  misc_feature (1)..(301): Homolog of NCBI NO: 6689924 NR Description: MAP kinase homolog [Oryza sativa]
  misc_feature (1)..(301): Homolog of NCBI NO: 5815410 NR Description: blast and wounding induced mitogen-activated
  misc_feature (1)..(301): Homolog of NCBI NO: 15220976 NR Description: mitogen-activated protein kinase (MAPK), putative
  misc_feature (1)..(298): Homolog of NCBI NO: 7106544 NR Description: ATMPK9 [Arabidopsis thaliana]
  misc_feature (1)..(298): Homolog of NCBI NO: 18401750 NR Description: mitogen-activated protein kinase (MAPK), putative
  misc_feature (1)..(298): Homolog of NCBI NO: 9294059 NR Description: MAP kinase [Arabidopsis thaliana]
  misc_feature (1)..(307): Homolog of NCBI NO: 30677926 NR Description: mitogen-activated protein kinase (MAPK), putative
  misc_feature (1)..(435): Homolog of NCBI NO: 25410906 NR Description: probable MAP kinase [imported] - Arabidopsis
MLPPCRKEFKDIYVVFELMESDLHHVLKVNDDLTPQHHQFFLYQLLRGLKFMHSAHVFHRDLKPKNILANADCKIKICDLGLARVSFTDSPSAVFWTDYVATRWYRAPELCGSFYSNYTPAIDMWSVGCIFAEMLTGKPLFPGKNVVHQLELVTDLLGTPSPITLSRIRNEKARKYLGNMRRKDPVPFTHKFPNIDPVALKLLQRLIAFDPKDRPSAEEALADPYFQGLANVDYEPSRQPISKLEFEFERRKLTRDDVRELMYREESLKTFFFVLFLDMKQILEYHPQMLQEYLQGEENINSHFLYPRESVSYFGESILISSGVDQFKQEFARLEEHNDDEEEHNSPPHQRKYTSLPRERVCSSEDEGSDSVHAQSSSASVVFTPPQTPNTATGLSSQKASQVDKAATPVKRSACLMRSDSICASRCVGVSSAVS

SEQ ID NO: 44510 - DNA, 928 bp, Arabidopsis thaliana
  misc_feature (1)..(928): Ceres Seq. ID no. 13575451
  misc_feature: MA Experiment ID: 20000169 Result: Up-regulated in Transcription
  misc_feature: MA Experiment 20000169 PARAMETER Experiment Name: At_100uM_ABA_P Parameter: Age (day) Value: 14
  misc_feature: MA Experiment 20000169 PARAMETER Experiment Name: At_100uM_ABA_P Parameter: Organism Value: A. thaliana
  misc_feature: MA Experiment 20000169 PARAMETER Experiment Name: At_100uM_ABA_P Parameter: Plant Line Value: WS
  misc_feature: MA Experiment 20000169 PARAMETER Experiment Name: At_100uM_ABA_P Parameter: Timepoint (hr) Value: 6
  misc_feature: MA Experiment 20000169 PARAMETER Experiment Name: At_100uM_ABA_P Parameter: Tissue Value: Aerial
  misc_feature: MA Experiment 20000169 PARAMETER Experiment Name: At_100uM_ABA_P Parameter: Treatment Value: 100uM ABA vs. No Treatment
  misc_feature: MA Experiment ID: 20000185 Result: Down-regulated in Transcription
  misc_feature: MA Experiment 20000185 PARAMETER Experiment Name: At_Roots__P Parameter: Age (day) Value: 7 vs. 21
  misc_feature: MA Experiment 20000185 PARAMETER Experiment Name: At_Roots__P Parameter: Organism Value: A. thaliana
  misc_feature: MA Experiment 20000185 PARAMETER Experiment Name: At_Roots__P Parameter: Tissue Value: Roots vs. Whole Plant
  misc_feature: MA Experiment ID: 20000264 Result: Up-regulated in Transcription
  misc_feature: MA Experiment 20000264 PARAMETER Experiment Name: At_Open_Flower_P Parameter: Age (day) Value: 21
  misc_feature: MA Experiment 20000264 PARAMETER Experiment Name: At_Open_Flower_P Parameter: Plant Line Value: WS
  misc_feature: MA Experiment 20000264 PARAMETER Experiment Name: At_Open_Flower_P Parameter: Tissue Value: Open Flower vs. Whole Plant
  misc_feature: MA Experiment ID: 20000265 Result: Up-regulated in Transcription
  misc_feature: MA Experiment 20000265 PARAMETER Experiment Name: At_Open_Flower_P Parameter: Age (day) Value: 21
  misc_feature: MA Experiment 20000265 PARAMETER Experiment Name: At_Open_Flower_P Parameter: Plant Line Value: WS
  misc_feature: MA Experiment 20000265 PARAMETER Experiment Name: At_Open_Flower_P Parameter: Tissue Value: Closed Flower vs. Whole Plant
  misc_feature: MA Experiment ID: 20000267 Result: Up-regulated in Transcription
  misc_feature: MA Experiment 20000267 PARAMETER Experiment Name: At_Drought_P Parameter: Age (day) Value: 7
  misc_feature: MA Experiment 20000267 PARAMETER Experiment Name: At_Drought_P Parameter: Organism Value: A. thaliana
  misc_feature: MA Experiment 20000267 PARAMETER Experiment Name: At_Drought_P Parameter: Plant Line Value: WS
  misc_feature: MA Experiment 20000267 PARAMETER Experiment Name: At_Drought_P Parameter: Timepoint (hr) Value: 6
  misc_feature: MA Experiment 20000267 PARAMETER Experiment Name: At_Drought_P Parameter: Tissue Value: Whole Plant
  misc_feature: MA Experiment 20000267 PARAMETER Experiment Name: At_Drought_P Parameter: Treatment Value: Drought vs. No Drought
  misc_feature: MA Experiment ID: 20000286 Result: Up-regulated in Transcription
  misc_feature: MA Experiment 20000286 PARAMETER Experiment Name: At_Open_Flower_P Parameter: Age (day) Value: 21
  misc_feature: MA Experiment 20000286 PARAMETER Experiment Name: At_Open_Flower_P Parameter: Plant Line Value: WS
  misc_feature: MA Experiment 20000286 PARAMETER Experiment Name: At_Open_Flower_P Parameter: Tissue Value: Half Open vs. Whole Plant
  misc_feature: MA Experiment ID: 20000436 Result: Up-regulated in Transcription
  misc_feature: MA Experiment 20000436 PARAMETER Experiment Name: At_Drought_P Parameter: Age (day) Value: 7
  misc_feature: MA Experiment 20000436 PARAMETER Experiment Name: At_Drought_P Parameter: Organism Value: A. thaliana
  misc_feature: MA Experiment 20000436 PARAMETER Experiment Name: At_Drought_P Parameter: Plant Line Value: WS
  misc_feature: MA Experiment 20000436 PARAMETER Experiment Name: At_Drought_P Parameter: Timepoint (hr) Value: 12
  misc_feature: MA Experiment 20000436 PARAMETER Experiment Name: At_Drought_P Parameter: Tissue Value: Whole Plant
  misc_feature: MA Experiment 20000436 PARAMETER Experiment Name: At_Drought_P Parameter: Treatment Value: Drought vs. No Drought
  misc_feature: MA Experiment ID: 20000456 Result: Down-regulated in Transcription
  misc_feature: MA Experiment 20000456 PARAMETER Experiment Name: At_100uM_BA_P Parameter: Age (day) Value: 14
  misc_feature: MA Experiment 20000456 PARAMETER Experiment Name: At_100uM_BA_P Parameter: Organism Value: A. thaliana
  misc_feature: MA Experiment 20000456 PARAMETER Experiment Name: At_100uM_BA_P Parameter: Plant Line Value: WS
  misc_feature: MA Experiment 20000456 PARAMETER Experiment Name: At_100uM_BA_P Parameter: Timepoint (hr) Value: 6
  misc_feature: MA Experiment 20000456 PARAMETER Experiment Name: At_100uM_BA_P Parameter: Tissue Value: Aerial
  misc_feature: MA Experiment 20000456 PARAMETER Experiment Name: At_100uM_BA_P Parameter: Treatment Value: 100uM BA vs. No Treatment
  misc_feature: MA Experiment ID: 20000495 Result: Down-regulated in Transcription
  misc_feature: MA Experiment 20000495 PARAMETER Experiment Name: At_Guard_Cells_P Parameter: Harvest Date Value: 8/2/2002
  misc_feature: MA Experiment 20000495 PARAMETER Experiment Name: At_Guard_Cells_P Parameter: Organism Value: A. thaliana
  misc_feature: MA Experiment 20000495 PARAMETER Experiment Name: At_Guard_Cells_P Parameter: Tissue Value: Guard Cells vs. Leaves
  misc_feature: MA Experiment ID: 20000709 Result: Down-regulated in Transcription
  misc_feature: MA Experiment 20000709 PARAMETER Experiment Name: At_15mM_NH4NO3_L-to-H_P Parameter: Age (hr) Value: 14
  misc_feature: MA Experiment 20000709 PARAMETER Experiment Name: At_15mM_NH4NO3_L-to-H_P Parameter: Organism Value: A. thaliana
  misc_feature: MA Experiment 20000709 PARAMETER Experiment Name: At_15mM_NH4NO3_L-to-H_P Parameter: Plant Line Value: WS
  misc_feature: MA Experiment 20000709 PARAMETER Experiment Name: At_15mM_NH4NO3_L-to-H_P Parameter: Timepoint (hr) Value: 4
  misc_feature: MA Experiment 20000709 PARAMETER Experiment Name: At_15mM_NH4NO3_L-to-H_P Parameter: Tissue Value: Aerial
  misc_feature: MA Experiment 20000709 PARAMETER Experiment Name: At_15mM_NH4NO3_L-to-H_P Parameter: Treatment Value: 15mM NH4NO3 vs. 30mM Mannitol
  misc_feature: MA Experiment ID: 20000794 Result: Up-regulated in Transcription
  misc_feature: MA Experiment 20000794 PARAMETER Experiment Name: At_Petals_P Parameter: Age (day) Value: 23-25 days
  misc_feature: MA Experiment 20000794 PARAMETER Experiment Name: At_Petals_P Parameter: Plant Line Value: WS
  misc_feature: MA Experiment 20000794 PARAMETER Experiment Name: At_Petals_P Parameter: Tissue Value: Petals vs. Whole plant
  misc_feature: MA Experiment ID: 20001247 Result: Down-regulated in Transcription
  misc_feature: MA Experiment 20001247 PARAMETER Experiment Name: At_Far-red-induction_P Parameter: Age (day) Value: 7
  misc_feature: MA Experiment 20001247 PARAMETER Experiment Name: At_Far-red-induction_P Parameter: Light Value: Far-red vs. White
  misc_feature: MA Experiment 20001247 PARAMETER Experiment Name: At_Far-red-induction_P Parameter: Organism Value: A. thaliana
  misc_feature: MA Experiment 20001247 PARAMETER Experiment Name: At_Far-red-induction_P Parameter: Plant Line Value: Columbia
  misc_feature: MA Experiment 20001247 PARAMETER Experiment Name: At_Far-red-induction_P Parameter: Timepoint (hr) Value: 1
  misc_feature: MA Experiment 20001247 PARAMETER Experiment Name: At_Far-red-induction_P Parameter: Tissue Value: Whole Plant
  misc_feature: MA Experiment ID: 20001450 Result: Down-regulated in Transcription
  misc_feature: MA Experiment 20001450 PARAMETER Experiment Name: At_Far-red-induction_P Parameter: Age (day) Value: 7
  misc_feature: MA Experiment 20001450 PARAMETER Experiment Name: At_Far-red-induction_P Parameter: Light Value: Far-red vs. White
  misc_feature: MA Experiment 20001450 PARAMETER Experiment Name: At_Far-red-induction_P Parameter: Organism Value: A. thaliana
  misc_feature: MA Experiment 20001450 PARAMETER Experiment Name: At_Far-red-induction_P Parameter: Plant Line Value: Columbia
  misc_feature: MA Experiment 20001450 PARAMETER Experiment Name: At_Far-red-induction_P Parameter: Timepoint (hr) Value: 8
  misc_feature: MA Experiment 20001450 PARAMETER Experiment Name: At_Far-red-induction_P Parameter: Tissue Value: Whole Plant
  misc_feature: MA Experiment ID: 20001451 Result: Down-regulated in Transcription
  misc_feature: MA Experiment 20001451 PARAMETER Experiment Name: At_Far-red-induction_P Parameter: Age (day) Value: 7
  misc_feature: MA Experiment 20001451 PARAMETER Experiment Name: At_Far-red-induction_P Parameter: Light Value: Far-red vs. White
  misc_feature: MA Experiment 20001451 PARAMETER Experiment Name: At_Far-red-induction_P Parameter: Organism Value: A. thaliana
  misc_feature: MA Experiment 20001451 PARAMETER Experiment Name: At_Far-red-induction_P Parameter: Plant Line Value: Columbia
  misc_feature: MA Experiment 20001451 PARAMETER Experiment Name: At_Far-red-induction_P Parameter: Timepoint (hr) Value: 24
  misc_feature: MA Experiment 20001451 PARAMETER Experiment Name: At_Far-red-induction_P Parameter: Tissue Value: Whole Plant
  misc_feature: MA Experiment ID: 20001556 Result: Down-regulated in Transcription
  misc_feature: MA Experiment 20001556 PARAMETER Experiment Name: At_Drought_Soil_Dry_P Parameter: Age (day) Value: 26
  misc_feature: MA Experiment 20001556 PARAMETER Experiment Name: At_Drought_Soil_Dry_P Parameter: Organism Value: A. thaliana
  misc_feature: MA Experiment 20001556 PARAMETER Experiment Name: At_Drought_Soil_Dry_P Parameter: Plant Line Value: WS
  misc_feature: MA Experiment 20001556 PARAMETER Experiment Name: At_Drought_Soil_Dry_P Parameter: Post Timepoint (hr) Value: None
  misc_feature: MA Experiment 20001556 PARAMETER Experiment Name: At_Drought_Soil_Dry_P Parameter: Post-Treatment Value: None
  misc_feature: MA Experiment 20001556 PARAMETER Experiment Name: At_Drought_Soil_Dry_P Parameter: Timepoint (day) Value: 12
  misc_feature: MA Experiment 20001556 PARAMETER Experiment Name: At_Drought_Soil_Dry_P Parameter: Treatment Value: Drought vs. No Drought
  misc_feature: MA Experiment ID: 20001558 Result: Down-regulated in Transcription
  misc_feature: MA Experiment 20001558 PARAMETER Experiment Name: At_Drought_Soil_Dry_P Parameter: Age (day) Value: 27
  misc_feature: MA Experiment 20001558 PARAMETER Experiment Name: At_Drought_Soil_Dry_P Parameter: Organism Value: A. thaliana
  misc_feature: MA Experiment 20001558 PARAMETER Experiment Name: At_Drought_Soil_Dry_P Parameter: Plant Line Value: WS
  misc_feature: MA Experiment 20001558 PARAMETER Experiment Name: At_Drought_Soil_Dry_P Parameter: Post Timepoint (hr) Value: 6
  misc_feature: MA Experiment 20001558 PARAMETER Experiment Name: At_Drought_Soil_Dry_P Parameter: Post-Treatment Value: Re-Water vs. No Drought
  misc_feature: MA Experiment 20001558 PARAMETER Experiment Name: At_Drought_Soil_Dry_P Parameter: Timepoint (day) Value: 13
  misc_feature: MA Experiment 20001558 PARAMETER Experiment Name: At_Drought_Soil_Dry_P Parameter: Treatment Value: Drought vs. No Drought
  misc_feature: MA Experiment ID: 20001560 Result: Down-regulated in Transcription
  misc_feature: MA Experiment 20001560 PARAMETER Experiment Name: At_Drought_Soil_Dry_P Parameter: Age (day) Value: 28
  misc_feature: MA Experiment 20001560 PARAMETER Experiment Name: At_Drought_Soil_Dry_P Parameter: Organism Value: A. thaliana
  misc_feature: MA Experiment 20001560 PARAMETER Experiment Name: At_Drought_Soil_Dry_P Parameter: Plant Line Value: WS
  misc_feature: MA Experiment 20001560 PARAMETER Experiment Name: At_Drought_Soil_Dry_P Parameter: Post Timepoint (hr) Value: None
  misc_feature: MA Experiment 20001560 PARAMETER Experiment Name: At_Drought_Soil_Dry_P Parameter: Post-Treatment Value: None
  misc_feature: MA Experiment 20001560 PARAMETER Experiment Name: At_Drought_Soil_Dry_P Parameter: Timepoint (day) Value: 14
  misc_feature: MA Experiment 20001560 PARAMETER Experiment Name: At_Drought_Soil_Dry_P Parameter: Treatment Value: Drought vs. No Drought
  misc_feature: MA Experiment ID: 20001757 Result: Down-regulated in Transcription
  misc_feature: MA Experiment 20001757 PARAMETER Experiment Name: At_50mM_NH4NO3_L-to-H_P Parameter: Timepoint (hr) Value: 6
  misc_feature: MA Experiment 20001757 PARAMETER Experiment Name: At_50mM_NH4NO3_L-to-H_P Parameter: Tissue Value: Leaf
  misc_feature: MA Experiment 20001757 PARAMETER Experiment Name: At_50mM_NH4NO3_L-to-H_P Parameter: Treatment Value: 50mM NH4NO3 vs 100mM Mannitol
  misc_feature: MA Experiment ID: 20001761 Result: Down-regulated in Transcription
  misc_feature: MA Experiment 20001761 PARAMETER Experiment Name: At_50mM_NH4NO3_L-to-H_P Parameter: Timepoint (hr) Value: 4
  misc_feature: MA Experiment 20001761 PARAMETER Experiment Name: At_50mM_NH4NO3_L-to-H_P Parameter: Tissue Value: Siliques
  misc_feature: MA Experiment 20001761 PARAMETER Experiment Name: At_50mM_NH4NO3_L-to-H_P Parameter: Treatment Value: 50mM NH4NO3 vs 100mM Mannitol
  misc_feature: MA Experiment ID: 20001770 Result: Up-regulated in Transcription
  misc_feature: MA Experiment 20001770 PARAMETER Experiment Name: At_Far-red-enriched-adult_P Parameter: Age (day) Value: 28
  misc_feature: MA Experiment 20001770 PARAMETER Experiment Name: At_Far-red-enriched-adult_P Parameter: Light Value: Far-red enriched vs. White
  misc_feature: MA Experiment 20001770 PARAMETER Experiment Name: At_Far-red-enriched-adult_P Parameter: Organism Value: A. thaliana
  misc_feature: MA Experiment 20001770 PARAMETER Experiment Name: At_Far-red-enriched-adult_P Parameter: Plant Line Value: Columbia
  misc_feature: MA Experiment 20001770 PARAMETER Experiment Name: At_Far-red-enriched-adult_P Parameter: Timepoint (hr) Value: 8
  misc_feature: MA Experiment 20001770 PARAMETER Experiment Name: At_Far-red-enriched-adult_P Parameter: Tissue Value: Aerial
  misc_feature: MA Experiment ID: 20001905 Result: Down-regulated in Transcription
  misc_feature: MA Experiment 20001905 PARAMETER Experiment Name: At_Drought_Reproduction_P Parameter: Age (day) Value: 40
  misc_feature: MA Experiment 20001905 PARAMETER Experiment Name: At_Drought_Reproduction_P Parameter: Organism Value: A. thaliana
  misc_feature: MA Experiment 20001905 PARAMETER Experiment Name: At_Drought_Reproduction_P Parameter: Plant Line Value: WS
  misc_feature: MA Experiment 20001905 PARAMETER Experiment Name: At_Drought_Reproduction_P Parameter: Timepoint (day) Value: 10
  misc_feature: MA Experiment 20001905 PARAMETER Experiment Name: At_Drought_Reproduction_P Parameter: Tissue Value: Rosettes
  misc_feature: MA Experiment 20001905 PARAMETER Experiment Name: At_Drought_Reproduction_P Parameter: Treatment Value: Drought vs. No Drought
  misc_feature: MA Experiment ID: 20001911 Result: Down-regulated in Transcription
  misc_feature: MA Experiment 20001911 PARAMETER Experiment Name: At_Drought_Reproduction_P Parameter: Age (day) Value: 40
  misc_feature: MA Experiment 20001911 PARAMETER Experiment Name: At_Drought_Reproduction_P Parameter: Organism Value: A. thaliana
  misc_feature: MA Experiment 20001911 PARAMETER Experiment Name: At_Drought_Reproduction_P Parameter: Plant Line Value: WS
  misc_feature: MA Experiment 20001911 PARAMETER Experiment Name: At_Drought_Reproduction_P Parameter: Timepoint (day) Value: 10
  misc_feature: MA Experiment 20001911 PARAMETER Experiment Name: At_Drought_Reproduction_P Parameter: Tissue Value: Flowers
  misc_feature: MA Experiment 20001911 PARAMETER Experiment Name: At_Drought_Reproduction_P Parameter: Treatment Value: Drought vs. No Drought
atctacaaacattaaatccacctgaactagaacagaaagagagagaaactattatttcagcaaaccataccaacaaaaaagacagagatcttttagttaccttatccagtttcttgaaacagagtactcttctgatcaatgaactcattttctgctttttctgaaatgtttggctccgattacgagtcttcggtttcctcaggcggtgattatattccgacgcttgcgagcagctgccccaagaaaccggcgggtcgtaagaagtttcgtgagactcgtcacccaatatacagaggagttcgtcggagaaactccggtaagtgggtttgtgaggttagagaaccaaacaagaaaacaaggatttggctcggaacatttcaaaccgctgagatggcagctcgagctcacgacgttgccgctttagcccttcgtggccgatcagcctgtctcaatttcgctgactcggcttggagactccgaatcccggaatcaacttgcgctaaggacatccaaaaggcggcggctgaagctgcgttggcgtttcaggatgagatgtgtgatgcgacgacggatcatggcttcgacatggaggagacgttggtggaggctatttacacggcggaacagagcgaaaatgcgttttatatgcacgatgaggcgatgtttgagatgccgagtttgttggctaatatggcagaagggatgcttttgccgcttccgtccgtacagtggaatcataatcatgaagtcgacggcgatgatgacgacgtatcgttatggagttattaaaactcagattattatttccatttttagtacgatactttttattttattattatttttagatccttttttagaatggaatcttcattatgtttgtaaaactgagaaacgagtgtaaattaaattgattcagtttcagtat

SEQ ID NO: 44511 - protein, 216 aa, Arabidopsis thaliana
  peptide (1)..(216): Ceres Seq. ID no. 13575452
  misc_feature (48)..(112): Pfam Name: AP2 domain Pfam Description: AP2 domain
  misc_feature (2)..(216): Homolog of NCBI NO: 39983638 NR Description: CBF25 [Capsella bursa-pastoris]
  misc_feature (1)..(216): Homolog of NCBI NO: 38683266 NR Description: Cbcbf [Capsella bursa-pastoris]
  misc_feature (1)..(216): Homolog of NCBI NO: 18416562 NR Description: C-repeat/DRE binding factor 1 (CBF1) (DREB1B)
  misc_feature (1)..(216): Homolog of NCBI NO: 1899058 NR Description: transcriptional activator CBF1 [Arabidopsis
  misc_feature (1)..(216): Homolog of NCBI NO: 4091984 NR Description: CRT/DRE binding factor 2 [Arabidopsis thaliana]
  misc_feature (1)..(216): Homolog of NCBI NO: 18416557 NR Description: DRE binding protein (DREB1C) [Arabidopsis
  misc_feature (1)..(216): Homolog of NCBI NO: 7484941 NR Description: DRE/CRT-binding protein DREB1A - Arabidopsis
  misc_feature (1)..(216): Homolog of NCBI NO: 18416559 NR Description: DRE binding protein (DREB1A) [Arabidopsis
  misc_feature (1)..(214): Homolog of NCBI NO: 25407593 NR Description: transcription activator CBF1-like protein
  misc_feature (1)..(215): Homolog of NCBI NO: 7488378 NR Description: transcription activator CBF1 homolog M7J2.150 -
MNSFSAFSEMFGSDYESSVSSGGDYIPTLASSCPKKPAGRKKFRETRHPIYRGVRRRNSGKWVCEVREPNKKTRIWLGTFQTAEMAARAHDVAALALRGRSACLNFADSAWRLRIPESTCAKDIQKAAAEAALAFQDEMCDATTDHGFDMEETLVEAIYTAEQSENAFYMHDEAMFEMPSLLANMAEGMLLPLPSVQWNHNHEVDGDDDDVSLWSY

SEQ ID NO: 44512 - protein, 207 aa, Arabidopsis thaliana
  peptide (1)..(207): Ceres Seq. ID no. 13575453
  misc_feature (39)..(103): Pfam Name: AP2 domain Pfam Description: AP2 domain
  misc_feature (1)..(207): Homolog of NCBI NO: 39983638 NR Description: CBF25 [Capsella bursa-pastoris]
  misc_feature (1)..(207): Homolog of NCBI NO: 38683266 NR Description: Cbcbf [Capsella bursa-pastoris]
  misc_feature (1)..(207): Homolog of NCBI NO: 18416562 NR Description: C-repeat/DRE binding factor 1 (CBF1) (DREB1B)
  misc_feature (1)..(207): Homolog of NCBI NO: 1899058 NR Description: transcriptional activator CBF1 [Arabidopsis
  misc_feature (1)..(207): Homolog of NCBI NO: 4091984 NR Description: CRT/DRE binding factor 2 [Arabidopsis thaliana]
  misc_feature (1)..(207): Homolog of NCBI NO: 18416557 NR Description: DRE binding protein (DREB1C) [Arabidopsis
  misc_feature (1)..(207): Homolog of NCBI NO: 7484941 NR Description: DRE/CRT-binding protein DREB1A - Arabidopsis
  misc_feature (1)..(207): Homolog of NCBI NO: 18416559 NR Description: DRE binding protein (DREB1A) [Arabidopsis
  misc_feature (1)..(205): Homolog of NCBI NO: 25407593 NR Description: transcription activator CBF1-like protein
  misc_feature (1)..(206): Homolog of NCBI NO: 7488378 NR Description: transcription activator CBF1 homolog M7J2.150 -
MFGSDYESSVSSGGDYIPTLASSCPKKPAGRKKFRETRHPIYRGVRRRNSGKWVCEVREPNKKTRIWLGTFQTAEMAARAHDVAALALRGRSACLNFADSAWRLRIPESTCAKDIQKAAAEAALAFQDEMCDATTDHGFDMEETLVEAIYTAEQSENAFYMHDEAMFEMPSLLANMAEGMLLPLPSVQWNHNHEVDGDDDDVSLWSY

SEQ ID NO: 44513 - protein, 132 aa, Arabidopsis thaliana
  peptide (1)..(132): Ceres Seq. ID no. 13575454
  misc_feature (1)..(132): Homolog of NCBI NO: 39983638 NR Description: CBF25 [Capsella bursa-pastoris]
  misc_feature (1)..(132): Homolog of NCBI NO: 38683266 NR Description: Cbcbf [Capsella bursa-pastoris]
  misc_feature (1)..(132): Homolog of NCBI NO: 18416562 NR Description: C-repeat/DRE binding factor 1 (CBF1) (DREB1B)
  misc_feature (1)..(132): Homolog of NCBI NO: 1899058 NR Description: transcriptional activator CBF1 [Arabidopsis
  misc_feature (1)..(132): Homolog of NCBI NO: 4091984 NR Description: CRT/DRE binding factor 2 [Arabidopsis thaliana]
  misc_feature (1)..(132): Homolog of NCBI NO: 18416557 NR Description: DRE binding protein (DREB1C) [Arabidopsis
  misc_feature (1)..(132): Homolog of NCBI NO: 7484941 NR Description: DRE/CRT-binding protein DREB1A - Arabidopsis
  misc_feature (1)..(132): Homolog of NCBI NO: 18416559 NR Description: DRE binding protein (DREB1A) [Arabidopsis
  misc_feature (1)..(130): Homolog of NCBI NO: 25407593 NR Description: transcription activator CBF1-like protein
  misc_feature (1)..(131): Homolog of NCBI NO: 7488378 NR Description: transcription activator CBF1 homolog M7J2.150 -
MAARAHDVAALALRGRSACLNFADSAWRLRIPESTCAKDIQKAAAEAALAFQDEMCDATTDHGFDMEETLVEAIYTAEQSENAFYMHDEAMFEMPSLLANMAEGMLLPLPSVQWNHNHEVDGDDDDVSLWSY

SEQ ID NO: 44514 - DNA, 1031 bp, Arabidopsis thaliana
  misc_feature (1)..(1031): Ceres Seq. ID no. 12462090
  misc_feature: MA Experiment ID: 20000180 Result: Up-regulated in Transcription
  misc_feature: MA Experiment 20000180 PARAMETER Experiment Name: At_Germinating_Seeds_P Parameter: Age (hr) Value: 24 vs. 0
  misc_feature: MA Experiment 20000180 PARAMETER Experiment Name: At_Germinating_Seeds_P Parameter: Tissue Value: Germinating Seeds
  misc_feature: MA Experiment ID: 20000185 Result: Down-regulated in Transcription
  misc_feature: MA Experiment 20000185 PARAMETER Experiment Name: At_Roots__P Parameter: Age (day) Value: 7 vs. 21
  misc_feature: MA Experiment 20000185 PARAMETER Experiment Name: At_Roots__P Parameter: Organism Value: A. thaliana
  misc_feature: MA Experiment 20000185 PARAMETER Experiment Name: At_Roots__P Parameter: Tissue Value: Roots vs. Whole Plant
  misc_feature: MA Experiment ID: 20000227 Result: Down-regulated in Transcription
  misc_feature: MA Experiment 20000227 PARAMETER Experiment Name: At_Root-Tips-vs-Tops_P Parameter: Tissue Value: Root Tips vs. Root Tops
  misc_feature: MA Experiment ID: 20000269 Result: Down-regulated in Transcription
  misc_feature: MA Experiment 20000269 PARAMETER Experiment Name: At_1mM_KNO3_L-vs-H_Roots_P Parameter: Age (day) Value: 7,10,12
  misc_feature: MA Experiment 20000269 PARAMETER Experiment Name: At_1mM_KNO3_L-vs-H_Roots_P Parameter: Organism Value: A. thaliana
  misc_feature: MA Experiment 20000269 PARAMETER Experiment Name: At_1mM_KNO3_L-vs-H_Roots_P Parameter: Plant Line Value: WS
  misc_feature: MA Experiment 20000269 PARAMETER Experiment Name: At_1mM_KNO3_L-vs-H_Roots_P Parameter: Timepoint (day) Value: 7,10,12
  misc_feature: MA Experiment 20000269 PARAMETER Experiment Name: At_1mM_KNO3_L-vs-H_Roots_P Parameter: Tissue Value: Roots
  misc_feature: MA Experiment 20000269 PARAMETER Experiment Name: At_1mM_KNO3_L-vs-H_Roots_P Parameter: Treatment Value: 1mM KNO3 vs. 50mM KNO3
  misc_feature: MA Experiment ID: 20000439 Result: Down-regulated in Transcription
  misc_feature: MA Experiment 20000439 PARAMETER Experiment Name: At_Roots__P Parameter: Age (day) Value: 14 vs. 21
  misc_feature: MA Experiment 20000439 PARAMETER Experiment Name: At_Roots__P Parameter: Organism Value: A. thaliana
  misc_feature: MA Experiment 20000439 PARAMETER Experiment Name: At_Roots__P Parameter: Tissue Value: Roots vs. Whole Plant
  misc_feature: MA Experiment ID: 20000496 Result: Down-regulated in Transcription
  misc_feature: MA Experiment 20000496 PARAMETER Experiment Name: At_Guard_Cells_P Parameter: Harvest Date Value: 7/19/2002
  misc_feature: MA Experiment 20000496 PARAMETER Experiment Name: At_Guard_Cells_P Parameter: Organism Value: Canola
  misc_feature: MA Experiment 20000496 PARAMETER Experiment Name: At_Guard_Cells_P Parameter: Tissue Value: Guard Cells vs. Leaves
  misc_feature: MA Experiment ID: 20001248 Result: Down-regulated in Transcription
  misc_feature: MA Experiment 20001248 PARAMETER Experiment Name: At_Far-red-induction_P Parameter: Age (day) Value: 7
  misc_feature: MA Experiment 20001248 PARAMETER Experiment Name: At_Far-red-induction_P Parameter: Light Value: Far-red vs. White
  misc_feature: MA Experiment 20001248 PARAMETER Experiment Name: At_Far-red-induction_P Parameter: Organism Value: A. thaliana
  misc_feature: MA Experiment 20001248 PARAMETER Experiment Name: At_Far-red-induction_P Parameter: Plant Line Value: Columbia
  misc_feature: MA Experiment 20001248 PARAMETER Experiment Name: At_Far-red-induction_P Parameter: Timepoint (hr) Value: 4
  misc_feature: MA Experiment 20001248 PARAMETER Experiment Name: At_Far-red-induction_P Parameter: Tissue Value: Whole Plant
  misc_feature: MA Experiment ID: 20001451 Result: Down-regulated in Transcription
  misc_feature: MA Experiment 20001451 PARAMETER Experiment Name: At_Far-red-induction_P Parameter: Age (day) Value: 7
  misc_feature: MA Experiment 20001451 PARAMETER Experiment Name: At_Far-red-induction_P Parameter: Light Value: Far-red vs. White
  misc_feature: MA Experiment 20001451 PARAMETER Experiment Name: At_Far-red-induction_P Parameter: Organism Value: A. thaliana
  misc_feature: MA Experiment 20001451 PARAMETER Experiment Name: At_Far-red-induction_P Parameter: Plant Line Value: Columbia
  misc_feature: MA Experiment 20001451 PARAMETER Experiment Name: At_Far-red-induction_P Parameter: Timepoint (hr) Value: 24
  misc_feature: MA Experiment 20001451 PARAMETER Experiment Name: At_Far-red-induction_P Parameter: Tissue Value: Whole Plant
  misc_feature: MA Experiment ID: 20001557 Result: Down-regulated in Transcription
  misc_feature: MA Experiment 20001557 PARAMETER Experiment Name: At_Drought_Soil_Dry_P Parameter: Age (day) Value: 27
  misc_feature: MA Experiment 20001557 PARAMETER Experiment Name: At_Drought_Soil_Dry_P Parameter: Organism Value: A. thaliana
  misc_feature: MA Experiment 20001557 PARAMETER Experiment Name: At_Drought_Soil_Dry_P Parameter: Plant Line Value: WS
  misc_feature: MA Experiment 20001557 PARAMETER Experiment Name: At_Drought_Soil_Dry_P Parameter: Post Timepoint (hr) Value: 3
  misc_feature: MA Experiment 20001557 PARAMETER Experiment Name: At_Drought_Soil_Dry_P Parameter: Post-Treatment Value: Re-Water vs. No Drought
  misc_feature: MA Experiment 20001557 PARAMETER Experiment Name: At_Drought_Soil_Dry_P Parameter: Timepoint (day) Value: 13
  misc_feature: MA Experiment 20001557 PARAMETER Experiment Name: At_Drought_Soil_Dry_P Parameter: Treatment Value: Drought vs. No Drought
  misc_feature: MA Experiment ID: 20001560 Result: Down-regulated in Transcription
  misc_feature: MA Experiment 20001560 PARAMETER Experiment Name: At_Drought_Soil_Dry_P Parameter: Age (day) Value: 28
  misc_feature: MA Experiment 20001560 PARAMETER Experiment Name: At_Drought_Soil_Dry_P Parameter: Organism Value: A. thaliana
  misc_feature: MA Experiment 20001560 PARAMETER Experiment Name: At_Drought_Soil_Dry_P Parameter: Plant Line Value: WS
  misc_feature: MA Experiment 20001560 PARAMETER Experiment Name: At_Drought_Soil_Dry_P Parameter: Post Timepoint (hr) Value: None
  misc_feature: MA Experiment 20001560 PARAMETER Experiment Name: At_Drought_Soil_Dry_P Parameter: Post-Treatment Value: None
  misc_feature: MA Experiment 20001560 PARAMETER Experiment Name: At_Drought_Soil_Dry_P Parameter: Timepoint (day) Value: 14
  misc_feature: MA Experiment 20001560 PARAMETER Experiment Name: At_Drought_Soil_Dry_P Parameter: Treatment Value: Drought vs. No Drought
  misc_feature: MA Experiment ID: 20001905 Result: Down-regulated in Transcription
  misc_feature: MA Experiment 20001905 PARAMETER Experiment Name: At_Drought_Reproduction_P Parameter: Age (day) Value: 40
  misc_feature: MA Experiment 20001905 PARAMETER Experiment Name: At_Drought_Reproduction_P Parameter: Organism Value: A. thaliana
  misc_feature: MA Experiment 20001905 PARAMETER Experiment Name: At_Drought_Reproduction_P Parameter: Plant Line Value: WS
  misc_feature: MA Experiment 20001905 PARAMETER Experiment Name: At_Drought_Reproduction_P Parameter: Timepoint (day) Value: 10
  misc_feature: MA Experiment 20001905 PARAMETER Experiment Name: At_Drought_Reproduction_P Parameter: Tissue Value: Rosettes
  misc_feature: MA Experiment 20001905 PARAMETER Experiment Name: At_Drought_Reproduction_P Parameter: Treatment Value: Drought vs. No Drought
gtcagccatggcaaagacagagctacaacgatctctctctcttttcttcttcttctgtgtctgtctttaaatagagtctctttgaaacgaagcagctttgtcctgttctgatatccatggctttaccttcgtgcttaaagactggagctttaatgtctccggccactggatttaatttttccggcagtcttatgaagtcagacagcggcttcgccgttccgacaaagttacagagtactcgaaaaggtgatcgagagagattgagagtccaagctattttcagtttccctcctgcgtttctgacaagaaacggtcgagctgagaaacagaaacagctcaaacaagaacttcttgaagccattgagcctcttgaacgtggtgctacggcctcgcctgatgaccagcttcggattgatcagttagcgcgtaaagtggaagcagttaatcccaccaaggagcctttgaagtctgatttggtcaatggaaaatgggagctcatttatacaacctctgcttcgattttgcaggcaaagaaaccaaggttcttaagatcaataaccaactaccaatctatcaatgtggatacacttaaggtgcaaaacatggagacttggcctttctataactcggtaactggagacataaaacccctcaattcgaagaaggttgctgtgaaactccaagtgtttaaaattctcggatttattcctataaaagcacctgatagcgcccgcggtgaacttgagattacctatgtggacgaggaactacggttatcaagaggtgacaaagggaacttgtttatattgaagatgtttgatcccacttatcgaatccctctttgatctaccaaacaaatggtaccgagccatccatcatacatacttgctacaacttgctatgtctctcttcatcatgtatgtaatctaacataagaaaaattaataagagggaaaaaatgagacgagcttctgtcattgtttcaacttgttcaaatcaaagattctgaatcttgatttggttgagcagtt

SEQ ID NO: 44515 - protein, 242 aa, Arabidopsis thaliana
  peptide (1)..(242): Ceres Seq. ID no. 12462091
  misc_feature (72)..(232): Pfam Name: PAP_fibrillin Pfam Description: PAP_fibrillin
  misc_feature (75)..(189): Homolog of NCBI NO: 23126201 NR Description: hypothetical protein [Nostoc punctiforme]
  misc_feature (199)..(231): Homolog of NCBI NO: 17231810 NR Description: fibrillin [Nostoc sp. PCC 7120]
  misc_feature (75)..(189): Homolog of NCBI NO: 17231810 NR Description: fibrillin [Nostoc sp. PCC 7120]
  misc_feature (196)..(231): Homolog of NCBI NO: 5020103 NR Description: fibrillin [Nostoc sp. PCC 8009]
  misc_feature (75)..(189): Homolog of NCBI NO: 5020103 NR Description: fibrillin [Nostoc sp. PCC 8009]
  misc_feature (1)..(242): Homolog of NCBI NO: 9279613 NR Description: gene_id:MPE11.25~unknown protein [Arabidopsis
  misc_feature (219)..(242): Homolog of NCBI NO: 15230986 NR Description: unknown protein; protein id: At3g26080.1
  misc_feature (1)..(219): Homolog of NCBI NO: 15230986 NR Description: unknown protein; protein id: At3g26080.1
  misc_feature (26)..(242): Homolog of NCBI NO: 17065226 NR Description: Unknown protein [Arabidopsis thaliana]
  misc_feature (1)..(242): Homolog of NCBI NO: 30688146 NR Description: plastid-lipid associated protein PAP/fibrillin
MALPSCLKTGALMSPATGFNFSGSLMKSDSGFAVPTKLQSTRKGDRERLRVQAIFSFPPAFLTRNGRAEKQKQLKQELLEAIEPLERGATASPDDQLRIDQLARKVEAVNPTKEPLKSDLVNGKWELIYTTSASILQAKKPRFLRSITNYQSINVDTLKVQNMETWPFYNSVTGDIKPLNSKKVAVKLQVFKILGFIPIKAPDSARGELEITYVDEELRLSRGDKGNLFILKMFDPTYRIPL

SEQ ID NO: 44516 - protein, 230 aa, Arabidopsis thaliana
  peptide (1)..(230): Ceres Seq. ID no. 12462092
  misc_feature (60)..(220): Pfam Name: PAP_fibrillin Pfam Description: PAP_fibrillin
  misc_feature (63)..(177): Homolog of NCBI NO: 23126201 NR Description: hypothetical protein [Nostoc punctiforme]
  misc_feature (187)..(219): Homolog of NCBI NO: 17231810 NR Description: fibrillin [Nostoc sp. PCC 7120]
  misc_feature (63)..(177): Homolog of NCBI NO: 17231810 NR Description: fibrillin [Nostoc sp. PCC 7120]
  misc_feature (184)..(219): Homolog of NCBI NO: 5020103 NR Description: fibrillin [Nostoc sp. PCC 8009]
  misc_feature (63)..(177): Homolog of NCBI NO: 5020103 NR Description: fibrillin [Nostoc sp. PCC 8009]
  misc_feature (1)..(230): Homolog of NCBI NO: 9279613 NR Description: gene_id:MPE11.25~unknown protein [Arabidopsis
  misc_feature (207)..(230): Homolog of NCBI NO: 15230986 NR Description: unknown protein; protein id: At3g26080.1
  misc_feature (1)..(207): Homolog of NCBI NO: 15230986 NR Description: unknown protein; protein id: At3g26080.1
  misc_feature (14)..(230): Homolog of NCBI NO: 17065226 NR Description: Unknown protein [Arabidopsis thaliana]
  misc_feature (1)..(230): Homolog of NCBI NO: 30688146 NR Description: plastid-lipid associated protein PAP/fibrillin
MSPATGFNFSGSLMKSDSGFAVPTKLQSTRKGDRERLRVQAIFSFPPAFLTRNGRAEKQKQLKQELLEAIEPLERGATASPDDQLRIDQLARKVEAVNPTKEPLKSDLVNGKWELIYTTSASILQAKKPRFLRSITNYQSINVDTLKVQNMETWPFYNSVTGDIKPLNSKKVAVKLQVFKILGFIPIKAPDSARGELEITYVDEELRLSRGDKGNLFILKMFDPTYRIPL

SEQ ID NO: 44517 - protein, 217 aa, Arabidopsis thaliana
  peptide (1)..(217): Ceres Seq. ID no. 12462093
  misc_feature (47)..(207): Pfam Name: PAP_fibrillin Pfam Description: PAP_fibrillin
  misc_feature (50)..(164): Homolog of NCBI NO: 23126201 NR Description: hypothetical protein [Nostoc punctiforme]
  misc_feature (174)..(206): Homolog of NCBI NO: 17231810 NR Description: fibrillin [Nostoc sp. PCC 7120]
  misc_feature (50)..(164): Homolog of NCBI NO: 17231810 NR Description: fibrillin [Nostoc sp. PCC 7120]
  misc_feature (171)..(206): Homolog of NCBI NO: 5020103 NR Description: fibrillin [Nostoc sp. PCC 8009]
  misc_feature (50)..(164): Homolog of NCBI NO: 5020103 NR Description: fibrillin [Nostoc sp. PCC 8009]
  misc_feature (1)..(217): Homolog of NCBI NO: 9279613 NR Description: gene_id:MPE11.25~unknown protein [Arabidopsis
  misc_feature (194)..(217): Homolog of NCBI NO: 15230986 NR Description: unknown protein; protein id: At3g26080.1
  misc_feature (1)..(194): Homolog of NCBI NO: 15230986 NR Description: unknown protein; protein id: At3g26080.1
  misc_feature (1)..(217): Homolog of NCBI NO: 17065226 NR Description: Unknown protein [Arabidopsis thaliana]
  misc_feature (1)..(217): Homolog of NCBI NO: 30688146 NR Description: plastid-lipid associated protein PAP/fibrillin
MKSDSGFAVPTKLQSTRKGDRERLRVQAIFSFPPAFLTRNGRAEKQKQLKQELLEAIEPLERGATASPDDQLRIDQLARKVEAVNPTKEPLKSDLVNGKWELIYTTSASILQAKKPRFLRSITNYQSINVDTLKVQNMETWPFYNSVTGDIKPLNSKKVAVKLQVFKILGFIPIKAPDSARGELEITYVDEELRLSRGDKGNLFILKMFDPTYRIPL

SEQ ID NO: 44518 - DNA, 865 bp, Arabidopsis thaliana; identical to SEQ ID NO: 30666
  misc_feature (1)..(865): Ceres Seq. ID no. 12603611
  misc_feature: MA Experiment ID: 108434 Result: Down-regulated in Transcription
  misc_feature: MA Experiment 108434 PARAMETER Experiment Name: At_Root_Tips_cDNA_P Parameter: Tissue Value: Root Tips
  misc_feature: MA Experiment ID: 108435 Result: Down-regulated in Transcription
  misc_feature: MA Experiment 108435 PARAMETER Experiment Name: At_stm_Mutants_cDNA_P Parameter: Plant Line Value: wt Landsburg vs stm
  misc_feature: MA Experiment 108435 PARAMETER Experiment Name: At_stm_Mutants_cDNA_P Parameter: Tissue Value: Shoot Apical Meristem Region
  misc_feature: MA Experiment ID: 108462 Result: Up-regulated in Transcription
  misc_feature: MA Experiment 108462 PARAMETER Experiment Name: At_Germinating_Seeds_cDNA_P Parameter: Age (day) Value: 2 vs. 0
  misc_feature: MA Experiment 108462 PARAMETER Experiment Name: At_Germinating_Seeds_cDNA_P Parameter: Tissue Value: Germinating Seeds
  misc_feature: MA Experiment ID: 108464 Result: Up-regulated in Transcription
  misc_feature: MA Experiment 108464 PARAMETER Experiment Name: At_Germinating_Seeds_cDNA_P Parameter: Age (day) Value: 4 vs. 0
  misc_feature: MA Experiment 108464 PARAMETER Experiment Name: At_Germinating_Seeds_cDNA_P Parameter: Tissue Value: Germinating Seeds
  misc_feature: MA Experiment ID: 108488 Result: Down-regulated in Transcription
  misc_feature: MA Experiment ID: 108574 Result: Up-regulated in Transcription
  misc_feature: MA Experiment 108574 PARAMETER Experiment Name: At_Wounding__cDNA_P Parameter: Timepoint (hr) Value: 1
  misc_feature: MA Experiment 108574 PARAMETER Experiment Name: At_Wounding__cDNA_P Parameter: Tissue Value: Aerial
  misc_feature: MA Experiment 108574 PARAMETER Experiment Name: At_Wounding__cDNA_P Parameter: Treatment Value: Wounding vs. No Wounding
  misc_feature: MA Experiment ID: 108579 Result: Up-regulated in Transcription
  misc_feature: MA Experiment 108579 PARAMETER Experiment Name: At_4deg_Cold_cDNA_P Parameter: Temperature (deg C) Value: 4 vs. 22
  misc_feature: MA Experiment 108579 PARAMETER Experiment Name: At_4deg_Cold_cDNA_P Parameter: Timepoint (hr) Value: 6
  misc_feature: MA Experiment 108579 PARAMETER Experiment Name: At_4deg_Cold_cDNA_P Parameter: Tissue Value: Aerial
  misc_feature: MA Experiment ID: 108594 Result: Up-regulated in Transcription
  misc_feature: MA Experiment 108594 PARAMETER Experiment Name: At_Ler-rhl_Root_cDNA_P Parameter: Plant Line Value: null
  misc_feature: MA Experiment ID: 20000113 Result: Up-regulated in Transcription
  misc_feature: MA Experiment 20000113 PARAMETER Experiment Name: At_42deg_Heat_cDNA_P Parameter: Temperature (deg C) Value: 42 vs. 22
  misc_feature: MA Experiment 20000113 PARAMETER Experiment Name: At_42deg_Heat_cDNA_P Parameter: Timepoint (hr) Value: 8
  misc_feature: MA Experiment 20000113 PARAMETER Experiment Name: At_42deg_Heat_cDNA_P Parameter: Tissue Value: Aerial
  misc_feature: MA Experiment ID: 20000224 Result: Up-regulated in Transcription
  misc_feature: MA Experiment ID: 20000234 Result: Down-regulated in Transcription
  misc_feature: MA Experiment 20000234 PARAMETER Experiment Name: At_Siliques_P Parameter: Age (day) Value: 21
  misc_feature: MA Experiment 20000234 PARAMETER Experiment Name: At_Siliques_P Parameter: Organism Value: A. thaliana
  misc_feature: MA Experiment 20000234 PARAMETER Experiment Name: At_Siliques_P Parameter: Plant Line Value: WS
  misc_feature: MA Experiment 20000234 PARAMETER Experiment Name: At_Siliques_P Parameter: Tissue Value: Less Than 5mm Siliques vs. Whole Plant
  misc_feature: MA Experiment ID: 20001450 Result: Up-regulated in Transcription
  misc_feature: MA Experiment 20001450 PARAMETER Experiment Name: At_Far-red-induction_P Parameter: Age (day) Value: 7
  misc_feature: MA Experiment 20001450 PARAMETER Experiment Name: At_Far-red-induction_P Parameter: Light Value: Far-red vs. White
  misc_feature: MA Experiment 20001450 PARAMETER Experiment Name: At_Far-red-induction_P Parameter: Organism Value: A. thaliana
  misc_feature: MA Experiment 20001450 PARAMETER Experiment Name: At_Far-red-induction_P Parameter: Plant Line Value: Columbia
  misc_feature: MA Experiment 20001450 PARAMETER Experiment Name: At_Far-red-induction_P Parameter: Timepoint (hr) Value: 8
  misc_feature: MA Experiment 20001450 PARAMETER Experiment Name: At_Far-red-induction_P Parameter: Tissue Value: Whole Plant
  misc_feature: MA Experiment ID: 20001451 Result: Up-regulated in Transcription
  misc_feature: MA Experiment 20001451 PARAMETER Experiment Name: At_Far-red-induction_P Parameter: Age (day) Value: 7
  misc_feature: MA Experiment 20001451 PARAMETER Experiment Name: At_Far-red-induction_P Parameter: Light Value: Far-red vs. White
  misc_feature: MA Experiment 20001451 PARAMETER Experiment Name: At_Far-red-induction_P Parameter: Organism Value: A. thaliana
  misc_feature: MA Experiment 20001451 PARAMETER Experiment Name: At_Far-red-induction_P Parameter: Plant Line Value: Columbia
  misc_feature: MA Experiment 20001451 PARAMETER Experiment Name: At_Far-red-induction_P Parameter: Timepoint (hr) Value: 24
  misc_feature: MA Experiment 20001451 PARAMETER Experiment Name: At_Far-red-induction_P Parameter: Tissue Value: Whole Plant

SEQ ID NO: 44519 - protein, 190 aa, Arabidopsis thaliana; identical to SEQ ID NO: 30667
  peptide (1)..(190): Ceres Seq. ID no. 12603612
  misc_feature (78)..(187): Pfam Name: Remorin, C-terminal region Pfam Description: Remorin, C-terminal region
  misc_feature (78)..(187): Pfam Name: Remorin, C-terminal region Pfam Description: Remorin, C-terminal region
  misc_feature (3)..(190): Homolog of NCBI NO: 15229057 NR Description: remorin -like protein; protein id: At3g48940.1
  misc_feature (39)..(189): Homolog of NCBI NO: 4883530 NR Description: remorin 2 [Lycopersicon esculentum]
  misc_feature (1)..(189): Homolog of NCBI NO: 21555669 NR Description: remorin [Arabidopsis thaliana]
  misc_feature (1)..(189): Homolog of NCBI NO: 15237822 NR Description: putative protein
  misc_feature (4)..(190): Homolog of NCBI NO: 34925093 NR Description: Remorin (pp34)
  misc_feature (3)..(190): Homolog of NCBI NO: 15229057 NR Description: remorin -like protein; protein id: At3g48940.1
  misc_feature (1)..(189): Homolog of NCBI NO: 21555669 NR Description: remorin [Arabidopsis thaliana]
  misc_feature (4)..(190): Homolog of NCBI NO: 34925093 NR Description: Remorin (pp34)
  misc_feature (1)..(190): Homolog of NCBI NO: 15225899 NR Description: remorin
  misc_feature (1)..(190): Homolog of NCBI NO: 601843 NR Description: DNA-binding protein
  misc_feature (1)..(190): Homolog of NCBI NO: 15233068 NR Description: putative DNA-binding protein
  misc_feature (1)..(190): Homolog of NCBI NO: 32489830 NR Description: OSJNBb0039L24.13 [Oryza sativa (japonica
  misc_feature (4)..(190): Homolog of NCBI NO: 4731573 NR Description: remorin 1 [Lycopersicon esculentum]
  misc_feature (1)..(189): Homolog of NCBI NO: 15237822 NR Description: putative protein
  misc_feature (39)..(189): Homolog of NCBI NO: 4883530 NR Description: remorin 2 [Lycopersicon esculentum]
  misc_feature (4)..(190): Homolog of NCBI NO: 4731573 NR Description: remorin 1 [Lycopersicon esculentum]
  misc_feature (1)..(190): Homolog of NCBI NO: 32489830 NR Description: OSJNBb0039L24.13 [Oryza sativa (japonica
  misc_feature (1)..(190): Homolog of NCBI NO: 15233068 NR Description: putative DNA-binding protein
  misc_feature (1)..(190): Homolog of NCBI NO: 601843 NR Description: DNA-binding protein
  misc_feature (1)..(190): Homolog of NCBI NO: 15225899 NR Description: remorin

SEQ ID NO: 44520 - DNA, 1281 bp, Arabidopsis thaliana
  misc_feature (1)..(1281): Ceres Seq. ID no. 13509543
  misc_feature: MA Experiment ID: 20000234 Result: Up-regulated in Transcription
  misc_feature: MA Experiment 20000234 PARAMETER Experiment Name: At_Siliques_P Parameter: Age (day) Value: 21
  misc_feature: MA Experiment 20000234 PARAMETER Experiment Name: At_Siliques_P Parameter: Organism Value: A. thaliana
  misc_feature: MA Experiment 20000234 PARAMETER Experiment Name: At_Siliques_P Parameter: Plant Line Value: WS
  misc_feature: MA Experiment 20000234 PARAMETER Experiment Name: At_Siliques_P Parameter: Tissue Value: Less Than 5mm Siliques vs. Whole Plant
  misc_feature: MA Experiment ID: 20000235 Result: Up-regulated in Transcription
  misc_feature: MA Experiment 20000235 PARAMETER Experiment Name: At_Siliques_P Parameter: Age (day) Value: 21
  misc_feature: MA Experiment 20000235 PARAMETER Experiment Name: At_Siliques_P Parameter: Organism Value: A. thaliana
  misc_feature: MA Experiment 20000235 PARAMETER Experiment Name: At_Siliques_P Parameter: Plant Line Value: WS
  misc_feature: MA Experiment 20000235 PARAMETER Experiment Name: At_Siliques_P Parameter: Tissue Value: 5-10mm Siliques vs. Whole Plant
  misc_feature: MA Experiment ID: 20000264 Result: Up-regulated in Transcription
  misc_feature: MA Experiment 20000264 PARAMETER Experiment Name: At_Open_Flower_P Parameter: Age (day) Value: 21
  misc_feature: MA Experiment 20000264 PARAMETER Experiment Name: At_Open_Flower_P Parameter: Plant Line Value: WS
  misc_feature: MA Experiment 20000264 PARAMETER Experiment Name: At_Open_Flower_P Parameter: Tissue Value: Open Flower vs. Whole Plant
  misc_feature: MA Experiment ID: 20000286 Result: Up-regulated in Transcription
  misc_feature: MA Experiment 20000286 PARAMETER Experiment Name: At_Open_Flower_P Parameter: Age (day) Value: 21
  misc_feature: MA Experiment 20000286 PARAMETER Experiment Name: At_Open_Flower_P Parameter: Plant Line Value: WS
  misc_feature: MA Experiment 20000286 PARAMETER Experiment Name: At_Open_Flower_P Parameter: Tissue Value: Half Open vs. Whole Plant
  misc_feature: MA Experiment ID: 20001457 Result: Up-regulated in Transcription
  misc_feature: MA Experiment 20001457 PARAMETER Experiment Name: At_50mM_NH4NO3_L-to-H_P Parameter: Age (day) Value: Undefined
  misc_feature: MA Experiment 20001457 PARAMETER Experiment Name: At_50mM_NH4NO3_L-to-H_P Parameter: Organism Value: Undefined
  misc_feature: MA Experiment 20001457 PARAMETER Experiment Name: At_50mM_NH4NO3_L-to-H_P Parameter: Plant Line Value: Undefined
  misc_feature: MA Experiment 20001457 PARAMETER Experiment Name: At_50mM_NH4NO3_L-to-H_P Parameter: Timepoint (hr) Value: 0.5
  misc_feature: MA Experiment 20001457 PARAMETER Experiment Name: At_50mM_NH4NO3_L-to-H_P Parameter: Tissue Value: Siliques
  misc_feature: MA Experiment 20001457 PARAMETER Experiment Name: At_50mM_NH4NO3_L-to-H_P Parameter: Treatment Value: 50mM NH4NO3 vs. 100mM Manitol
caataacaactaaatctctatctctgtaatttcaaaagtacaatcatggaccagactcttacacacaccggatcgaagaaggcttgtgtcattggtggcacgggaaacttagcctctattctcatcaagcatttgcttcaaagtggctacaaagttaacactacagttagagatccagaaaacgagaagaaaatagctcaccttaggaaacttcaagagcttggcgacctgaagatcttcaaggcagatttgactgatgaagacagtttcgaatcctcattctccggctgtgaatacatcttccatgtcgcaactccgatcaactttaaatccgaagatcccgagaaagacatgatcaagccggcgatacaaggagtgatcaatgtgttgaaatcttgcttaaaatcgaaatcagtcaagcgtgtgatctacacatcttcagctgctgctgtttccatcaacaatctttctggaaccggaatcgtgatgaacgaagaaaactggactgacgttgaatttctcacagaggagaagccttttaactggggttacccaatctcgaaggtgttagcagaaaagacagcttgggaatttgcaaaagagaataagatcaatctcgttaccgtgattccggcacttatagccggaaactctctcctctccgatcctccgagtagcttatctctctcgatgtctttcatcaccgggaaagaaatgcatgtgaccggtctcaaggaaatgcagaagctatctggctcgatctcgttcgtccacgtagacgatttagctcgtgcccatttgtttcttgcggagaaagaaactgcttctggtcgctacatttgctgtgcttacaacacaagtgttccagagattgcggattttctcatacagagatatcctaagtacaatgtgttgtcagaattcgaagagggcttgtcgattccgaaattgacactatcttcgcaaaaacttatcaatgaaggctttcgattcgaatatgggatcaatgagatgtatgatcaaatgatagagtacttcgagtcaaaaggattgatcaaagctaaataaacttgacttttataatgtcaaaatggattcaaagagtatatgagtctttggtctcattctcattctataaaatggtattgaataattatgtattatatgttggttgatttaatgtcttttgatacataaatattacatactytymaaatgaacttgtgaaaaacaagattatttgatcgagctttatatgaaagactacttcacatttcacgc

SEQ ID NO: 44521 - protein, 340 aa, Arabidopsis thaliana
  peptide (1)..(340): Ceres Seq. ID no. 15222825
  misc_feature (10)..(151): Pfam Name: Polysaccharide biosynthesis protein Pfam Description: Polysaccharide biosynthesis protein
  misc_feature (5)..(337): Homolog of NCBI NO: 30230341 NR Description: putative dihydroflavonol 4-reductase [Anthurium
  misc_feature (14)..(337): Homolog of NCBI NO: 1695134 NR Description: dihydroflavonol reductase [Forsythia x intermedia]
  misc_feature (1)..(337): Homolog of NCBI NO: 6009511 NR Description: dihydroflavonol 4-reductase [Camellia sinensis]
  misc_feature (10)..(337): Homolog of NCBI NO: 1332411 NR Description: dihydroflavonol 4-reductase [Rosa hybrid cultivar]
  misc_feature (14)..(337): Homolog of NCBI NO: 22797397 NR Description: dihydroflavonol reductase [Rhododendron simsii]
  misc_feature (11)..(337): Homolog of NCBI NO: 39546252 NR Description: OSJNBa0089N06.22 [Oryza sativa (japonica
  misc_feature (85)..(265): Homolog of NCBI NO: 17224965 NR Description: DFR-like protein [Brassica napus]
  misc_feature (11)..(336): Homolog of NCBI NO: 27966032 NR Description: anthocyanidin reductase [Medicago truncatula]
  misc_feature (1)..(340): Homolog of NCBI NO: 6689826 NR Description: DFR-like protein [Arabidopsis thaliana]
  misc_feature (1)..(340): Homolog of NCBI NO: 15220598 NR Description: dihydroflavonol 4-reductase (dihydrokaempferol
MDQTLTHTGSKKACVIGGTGNLASILIKHLLQSGYKVNTTVRDPENEKKIAHLRKLQELGDLKIFKADLTDEDSFESSFSGCEYIFHVATPINFKSEDPEKDMIKPAIQGVINVLKSCLKSKSVKRVIYTSSAAAVSINNLSGTGIVMNEENWTDVEFLTEEKPFNWGYPISKVLAEKTAWEFAKENKINLVTVIPALIAGNSLLSDPPSSLSLSMSFITGKEMHVTGLKEMQKLSGSISFVHVDDLARAHLFLAEKETASGRYICCAYNTSVPEIADFLIQRYPKYNVLSEFEEGLSIPKLTLSSQKLINEGFRFEYGINEMYDQMIEYFESKGLIKAK

SEQ ID NO: 44522 - protein, 238 aa, Arabidopsis thaliana
  peptide (1)..(238): Ceres Seq. ID no. 15222826
  misc_feature (1)..(153): Pfam Name: 3-beta hydroxysteroid dehydrogenase/isomerase family Pfam Description: 3-beta hydroxysteroid dehydrogenase/isomerase
  misc_feature (1)..(235): Homolog of NCBI NO: 30230341 NR Description: putative dihydroflavonol 4-reductase [Anthurium
  misc_feature (1)..(235): Homolog of NCBI NO: 1695134 NR Description: dihydroflavonol reductase [Forsythia x intermedia]
  misc_feature (1)..(235): Homolog of NCBI NO: 6009511 NR Description: dihydroflavonol 4-reductase [Camellia sinensis]
  misc_feature (1)..(235): Homolog of NCBI NO: 1332411 NR Description: dihydroflavonol 4-reductase [Rosa hybrid cultivar]
  misc_feature (1)..(235): Homolog of NCBI NO: 22797397 NR Description: dihydroflavonol reductase [Rhododendron simsii]
  misc_feature (1)..(235): Homolog of NCBI NO: 39546252 NR Description: OSJNBa0089N06.22 [Oryza sativa (japonica
  misc_feature (1)..(163): Homolog of NCBI NO: 17224965 NR Description: DFR-like protein [Brassica napus]
  misc_feature (1)..(234): Homolog of NCBI NO: 27966032 NR Description: anthocyanidin reductase [Medicago truncatula]
  misc_feature (1)..(238): Homolog of NCBI NO: 6689826 NR Description: DFR-like protein [Arabidopsis thaliana]
  misc_feature (1)..(238): Homolog of NCBI NO: 15220598 NR Description: dihydroflavonol 4-reductase (dihydrokaempferol
MIKPAIQGVINVLKSCLKSKSVKRVIYTSSAAAVSINNLSGTGIVMNEENWTDVEFLTEEKPFNWGYPISKVLAEKTAWEFAKENKINLVTVIPALIAGNSLLSDPPSSLSLSMSFITGKEMHVTGLKEMQKLSGSISFVHVDDLARAHLFLAEKETASGRYICCAYNTSVPEIADFLIQRYPKYNVLSEFEEGLSIPKLTLSSQKLINEGFRFEYGINEMYDQMIEYFESKGLIKAK

SEQ ID NO: 44523 - protein, 193 aa, Arabidopsis thaliana
  peptide (1)..(193): Ceres Seq. ID no. 15222827
  misc_feature (1)..(108): Pfam Name: 3-beta hydroxysteroid dehydrogenase/isomerase family Pfam Description: 3-beta hydroxysteroid dehydrogenase/isomerase
  misc_feature (1)..(190): Homolog of NCBI NO: 30230341 NR Description: putative dihydroflavonol 4-reductase [Anthurium
  misc_feature (1)..(190): Homolog of NCBI NO: 1695134 NR Description: dihydroflavonol reductase [Forsythia x intermedia]
  misc_feature (1)..(190): Homolog of NCBI NO: 6009511 NR Description: dihydroflavonol 4-reductase [Camellia sinensis]
  misc_feature (1)..(190): Homolog of NCBI NO: 1332411 NR Description: dihydroflavonol 4-reductase [Rosa hybrid cultivar]
  misc_feature (1)..(190): Homolog of NCBI NO: 22797397 NR Description: dihydroflavonol reductase [Rhododendron simsii]
  misc_feature (1)..(190): Homolog of NCBI NO: 39546252 NR Description: OSJNBa0089N06.22 [Oryza sativa (japonica
  misc_feature (1)..(118): Homolog of NCBI NO: 17224965 NR Description: DFR-like protein [Brassica napus]
  misc_feature (1)..(189): Homolog of NCBI NO: 27966032 NR Description: anthocyanidin reductase [Medicago truncatula]
  misc_feature (1)..(193): Homolog of NCBI NO: 6689826 NR Description: DFR-like protein [Arabidopsis thaliana]
  misc_feature (1)..(193): Homolog of NCBI NO: 15220598 NR Description: dihydroflavonol 4-reductase (dihydrokaempferol
MNEENWTDVEFLTEEKPFNWGYPISKVLAEKTAWEFAKENKINLVTVIPALIAGNSLLSDPPSSLSLSMSFITGKEMHVTGLKEMQKLSGSISFVHVDDLARAHLFLAEKETASGRYICCAYNTSVPEIADFLIQRYPKYNVLSEFEEGLSIPKLTLSSQKLINEGFRFEYGINEMYDQMIEYFESKGLIKAK

SEQ ID NO: 44524 - DNA, 1146 bp, Arabidopsis thaliana; identical to SEQ ID NO: 39458
  misc_feature (1)..(1146): Ceres Seq. ID no. 12489106
  misc_feature: MA Experiment ID: 108461 Result: Down-regulated in Transcription
  misc_feature: MA Experiment 108461 PARAMETER Experiment Name: At_Germinating_Seeds_cDNA_P Parameter: Age (day) Value: 1 vs. 0
  misc_feature: MA Experiment 108461 PARAMETER Experiment Name: At_Germinating_Seeds_cDNA_P Parameter: Tissue Value: Germinating Seeds
  misc_feature: MA Experiment ID: 108462 Result: Down-regulated in Transcription
  misc_feature: MA Experiment 108462 PARAMETER Experiment Name: At_Germinating_Seeds_cDNA_P Parameter: Age (day) Value: 2 vs. 0
  misc_feature: MA Experiment 108462 PARAMETER Experiment Name: At_Germinating_Seeds_cDNA_P Parameter: Tissue Value: Germinating Seeds
  misc_feature: MA Experiment ID: 108464 Result: Down-regulated in Transcription
  misc_feature: MA Experiment 108464 PARAMETER Experiment Name: At_Germinating_Seeds_cDNA_P Parameter: Age (day) Value: 4 vs. 0
  misc_feature: MA Experiment 108464 PARAMETER Experiment Name: At_Germinating_Seeds_cDNA_P Parameter: Tissue Value: Germinating Seeds
  misc_feature: MA Experiment ID: 20000180 Result: Down-regulated in Transcription
  misc_feature: MA Experiment 20000180 PARAMETER Experiment Name: At_Germinating_Seeds_P Parameter: Age (hr) Value: 24 vs. 0
  misc_feature: MA Experiment 20000180 PARAMETER Experiment Name: At_Germinating_Seeds_P Parameter: Tissue Value: Germinating Seeds

SEQ ID NO: 44525 - protein, 336 aa, Arabidopsis thaliana; identical to SEQ ID NO: 39459
  peptide (1)..(336): Ceres Seq. ID no. 12489107
  misc_feature (18)..(336): Homolog of NCBI NO: 37537134 NR Description: unknown protein [Oryza sativa (japonica
  misc_feature (18)..(276): Homolog of NCBI NO: 25373168 NR Description: hypothetical protein F16G16.1 [imported] -
  misc_feature (18)..(336): Homolog of NCBI NO: 15220924 NR Description: hypothetical protein; protein id: At1g65020.1
  misc_feature (18)..(336): Homolog of NCBI NO: 37537134 NR Description: unknown protein [Oryza sativa (japonica
  misc_feature (18)..(276): Homolog of NCBI NO: 25373168 NR Description: hypothetical protein F16G16.1 [imported] -
  misc_feature (18)..(336): Homolog of NCBI NO: 15220924 NR Description: hypothetical protein; protein id: At1g65020.1
  misc_feature (18)..(336): Homolog of NCBI NO: 37537134 NR Description: unknown protein [Oryza sativa (japonica
  misc_feature (18)..(276): Homolog of NCBI NO: 25373168 NR Description: hypothetical protein F16G16.1 [imported] -
  misc_feature (18)..(336): Homolog of NCBI NO: 15220924 NR Description: hypothetical protein; protein id: At1g65020.1

SEQ ID NO: 44526 - protein, 319 aa, Arabidopsis thaliana; identical to SEQ ID NO: 39460
  peptide (1)..(319): Ceres Seq. ID no. 12489108
  misc_feature (1)..(319): Homolog of NCBI NO: 37537134 NR Description: unknown protein [Oryza sativa (japonica
  misc_feature (1)..(259): Homolog of NCBI NO: 25373168 NR Description: hypothetical protein F16G16.1 [imported] -
  misc_feature (1)..(319): Homolog of NCBI NO: 15220924 NR Description: hypothetical protein; protein id: At1g65020.1
  misc_feature (1)..(319): Homolog of NCBI NO: 37537134 NR Description: unknown protein [Oryza sativa (japonica
  misc_feature (1)..(259): Homolog of NCBI NO: 25373168 NR Description: hypothetical protein F16G16.1 [imported] -
  misc_feature (1)..(319): Homolog of NCBI NO: 15220924 NR Description: hypothetical protein; protein id: At1g65020.1
  misc_feature (1)..(319): Homolog of NCBI NO: 37537134 NR Description: unknown protein [Oryza sativa (japonica
  misc_feature (1)..(259): Homolog of NCBI NO: 25373168 NR Description: hypothetical protein F16G16.1 [imported] -
  misc_feature (1)..(319): Homolog of NCBI NO: 15220924 NR Description: hypothetical protein; protein id: At1g65020.1

SEQ ID NO: 44527 - DNA, 1721 bp, Arabidopsis thaliana
  misc_feature (1)..(1721): Ceres Seq. ID no. 13509702
  misc_feature: MA Experiment ID: 20000314 Result: Up-regulated in Transcription
  misc_feature: MA Experiment 20000314 PARAMETER Experiment Name: At_14day_Shoots-Roots_Sub_P Parameter: Age (day) Value: 14
  misc_feature: MA Experiment 20000314 PARAMETER Experiment Name: At_14day_Shoots-Roots_Sub_P Parameter: Organism Value: A. thaliana
  misc_feature: MA Experiment 20000314 PARAMETER Experiment Name: At_14day_Shoots-Roots_Sub_P Parameter: Plant Line Value: WS
  misc_feature: MA Experiment 20000314 PARAMETER Experiment Name: At_14day_Shoots-Roots_Sub_P Parameter: Tissue Value: Roots vs. Whole Plant
actccattccactctcgtcccgcttcgcctcttttagggcgcaaccaagagacagagaagaagagagagactcgtaagcaacaataaccaatagctctctctctctctctctctctctcctctgctgattcttcgctgactcttgcctcctcgacgtcgtcttcggctttgtagcatctcgccgaagcgtcgttgatttgagagagacccaatttggattgttagaaaatgggttacataggagctcatggtgtagctgctcttaagaaacacaaatacagtggtgttgatcactcttatcttgccaaatatgttctccaacctttttggaaccgttttgtcaaaatcttccctctatggatgccccccaacatgataacacttatggggttcatgtttcttctcacatctgctctcttaggctatatatactcacctaagttggattctccacctcctcgatgggtccactttgcacacggcttacttctgtttttatatcagacatttgatgcggttgatgggaagcaagcacgaagaacaaattcatctagcccactaggagagctttttgaccatggttgcgatgcacttggctgtgcgttagaaacaatggcatatgggagtactgctatgtgtggaagagatactttctggttttgggttatttctgctgttccattttttggagcaacatgggaacactattttaccaatacgcttactcttccggtagtcaatggtcctacagaaggtcttgcacttatatactgtggccatttcttcacagccattgttggtgcggagtggtgggctcagccgtttgggaagtcgattcctttgtttagttgggttccgtttttgaacgagatgcaaatgtccagaataatactattctccatgattttctttgctgttataccaacccttgcaatcaacacgtctaatgtttacaaagttgtacattcaagaaatggaagcatgcttctagcattagctatgctatatcccttagtcacgttaattgcaggagttctgatttgggattacttgtctccaattgatctcataagaaactaccctcacttagttgtgttgggaactggtcttgcatttggattccttgtgggaagaatgattctagctcacttatgtgacgaaccaaaaggattgaaaacaaacatgtgtatgtcactgctttaccttccatttgcactagcaaatgctctaaccgctagactcaacgacggggttcctcttgtggatgagttttgggttcttcttggatattgtatattcacattgtcactatatgcgcattttgcaacttcagtcattcatgagatcacaactgcacttggaatctactgcttcaggattactcggaaagaagcttgaagaaacaaaatgtgattgaaatttttatttataagaaaaagcaaatcttaagggagaaaaaaaatgcaaatcccaacacgaatctgaatattttgttacttggaattaaaaatgattgactgatatgcttttggatgtatactcattaatgtttttgttttagtgttttttttcttgttcggttgaaatagggtaattcatgtagaacctttttgtgtaacgtttctaagaaaaaaaaatatgggattgttctagatttttttttttttaatttaaacctcgttattgatccaacttttagctttttaagctttattttatgc

SEQ ID NO: 44528 - protein, 389 aa, Arabidopsis thaliana
  peptide (1)..(389): Ceres Seq. ID no. 13509703
  misc_feature (86)..(231): Pfam Name: CDP-alcohol phosphatidyltransferase Pfam Description: CDP-alcohol phosphatidyltransferase
  misc_feature (12)..(387): Homolog of NCBI NO: 2425056 NR Description: LipB [Dictyostelium discoideum]
  misc_feature (1)..(389): Homolog of NCBI NO: 27762264 NR Description: aminoalcoholphosphotransferase [Brassica napus]
  misc_feature (1)..(328): Homolog of NCBI NO: 18390098 NR Description: aminoalcoholphosphotransferase [Sorghum bicolor]
  misc_feature (1)..(389): Homolog of NCBI NO: 7488701 NR Description: probable ethanolaminephosphotransferase (EC
  misc_feature (1)..(389): Homolog of NCBI NO: 3927806 NR Description: aminoalcoholphosphotransferase [Pimpinella
  misc_feature (1)..(389): Homolog of NCBI NO: 5917787 NR Description: aminoalcoholphosphotransferase [Brassica rapa]
  misc_feature (1)..(387): Homolog of NCBI NO: 30313359 NR Description: aminoalcoholphosphotransferase [Brassica rapa
  misc_feature (1)..(389): Homolog of NCBI NO: 15222885 NR Description: aminoalcoholphosphotransferase [Arabidopsis
  misc_feature (1)..(389): Homolog of NCBI NO: 7488522 NR Description: ethanolaminephosphotransferase homolog - turnip
  misc_feature (1)..(389): Homolog of NCBI NO: 15229490 NR Description: aminoalcoholphosphotransferase, putative
MGYIGAHGVAALKKHKYSGVDHSYLAKYVLQPFWNRFVKIFPLWMPPNMITLMGFMFLLTSALLGYIYSPKLDSPPPRWVHFAHGLLLFLYQTFDAVDGKQARRTNSSSPLGELFDHGCDALGCALETMAYGSTAMCGRDTFWFWVISAVPFFGATWEHYFTNTLTLPVVNGPTEGLALIYCGHFFTAIVGAEWWAQPFGKSIPLFSWVPFLNEMQMSRIILFSMIFFAVIPTLAINTSNVYKVVHSRNGSMLLALAMLYPLVTLIAGVLIWDYLSPIDLIRNYPHLVVLGTGLAFGFLVGRMILAHLCDEPKGLKTNMCMSLLYLPFALANALTARLNDGVPLVDEFWVLLGYCIFTLSLYAHFATSVIHEITTALGIYCFRITRKEA

SEQ ID NO: 44529 - protein, 345 aa, Arabidopsis thaliana
  peptide (1)..(345): Ceres Seq. ID no. 13509704
  misc_feature (42)..(187): Pfam Name: CDP-alcohol phosphatidyltransferase Pfam Description: CDP-alcohol phosphatidyltransferase
  misc_feature (1)..(343): Homolog of NCBI NO: 2425056 NR Description: LipB [Dictyostelium discoideum]
  misc_feature (1)..(345): Homolog of NCBI NO: 27762264 NR Description: aminoalcoholphosphotransferase [Brassica napus]
  misc_feature (1)..(284): Homolog of NCBI NO: 18390098 NR Description: aminoalcoholphosphotransferase [Sorghum bicolor]
  misc_feature (1)..(345): Homolog of NCBI NO: 7488701 NR Description: probable ethanolaminephosphotransferase (EC
  misc_feature (1)..(345): Homolog of NCBI NO: 3927806 NR Description: aminoalcoholphosphotransferase [Pimpinella
  misc_feature (1)..(345): Homolog of NCBI NO: 5917787 NR Description: aminoalcoholphosphotransferase [Brassica rapa]
  misc_feature (1)..(343): Homolog of NCBI NO: 30313359 NR Description: aminoalcoholphosphotransferase [Brassica rapa
  misc_feature (1)..(345): Homolog of NCBI NO: 15222885 NR Description: aminoalcoholphosphotransferase [Arabidopsis
  misc_feature (1)..(345): Homolog of NCBI NO: 7488522 NR Description: ethanolaminephosphotransferase homolog - turnip
  misc_feature (1)..(345): Homolog of NCBI NO: 15229490 NR Description: aminoalcoholphosphotransferase, putative
MPPNMITLMGFMFLLTSALLGYIYSPKLDSPPPRWVHFAHGLLLFLYQTFDAVDGKQARRTNSSSPLGELFDHGCDALGCALETMAYGSTAMCGRDTFWFWVISAVPFFGATWEHYFTNTLTLPVVNGPTEGLALIYCGHFFTAIVGAEWWAQPFGKSIPLFSWVPFLNEMQMSRIILFSMIFFAVIPTLAINTSNVYKVVHSRNGSMLLALAMLYPLVTLIAGVLIWDYLSPIDLIRNYPHLVVLGTGLAFGFLVGRMILAHLCDEPKGLKTNMCMSLLYLPFALANALTARLNDGVPLVDEFWVLLGYCIFTLSLYAHFATSVIHEITTALGIYCFRITRKEA

SEQ ID NO: 44530 - protein, 341 aa, Arabidopsis thaliana
  peptide (1)..(341): Ceres Seq. ID no. 13509705
  misc_feature (38)..(183): Pfam Name: CDP-alcohol phosphatidyltransferase Pfam Description: CDP-alcohol phosphatidyltransferase
  misc_feature (1)..(339): Homolog of NCBI NO: 2425056 NR Description: LipB [Dictyostelium discoideum]
  misc_feature (1)..(341): Homolog of NCBI NO: 27762264 NR Description: aminoalcoholphosphotransferase [Brassica napus]
  misc_feature (1)..(280): Homolog of NCBI NO: 18390098 NR Description: aminoalcoholphosphotransferase [Sorghum bicolor]
  misc_feature (1)..(341): Homolog of NCBI NO: 7488701 NR Description: probable ethanolaminephosphotransferase (EC
  misc_feature (1)..(341): Homolog of NCBI NO: 3927806 NR Description: aminoalcoholphosphotransferase [Pimpinella
  misc_feature (1)..(341): Homolog of NCBI NO: 5917787 NR Description: aminoalcoholphosphotransferase [Brassica rapa]
  misc_feature (1)..(339): Homolog of NCBI NO: 30313359 NR Description: aminoalcoholphosphotransferase [Brassica rapa
  misc_feature (1)..(341): Homolog of NCBI NO: 15222885 NR Description: aminoalcoholphosphotransferase [Arabidopsis
  misc_feature (1)..(341): Homolog of NCBI NO: 7488522 NR Description: ethanolaminephosphotransferase homolog - turnip
  misc_feature (1)..(341): Homolog of NCBI NO: 15229490 NR Description: aminoalcoholphosphotransferase, putative
MITLMGFMFLLTSALLGYIYSPKLDSPPPRWVHFAHGLLLFLYQTFDAVDGKQARRTNSSSPLGELFDHGCDALGCALETMAYGSTAMCGRDTFWFWVISAVPFFGATWEHYFTNTLTLPVVNGPTEGLALIYCGHFFTAIVGAEWWAQPFGKSIPLFSWVPFLNEMQMSRIILFSMIFFAVIPTLAINTSNVYKVVHSRNGSMLLALAMLYPLVTLIAGVLIWDYLSPIDLIRNYPHLVVLGTGLAFGFLVGRMILAHLCDEPKGLKTNMCMSLLYLPFALANALTARLNDGVPLVDEFWVLLGYCIFTLSLYAHFATSVIHEITTALGIYCFRITRKEA

SEQ ID NO: 44531 - DNA, 840 bp, Arabidopsis thaliana
  misc_feature (1)..(840): Ceres Seq. ID no. 12466029
agggatagttttatatataaagagagacgcatctctttatttcattcatcgcttctccaaaattttcttcaaagaacaaatctcccaaatctaaaatctttctcttctctcttcgtttccataaccatgtctgcgaagaagattgtgttgaagagttccgatggtgaatctttcgaggttgaggaggcggtggctctcgagtcacaaaccatagcgcatatggttgaagacgactgcgtcgacaacggagtccctcttcctaacgtcacgagcaagatcctcgccaaggtgatcgagtattgcaagaggcacgtcgaggctgctgcctctaaggccgaggccgtcgagggtgctgctacctccgatgacgatcttaaggcctgggacgctgattttatgaagatcgatcaagctactctctttgaactcattctggctgctaattacctgaatatcaagaacttgcttgatctaacatgtcagacagttgcggatatgatcaaaggaaagactccagaagagatccgcacaacgttcaacattaagaacgacttcacaccagaggaagaggaagaggttcgcagagagaaccaatgggcttttgaatgattgatcttcagagagaagaatcaaaagcagcaagcaaccagtttcttcttccttatgtttattgccgttttcaagtgttgttgatgacttgctttttaatattcttcatgaatcatgactatcttcttcctcttctttctttcttatcaagaaccaatgtttcttactctttgtgggatggataatttgtgcttttagataatcttcaagagtgatgttggtttgtcttac

SEQ ID NO: 44532 - protein, 202 aa, Arabidopsis thaliana
  peptide (1)..(202): Ceres Seq. ID no. 12466030
  misc_feature (125)..(202): Pfam Name: Skp1 family, dimerisation domain Pfam Description: Skp1 family, dimerisation domain
  misc_feature (44)..(202): Homolog of NCBI NO: 3719211 NR Description: UIP2 [Arabidopsis thaliana]
  misc_feature (44)..(202): Homolog of NCBI NO: 7489300 NR Description: fimbriata-associated protein 2 - garden
  misc_feature (43)..(202): Homolog of NCBI NO: 7489299 NR Description: fimbriata-associated protein - garden snapdragon
  misc_feature (48)..(192): Homolog of NCBI NO: 18958251 NR Description: kinetochore protein [Brassica juncea]
  misc_feature (43)..(202): Homolog of NCBI NO: 18958249 NR Description: kinetochore protein [Brassica juncea]
  misc_feature (43)..(202): Homolog of NCBI NO: 18958255 NR Description: kinetochore protein [Brassica juncea]
  misc_feature (43)..(202): Homolog of NCBI NO: 18958253 NR Description: kinetochore protein [Brassica juncea]
  misc_feature (43)..(202): Homolog of NCBI NO: 18958259 NR Description: kinetochore protein [Brassica juncea]
  misc_feature (43)..(202): Homolog of NCBI NO: 18958257 NR Description: kinetochore protein [Brassica juncea]
  misc_feature (43)..(202): Homolog of NCBI NO: 18410982 NR Description: E3 ubiquitin ligase SCF complex subunit,
RDSFIYKERRISLFHSSLLQNFLQRTNLPNLKSFSSLFVSITMSAKKIVLKSSDGESFEVEEAVALESQTIAHMVEDDCVDNGVPLPNVTSKILAKVIEYCKRHVEAAASKAEAVEGAATSDDDLKAWDADFMKIDQATLFELILAANYLNIKNLLDLTCQTVADMIKGKTPEEIRTTFNIKNDFTPEEEEEVRRENQWAFE

SEQ ID NO: 44533 - protein, 160 aa, Arabidopsis thaliana
  peptide (1)..(160): Ceres Seq. ID no. 12466031
  misc_feature (83)..(160): Pfam Name: Skp1 family, dimerisation domain Pfam Description: Skp1 family, dimerisation domain
  misc_feature (2)..(160): Homolog of NCBI NO: 3719211 NR Description: UIP2 [Arabidopsis thaliana]
  misc_feature (2)..(160): Homolog of NCBI NO: 7489300 NR Description: fimbriata-associated protein 2 - garden
  misc_feature (1)..(160): Homolog of NCBI NO: 7489299 NR Description: fimbriata-associated protein - garden snapdragon
  misc_feature (6)..(150): Homolog of NCBI NO: 18958251 NR Description: kinetochore protein [Brassica juncea]
  misc_feature (1)..(160): Homolog of NCBI NO: 18958249 NR Description: kinetochore protein [Brassica juncea]
  misc_feature (1)..(160): Homolog of NCBI NO: 18958255 NR Description: kinetochore protein [Brassica juncea]
  misc_feature (1)..(160): Homolog of NCBI NO: 18958253 NR Description: kinetochore protein [Brassica juncea]
  misc_feature (1)..(160): Homolog of NCBI NO: 18958259 NR Description: kinetochore protein [Brassica juncea]
  misc_feature (1)..(160): Homolog of NCBI NO: 18958257 NR Description: kinetochore protein [Brassica juncea]
  misc_feature (1)..(160): Homolog of NCBI NO: 18410982 NR Description: E3 ubiquitin ligase SCF complex subunit,
MSAKKIVLKSSDGESFEVEEAVALESQTIAHMVEDDCVDNGVPLPNVTSKILAKVIEYCKRHVEAAASKAEAVEGAATSDDDLKAWDADFMKIDQATLFELILAANYLNIKNLLDLTCQTVADMIKGKTPEEIRTTFNIKNDFTPEEEEEVRRENQWAFE

SEQ ID NO: 44534 - protein, 129 aa, Arabidopsis thaliana
  peptide (1)..(129): Ceres Seq. ID no. 12466032
  misc_feature (52)..(129): Pfam Name: Skp1 family, dimerisation domain Pfam Description: Skp1 family, dimerisation domain
  misc_feature (1)..(129): Homolog of NCBI NO: 3719211 NR Description: UIP2 [Arabidopsis thaliana]
  misc_feature (1)..(129): Homolog of NCBI NO: 7489300 NR Description: fimbriata-associated protein 2 - garden
  misc_feature (1)..(129): Homolog of NCBI NO: 7489299 NR Description: fimbriata-associated protein - garden snapdragon
  misc_feature (1)..(119): Homolog of NCBI NO: 18958251 NR Description: kinetochore protein [Brassica juncea]
  misc_feature (1)..(129): Homolog of NCBI NO: 18958249 NR Description: kinetochore protein [Brassica juncea]
  misc_feature (1)..(129): Homolog of NCBI NO: 18958255 NR Description: kinetochore protein [Brassica juncea]
  misc_feature (1)..(129): Homolog of NCBI NO: 18958253 NR Description: kinetochore protein [Brassica juncea]
  misc_feature (1)..(129): Homolog of NCBI NO: 18958259 NR Description: kinetochore protein [Brassica juncea]
  misc_feature (1)..(129): Homolog of NCBI NO: 18958257 NR Description: kinetochore protein [Brassica juncea]
  misc_feature (1)..(129): Homolog of NCBI NO: 18410982 NR Description: E3 ubiquitin ligase SCF complex subunit,
MVEDDCVDNGVPLPNVTSKILAKVIEYCKRHVEAAASKAEAVEGAATSDDDLKAWDADFMKIDQATLFELILAANYLNIKNLLDLTCQTVADMIKGKTPEEIRTTFNIKNDFTPEEEEEVRRENQWAFE

SEQ ID NO: 44535 - DNA, 1545 bp, Arabidopsis thaliana
  misc_feature (1)..(1545): Ceres Seq. ID no. 13494693
  misc_feature: MA Experiment ID: 20000355 Result: Up-regulated in Transcription
  misc_feature: MA Experiment 20000355 PARAMETER Experiment Name: At_Siliques_Sub_P Parameter: Age (day) Value: 21
  misc_feature: MA Experiment 20000355 PARAMETER Experiment Name: At_Siliques_Sub_P Parameter: Organism Value: A. thaliana
  misc_feature: MA Experiment 20000355 PARAMETER Experiment Name: At_Siliques_Sub_P Parameter: Plant Line Value: WS
  misc_feature: MA Experiment 20000355 PARAMETER Experiment Name: At_Siliques_Sub_P Parameter: Tissue Value: Less Than 5mm Siliques vs. Whole Plant
  misc_feature: MA Experiment ID: 20000440 Result: Up-regulated in Transcription
  misc_feature: MA Experiment 20000440 PARAMETER Experiment Name: At_Closed-Flower__Sub_P Parameter: Tissue Value: Closed Flower vs. Whole Plant
atggagaaacccatctccatcacgacggggaagtttcggaccaacaacaacaacaatcataacaatgtctggttcgttgttccactcttctttatcctctgtttcgttctcctctgtttcgactactctgctctcttcaccgacacagacgaaaccgctttctcaattcccgacgttacccagaaatcaacatcctctgaattcacgaaagatgacaacttttctcgatttcccgacgacccatctcctgattcttcctgctccggtcggtatatttacgttcatgaacttccgtatagattcaatggtgatttgcttgataattgctttaagattactagaggaaccgagaaagatatttgtccttacatcgaaaactatggttttggtcctgtcattaagaattacgagaatgtgttgttgaaacaaagttggtttacgaccaatcagttcatgctcgaggtgatattccacaacaagatgataaattacagatgtttgactaatgattcgtcactagcgtctgcggttttcgtgccgttttacgcaggtcttgatatgagtaggtatctttggggtttcaacattacggttagagattcttcgtctcatgagctgatggattggcttgtggtacagaaagagtggggtcgaatgtctggtagagaccatttcttggtttcaggaaggattgcttgggatttcaggagacagactgataacgaatctgattggggaagcaagcttcggttcttacccgagtcgcggaacatgtcgatgttgtccatcgaatcgagttcttggaagaatgattacgctattccgtatccgacttgtttccatccaagatcagtggatgagattgtggagtggcaggagctaatgaggtctcgaaaacgcgagtatctattcacctttgcgggtgctccaaggcctgaatataaagactcggttcgagggaagattatagatgagtgtttggagtcaaagaagcaatgttacttgctagactgtaactatgggaatgtgaattgtgacaaccctgtcaatgtgatgaaggttttcaggaactcggtgttttgtcttcagccaccgggtgattcttacactagaaggtcaatgtttgattcaatattggcaggctgcattccggtgttcttccatccagggacagcgtacgctcaatacaagtggcatttgcccaagaatcactcgagttactcggtttatctaccggttaaggatgtgaaggagtggaatatcaaaatcaaggagaggttgattgagattccagaggaaagagtggtgaggttgagagaagaggttataaggttgataccgaaggttgtctacgctgatccgaagtacggatcggatgggagtgaagatgcatttgagttggctgtgaagggaatgttggagaggattgaagaagtgagagagatgatgagacaagggaaagatggtagtgatgggtttgatgatagagatgattataagtatactttttctccatatgaagaacctcaagtagaagcaatttag

SEQ ID NO: 44536 - protein, 514 aa, Arabidopsis thaliana
  peptide (1)..(514): Ceres Seq. ID no. 13494694
  misc_feature (92)..(442): Pfam Name: Exostosin family Pfam Description: Exostosin family
  misc_feature (87)..(480): Homolog of NCBI NO: 27497203 NR Description: Hypothetical protein [Oryza sativa (japonica
  misc_feature (15)..(480): Homolog of NCBI NO: 15225165 NR Description: Exostosin family [Arabidopsis thaliana]
  misc_feature (86)..(500): Homolog of NCBI NO: 15225735 NR Description: hypothetical protein [Arabidopsis thaliana]
  misc_feature (78)..(501): Homolog of NCBI NO: 15227020 NR Description: hypothetical protein [Arabidopsis thaliana]
  misc_feature (87)..(501): Homolog of NCBI NO: 27497206 NR Description: Unknown protein [Oryza sativa (japonica
  misc_feature (52)..(513): Homolog of NCBI NO: 30680972 NR Description: expressed protein [Arabidopsis thaliana]
  misc_feature (52)..(513): Homolog of NCBI NO: 25411977 NR Description: hypothetical protein At2g20370 [imported] -
  misc_feature (212)..(513): Homolog of NCBI NO: 15236381 NR Description: hypothetical protein [Arabidopsis thaliana]
  misc_feature (1)..(366): Homolog of NCBI NO: 15236381 NR Description: hypothetical protein [Arabidopsis thaliana]
  misc_feature (1)..(513): Homolog of NCBI NO: 29824391 NR Description: unknown protein [Arabidopsis thaliana]
MEKPISITTGKFRTNNNNNHNNVWFVVPLFFILCFVLLCFDYSALFTDTDETAFSIPDVTQKSTSSEFTKDDNFSRFPDDPSPDSSCSGRYIYVHELPYRFNGDLLDNCFKITRGTEKDICPYIENYGFGPVIKNYENVLLKQSWFTTNQFMLEVIFHNKMINYRCLTNDSSLASAVFVPFYAGLDMSRYLWGFNITVRDSSSHELMDWLVVQKEWGRMSGRDHFLVSGRIAWDFRRQTDNESDWGSKLRFLPESRNMSMLSIESSSWKNDYAIPYPTCFHPRSVDEIVEWQELMRSRKREYLFTFAGAPRPEYKDSVRGKIIDECLESKKQCYLLDCNYGNVNCDNPVNVMKVFRNSVFCLQPPGDSYTRRSMFDSILAGCIPVFFHPGTAYAQYKWHLPKNHSSYSVYLPVKDVKEWNIKIKERLIEIPEERVVRLREEVIRLIPKVVYADPKYGSDGSEDAFELAVKGMLERIEEVREMMRQGKDGSDGFDDRDDYKYTFSPYEEPQVEAI

SEQ ID NO: 44537 - protein, 363 aa, Arabidopsis thaliana
  peptide (1)..(363): Ceres Seq. ID no. 13494695
  misc_feature (1)..(291): Pfam Name: Exostosin family Pfam Description: Exostosin family
  misc_feature (1)..(329): Homolog of NCBI NO: 27497203 NR Description: Hypothetical protein [Oryza sativa (japonica
  misc_feature (1)..(329): Homolog of NCBI NO: 15225165 NR Description: Exostosin family [Arabidopsis thaliana]
  misc_feature (1)..(349): Homolog of NCBI NO: 15225735 NR Description: hypothetical protein [Arabidopsis thaliana]
  misc_feature (1)..(350): Homolog of NCBI NO: 15227020 NR Description: hypothetical protein [Arabidopsis thaliana]
  misc_feature (1)..(350): Homolog of NCBI NO: 27497206 NR Description: Unknown protein [Oryza sativa (japonica
  misc_feature (1)..(362): Homolog of NCBI NO: 30680972 NR Description: expressed protein [Arabidopsis thaliana]
  misc_feature (1)..(362): Homolog of NCBI NO: 25411977 NR Description: hypothetical protein At2g20370 [imported] -
  misc_feature (61)..(362): Homolog of NCBI NO: 15236381 NR Description: hypothetical protein [Arabidopsis thaliana]
  misc_feature (1)..(215): Homolog of NCBI NO: 15236381 NR Description: hypothetical protein [Arabidopsis thaliana]
  misc_feature (1)..(362): Homolog of NCBI NO: 29824391 NR Description: unknown protein [Arabidopsis thaliana]
MLEVIFHNKMINYRCLTNDSSLASAVFVPFYAGLDMSRYLWGFNITVRDSSSHELMDWLVVQKEWGRMSGRDHFLVSGRIAWDFRRQTDNESDWGSKLRFLPESRNMSMLSIESSSWKNDYAIPYPTCFHPRSVDEIVEWQELMRSRKREYLFTFAGAPRPEYKDSVRGKIIDECLESKKQCYLLDCNYGNVNCDNPVNVMKVFRNSVFCLQPPGDSYTRRSMFDSILAGCIPVFFHPGTAYAQYKWHLPKNHSSYSVYLPVKDVKEWNIKIKERLIEIPEERVVRLREEVIRLIPKVVYADPKYGSDGSEDAFELAVKGMLERIEEVREMMRQGKDGSDGFDDRDDYKYTFSPYEEPQVEAI

SEQ ID NO: 44538 - protein, 354 aa, Arabidopsis thaliana
  peptide (1)..(354): Ceres Seq. ID no. 13494696
  misc_feature (1)..(282): Pfam Name: Exostosin family Pfam Description: Exostosin family
  misc_feature (1)..(320): Homolog of NCBI NO: 27497203 NR Description: Hypothetical protein [Oryza sativa (japonica
  misc_feature (1)..(320): Homolog of NCBI NO: 15225165 NR Description: Exostosin family [Arabidopsis thaliana]
  misc_feature (1)..(340): Homolog of NCBI NO: 15225735 NR Description: hypothetical protein [Arabidopsis thaliana]
  misc_feature (1)..(341): Homolog of NCBI NO: 15227020 NR Description: hypothetical protein [Arabidopsis thaliana]
  misc_feature (1)..(341): Homolog of NCBI NO: 27497206 NR Description: Unknown protein [Oryza sativa (japonica
  misc_feature (1)..(353): Homolog of NCBI NO: 30680972 NR Description: expressed protein [Arabidopsis thaliana]
  misc_feature (1)..(353): Homolog of NCBI NO: 25411977 NR Description: hypothetical protein At2g20370 [imported] -
  misc_feature (52)..(353): Homolog of NCBI NO: 15236381 NR Description: hypothetical protein [Arabidopsis thaliana]
  misc_feature (1)..(206): Homolog of NCBI NO: 15236381 NR Description: hypothetical protein [Arabidopsis thaliana]
  misc_feature (1)..(353): Homolog of NCBI NO: 29824391 NR Description: unknown protein [Arabidopsis thaliana]
MINYRCLTNDSSLASAVFVPFYAGLDMSRYLWGFNITVRDSSSHELMDWLVVQKEWGRMSGRDHFLVSGRIAWDFRRQTDNESDWGSKLRFLPESRNMSMLSIESSSWKNDYAIPYPTCFHPRSVDEIVEWQELMRSRKREYLFTFAGAPRPEYKDSVRGKIIDECLESKKQCYLLDCNYGNVNCDNPVNVMKVFRNSVFCLQPPGDSYTRRSMFDSILAGCIPVFFHPGTAYAQYKWHLPKNHSSYSVYLPVKDVKEWNIKIKERLIEIPEERVVRLREEVIRLIPKVVYADPKYGSDGSEDAFELAVKGMLERIEEVREMMRQGKDGSDGFDDRDDYKYTFSPYEEPQVEAI

SEQ ID NO: 44539 - DNA, 1156 bp, Arabidopsis thaliana
  misc_feature (1)..(1156): Ceres Seq. ID no. 13509544
  misc_feature: MA Experiment ID: 20000185 Result: Down-regulated in Transcription
  misc_feature: MA Experiment 20000185 PARAMETER Experiment Name: At_Roots__P Parameter: Age (day) Value: 7 vs. 21
  misc_feature: MA Experiment 20000185 PARAMETER Experiment Name: At_Roots__P Parameter: Organism Value: A. thaliana
  misc_feature: MA Experiment 20000185 PARAMETER Experiment Name: At_Roots__P Parameter: Tissue Value: Roots vs. Whole Plant
ttctccaagcacaggtttcagttcagagacgagaacaggctatggctgtcacaagcttggctcctccatgggtcatcttgagactagctttccggtcagtagcagcttcttcttgtctccacacaaatcaaaaaaccctaatcacgaatctctccattcccacttcgtttcctctccgacagtcagctttgagaagatgttacagtgcagaagctataaaaggagatgtagattttctcctcaaaggagttggagaccaagctgttgccaaagaagtcaagcaaattcttgaaatggcaagacgtgcatcatcaaaaagagaagttcttcatacagattttctcacaccacctattgttaaggaatcagtttcactattggaaaaatttgctgatgttaagatagttgctcaaggaggttaccctgaggctgaacggtgtaggatctcgattggacatcctgatgtcctaactagtgatccagatatagttgctgctttgagtatcacagggaatttcgggtttcaaccttgttctcacggtgacttccttggtgctattcttggcacgggaatttccagggaaaaacttggagatatcttaattcaggaagaaaagggagcccaagtcctgatagttcctgaactagttgactttgttgttaccgctcttgacaaggttggaaatgttggtgtaacttgtagtaagatacctttgcttgctcttgaatacgaaccgcctaggactaattcctttaaaaccgtggaggcctcgttgagaattgatgcagtagctagtgctggtttcaagatttcgcggtcaaagctagttgatttgattagtagcaaggatgttcgggttaactgggcaaccgttacaaagaacggaaccatagtgaagactggtgatgttgtctccgttagcgggaaagggagactcaagattggagagatcaatgaaacgaagaaaggtaaatttgcagttgaaatcatcagatatctttagaaagaagctgtaaacaaattatcaatcattctttttcttctcttctcatagttttttattttttttggactagttctaattaatctctattaatgtaaaagaaccgacgaaaaaatctacaaagttataacaatttatttatttatttctat

SEQ ID NO: 44540 - protein, 333 aa, Arabidopsis thaliana
  peptide (1)..(333): Ceres Seq. ID no. 13509545
  misc_feature (258)..(304): Pfam Name: S4 domain Pfam Description: S4 domain
  misc_feature (96)..(331): Homolog of NCBI NO: 22299704 NR Description: ORF_ID:tlr2161~hypothetical protein
  misc_feature (202)..(333): Homolog of NCBI NO: 34909484 NR Description: P0481E12.12 [Oryza sativa (japonica
  misc_feature (94)..(332): Homolog of NCBI NO: 37519960 NR Description: hypothetical protein gll0391 [Gloeobacter
  misc_feature (79)..(333): Homolog of NCBI NO: 23042582 NR Description: hypothetical protein [Trichodesmium erythraeum
  misc_feature (79)..(333): Homolog of NCBI NO: 16330752 NR Description: hypothetical protein [Synechocystis sp. PCC 6803]
  misc_feature (79)..(333): Homolog of NCBI NO: 23125059 NR Description: hypothetical protein [Nostoc punctiforme]
  misc_feature (79)..(333): Homolog of NCBI NO: 17230382 NR Description: hypothetical protein [Nostoc sp. PCC 7120]
  misc_feature (223)..(332): Homolog of NCBI NO: 25405622 NR Description: hypothetical protein F8L10.3 [imported] -
  misc_feature (1)..(202): Homolog of NCBI NO: 25405622 NR Description: hypothetical protein F8L10.3 [imported] -
  misc_feature (14)..(333): Homolog of NCBI NO: 18404337 NR Description: expressed protein [Arabidopsis thaliana]
LQAQVSVQRREQAMAVTSLAPPWVILRLAFRSVAASSCLHTNQKTLITNLSIPTSFPLRQSALRRCYSAEAIKGDVDFLLKGVGDQAVAKEVKQILEMARRASSKREVLHTDFLTPPIVKESVSLLEKFADVKIVAQGGYPEAERCRISIGHPDVLTSDPDIVAALSITGNFGFQPCSHGDFLGAILGTGISREKLGDILIQEEKGAQVLIVPELVDFVVTALDKVGNVGVTCSKIPLLALEYEPPRTNSFKTVEASLRIDAVASAGFKISRSKLVDLISSKDVRVNWATVTKNGTIVKTGDVVSVSGKGRLKIGEINETKKGKFAVEIIRYL

SEQ ID NO: 44541 - protein, 320 aa, Arabidopsis thaliana
  peptide (1)..(320): Ceres Seq. ID no. 13509546
  misc_feature (245)..(291): Pfam Name: S4 domain Pfam Description: S4 domain
  misc_feature (83)..(318): Homolog of NCBI NO: 22299704 NR Description: ORF_ID:tlr2161~hypothetical protein
  misc_feature (189)..(320): Homolog of NCBI NO: 34909484 NR Description: P0481E12.12 [Oryza sativa (japonica
  misc_feature (81)..(319): Homolog of NCBI NO: 37519960 NR Description: hypothetical protein gll0391 [Gloeobacter
  misc_feature (66)..(320): Homolog of NCBI NO: 23042582 NR Description: hypothetical protein [Trichodesmium erythraeum
  misc_feature (66)..(320): Homolog of NCBI NO: 16330752 NR Description: hypothetical protein [Synechocystis sp. PCC 6803]
  misc_feature (66)..(320): Homolog of NCBI NO: 23125059 NR Description: hypothetical protein [Nostoc punctiforme]
  misc_feature (66)..(320): Homolog of NCBI NO: 17230382 NR Description: hypothetical protein [Nostoc sp. PCC 7120]
  misc_feature (210)..(319): Homolog of NCBI NO: 25405622 NR Description: hypothetical protein F8L10.3 [imported] -
  misc_feature (1)..(189): Homolog of NCBI NO: 25405622 NR Description: hypothetical protein F8L10.3 [imported] -
  misc_feature (1)..(320): Homolog of NCBI NO: 18404337 NR Description: expressed protein [Arabidopsis thaliana]
MAVTSLAPPWVILRLAFRSVAASSCLHTNQKTLITNLSIPTSFPLRQSALRRCYSAEAIKGDVDFLLKGVGDQAVAKEVKQILEMARRASSKREVLHTDFLTPPIVKESVSLLEKFADVKIVAQGGYPEAERCRISIGHPDVLTSDPDIVAALSITGNFGFQPCSHGDFLGAILGTGISREKLGDILIQEEKGAQVLIVPELVDFVVTALDKVGNVGVTCSKIPLLALEYEPPRTNSFKTVEASLRIDAVASAGFKISRSKLVDLISSKDVRVNWATVTKNGTIVKTGDVVSVSGKGRLKIGEINETKKGKFAVEIIRYL

SEQ ID NO: 44542 - protein, 236 aa, Arabidopsis thaliana
  peptide (1)..(236): Ceres Seq. ID no. 13509547
  misc_feature (161)..(207): Pfam Name: S4 domain Pfam Description: S4 domain
  misc_feature (1)..(234): Homolog of NCBI NO: 22299704 NR Description: ORF_ID:tlr2161~hypothetical protein
  misc_feature (105)..(236): Homolog of NCBI NO: 34909484 NR Description: P0481E12.12 [Oryza sativa (japonica
  misc_feature (1)..(235): Homolog of NCBI NO: 37519960 NR Description: hypothetical protein gll0391 [Gloeobacter
  misc_feature (1)..(236): Homolog of NCBI NO: 23042582 NR Description: hypothetical protein [Trichodesmium erythraeum
  misc_feature (1)..(236): Homolog of NCBI NO: 16330752 NR Description: hypothetical protein [Synechocystis sp. PCC 6803]
  misc_feature (1)..(236): Homolog of NCBI NO: 23125059 NR Description: hypothetical protein [Nostoc punctiforme]
  misc_feature (1)..(236): Homolog of NCBI NO: 17230382 NR Description: hypothetical protein [Nostoc sp. PCC 7120]
  misc_feature (126)..(235): Homolog of NCBI NO: 25405622 NR Description: hypothetical protein F8L10.3 [imported] -
  misc_feature (1)..(105): Homolog of NCBI NO: 25405622 NR Description: hypothetical protein F8L10.3 [imported] -
  misc_feature (1)..(236): Homolog of NCBI NO: 18404337 NR Description: expressed protein [Arabidopsis thaliana]
MARRASSKREVLHTDFLTPPIVKESVSLLEKFADVKIVAQGGYPEAERCRISIGHPDVLTSDPDIVAALSITGNFGFQPCSHGDFLGAILGTGISREKLGDILIQEEKGAQVLIVPELVDFVVTALDKVGNVGVTCSKIPLLALEYEPPRTNSFKTVEASLRIDAVASAGFKISRSKLVDLISSKDVRVNWATVTKNGTIVKTGDVVSVSGKGRLKIGEINETKKGKFAVEIIRYL

SEQ ID NO: 44543 - DNA, 1284 bp, Arabidopsis thaliana
  misc_feature (1)..(1284): Ceres Seq. ID no. 12488583
  misc_feature: MA Experiment ID: 20000307 Result: Down-regulated in Transcription
  misc_feature: MA Experiment 20000307 PARAMETER Experiment Name: At_Germinating_Seeds_Sub_P Parameter: Age (hr) Value: 24 vs. 0
  misc_feature: MA Experiment 20000307 PARAMETER Experiment Name: At_Germinating_Seeds_Sub_P Parameter: Organism Value: A. thaliana
  misc_feature: MA Experiment 20000307 PARAMETER Experiment Name: At_Germinating_Seeds_Sub_P Parameter: Plant Line Value: WS
  misc_feature: MA Experiment 20000307 PARAMETER Experiment Name: At_Germinating_Seeds_Sub_P Parameter: Tissue Value: Germinating Seeds
  misc_feature: MA Experiment ID: 20000348 Result: Down-regulated in Transcription
  misc_feature: MA Experiment 20000348 PARAMETER Experiment Name: At_100uM_ABA_Sub_P Parameter: Age (day) Value: 14
  misc_feature: MA Experiment 20000348 PARAMETER Experiment Name: At_100uM_ABA_Sub_P Parameter: Organism Value: A. thaliana
  misc_feature: MA Experiment 20000348 PARAMETER Experiment Name: At_100uM_ABA_Sub_P Parameter: Plant Line Value: WS
  misc_feature: MA Experiment 20000348 PARAMETER Experiment Name: At_100uM_ABA_Sub_P Parameter: Timepoint (hr) Value: 1
  misc_feature: MA Experiment 20000348 PARAMETER Experiment Name: At_100uM_ABA_Sub_P Parameter: Tissue Value: Aerial
  misc_feature: MA Experiment 20000348 PARAMETER Experiment Name: At_100uM_ABA_Sub_P Parameter: Treatment Value: 100uM ABA vs. No Treatment
aataatgatggattgtaattagccacctgacaaaatctctcatcattcaaagtactatattaatcccctctcttcttcattaccatctcacatctctctctatttctcttccacaaagagtcctaacttcgagttgaaacaaacaccatttctcatctctatctcagaaagaacaaaccatttcgtgttctttctttctctattctcataaggaaatataattcctgaaactgttgagttcttgtgaaaggaaataaaaaacatgatgatgggcaaagaagatctaggtttgagcctaagcttagggttttcacaaaatcacaatcctcttcagatgaatctgaatcctaactcttcattatcaaacaatctccagagactcccatggaaccaaacattcgatcctacatcagatcttcgcaagatagacgtgaacagttttccatcaacggttaactgcgaggaagacacaggagtttcgtcaccaaacagtacgatctcaagcaccattagcgggaagagaagtgagagagaaggaatctccggaaccggcgttggctccggcgacgatcacgacgagatcactccggatcgagggtactcacgtggaacctcagatgaagaagaagacgggggcgaaacgtcgaggaagaagctcaggttatcaaaagatcagtctgcttttctcgaagagactttcaaagaacacaacactctcaatcccaaacagaagctagctttggctaagaagctgaacttgacggcaagacaagtggaagtgtggttccaaaacagaagagctagaaccaagttaaagcaaacggaggtagattgcgaatacttgaaacggtgcgtagagaagctaacggaagagaaccggagacttcagaaagaggctatggagcttcgaactctcaagctgtctccacaattctacggtcagatgactccaccaactacactcatcatgtgtccttcgtgcgagcgtgtgggtggcccatcatcatcgaaccatcaccacaatcacaggcccgtttctatcaatccgtgggttgcttgtgctggtcaggtggctcatgggctgaattttgaagccttgcgtccacgatcgtgattttttattttagtggtgggaaaagggtgttttggtatttttcgttatcgttatatagtctatctgtgtggggtcattgtaattttggatgattggccttctcatgaactagtcctatgtatgatgcaaccttaaaaagatttaaattagcaaaaattagttacaaactt

SEQ ID NO: 44544 - protein, 283 aa, Arabidopsis thaliana
  peptide (1)..(283): Ceres Seq. ID no. 12488584
  misc_feature (1)..(93): Pfam Name: HD-ZIP protein N terminus Pfam Description: HD-ZIP protein N terminus
  misc_feature (1)..(283): Homolog of NCBI NO: 21592922 NR Description: homeobox-leucine zipper protein HAT1 (hd-zip
  misc_feature (1)..(283): Homolog of NCBI NO: 15236076 NR Description: homeobox-leucine zipper protein HAT1 (HD-Zip
  misc_feature (76)..(283): Homolog of NCBI NO: 25386204 NR Description: homeobox protein HAT2
  misc_feature (1)..(283): Homolog of NCBI NO: 15238078 NR Description: homeobox-leucine zipper protein-like
MMMGKEDLGLSLSLGFSQNHNPLQMNLNPNSSLSNNLQRLPWNQTFDPTSDLRKIDVNSFPSTVNCEEDTGVSSPNSTISSTISGKRSEREGISGTGVGSGDDHDEITPDRGYSRGTSDEEEDGGETSRKKLRLSKDQSAFLEETFKEHNTLNPKQKLALAKKLNLTARQVEVWFQNRRARTKLKQTEVDCEYLKRCVEKLTEENRRLQKEAMELRTLKLSPQFYGQMTPPTTLIMCPSCERVGGPSSSNHHHNHRPVSINPWVACAGQVAHGLNFEALRPRS

SEQ ID NO: 44545 - protein, 282 aa, Arabidopsis thaliana
  peptide (1)..(282): Ceres Seq. ID no. 12488585
  misc_feature (1)..(92): Pfam Name: HD-ZIP protein N terminus Pfam Description: HD-ZIP protein N terminus
  misc_feature (1)..(282): Homolog of NCBI NO: 21592922 NR Description: homeobox-leucine zipper protein HAT1 (hd-zip
  misc_feature (1)..(282): Homolog of NCBI NO: 15236076 NR Description: homeobox-leucine zipper protein HAT1 (HD-Zip
  misc_feature (75)..(282): Homolog of NCBI NO: 25386204 NR Description: homeobox protein HAT2
  misc_feature (1)..(282): Homolog of NCBI NO: 15238078 NR Description: homeobox-leucine zipper protein-like
MMGKEDLGLSLSLGFSQNHNPLQMNLNPNSSLSNNLQRLPWNQTFDPTSDLRKIDVNSFPSTVNCEEDTGVSSPNSTISSTISGKRSEREGISGTGVGSGDDHDEITPDRGYSRGTSDEEEDGGETSRKKLRLSKDQSAFLEETFKEHNTLNPKQKLALAKKLNLTARQVEVWFQNRRARTKLKQTEVDCEYLKRCVEKLTEENRRLQKEAMELRTLKLSPQFYGQMTPPTTLIMCPSCERVGGPSSSNHHHNHRPVSINPWVACAGQVAHGLNFEALRPRS

SEQ ID NO: 44546 - protein, 281 aa, Arabidopsis thaliana
  peptide (1)..(281): Ceres Seq. ID no. 12488586
  misc_feature (1)..(91): Pfam Name: HD-ZIP protein N terminus Pfam Description: HD-ZIP protein N terminus
  misc_feature (1)..(281): Homolog of NCBI NO: 21592922 NR Description: homeobox-leucine zipper protein HAT1 (hd-zip
  misc_feature (1)..(281): Homolog of NCBI NO: 15236076 NR Description: homeobox-leucine zipper protein HAT1 (HD-Zip
  misc_feature (74)..(281): Homolog of NCBI NO: 25386204 NR Description: homeobox protein HAT2
  misc_feature (1)..(281): Homolog of NCBI NO: 15238078 NR Description: homeobox-leucine zipper protein-like
MGKEDLGLSLSLGFSQNHNPLQMNLNPNSSLSNNLQRLPWNQTFDPTSDLRKIDVNSFPSTVNCEEDTGVSSPNSTISSTISGKRSEREGISGTGVGSGDDHDEITPDRGYSRGTSDEEEDGGETSRKKLRLSKDQSAFLEETFKEHNTLNPKQKLALAKKLNLTARQVEVWFQNRRARTKLKQTEVDCEYLKRCVEKLTEENRRLQKEAMELRTLKLSPQFYGQMTPPTTLIMCPSCERVGGPSSSNHHHNHRPVSINPWVACAGQVAHGLNFEALRPRS

SEQ ID NO: 44547 - DNA, 1120 bp, Arabidopsis thaliana
  misc_feature (1)..(1120): Ceres Seq. ID no. 13509548
  misc_feature: MA Experiment ID: 20000234 Result: Up-regulated in Transcription
  misc_feature: MA Experiment 20000234 PARAMETER Experiment Name: At_Siliques_P Parameter: Age (day) Value: 21
  misc_feature: MA Experiment 20000234 PARAMETER Experiment Name: At_Siliques_P Parameter: Organism Value: A. thaliana
  misc_feature: MA Experiment 20000234 PARAMETER Experiment Name: At_Siliques_P Parameter: Plant Line Value: WS
  misc_feature: MA Experiment 20000234 PARAMETER Experiment Name: At_Siliques_P Parameter: Tissue Value: Less Than 5mm Siliques vs. Whole Plant
  misc_feature: MA Experiment ID: 20000265 Result: Up-regulated in Transcription
  misc_feature: MA Experiment 20000265 PARAMETER Experiment Name: At_Open_Flower_P Parameter: Age (day) Value: 21
  misc_feature: MA Experiment 20000265 PARAMETER Experiment Name: At_Open_Flower_P Parameter: Plant Line Value: WS
  misc_feature: MA Experiment 20000265 PARAMETER Experiment Name: At_Open_Flower_P Parameter: Tissue Value: Closed Flower vs. Whole Plant
  misc_feature: MA Experiment ID: 20000286 Result: Up-regulated in Transcription
  misc_feature: MA Experiment 20000286 PARAMETER Experiment Name: At_Open_Flower_P Parameter: Age (day) Value: 21
  misc_feature: MA Experiment 20000286 PARAMETER Experiment Name: At_Open_Flower_P Parameter: Plant Line Value: WS
  misc_feature: MA Experiment 20000286 PARAMETER Experiment Name: At_Open_Flower_P Parameter: Tissue Value: Half Open vs. Whole Plant
  misc_feature: MA Experiment ID: 20000441 Result: Down-regulated in Transcription
  misc_feature: MA Experiment 20000441 PARAMETER Experiment Name: At_1uM_BR-BRZ__P Parameter: Tissue Value: Shoot Apices
  misc_feature: MA Experiment 20000441 PARAMETER Experiment Name: At_1uM_BR-BRZ__P Parameter: Treatment Value: 1uM BR vs. No Treatment
  misc_feature: MA Experiment ID: 20000443 Result: Down-regulated in Transcription
  misc_feature: MA Experiment 20000443 PARAMETER Experiment Name: At_1uM_BR-BRZ__P Parameter: Tissue Value: Shoot Apices
  misc_feature: MA Experiment 20000443 PARAMETER Experiment Name: At_1uM_BR-BRZ__P Parameter: Treatment Value: 1uM BRZ vs. No Treatment
  misc_feature: MA Experiment ID: 20001910 Result: Down-regulated in Transcription
  misc_feature: MA Experiment 20001910 PARAMETER Experiment Name: At_Drought_Reproduction_P Parameter: Age (day) Value: 37
  misc_feature: MA Experiment 20001910 PARAMETER Experiment Name: At_Drought_Reproduction_P Parameter: Organism Value: A. thaliana
  misc_feature: MA Experiment 20001910 PARAMETER Experiment Name: At_Drought_Reproduction_P Parameter: Plant Line Value: WS
  misc_feature: MA Experiment 20001910 PARAMETER Experiment Name: At_Drought_Reproduction_P Parameter: Timepoint (day) Value: 7
  misc_feature: MA Experiment 20001910 PARAMETER Experiment Name: At_Drought_Reproduction_P Parameter: Tissue Value: Flowers
  misc_feature: MA Experiment 20001910 PARAMETER Experiment Name: At_Drought_Reproduction_P Parameter: Treatment Value: Drought vs. No Drought
aaagaaacaaagagtaacaatgaaacgaaacagtataaatattcatcacgttacttctttttcttcgagtccgttttggtgtgttttctttctcgtgttgttatgtaagacgtccaccaacgctttggtgaagcagccgccaaacgaaacgactccggcgataattgtgttcggagattcaatcgttgatgccggaaataatgacgacattatgacaacgttggctagatgcaattatcctccttacggcatcgattttgacggtggaattcctaccggaagattttgcaacggcaaagttgcgactgattttatagcgggaaaattcggaattaaaccaagtataccggcatatcgaaatccaaatttgaaaccagaagatctcttaaccggtgtaacatttgcgtctggtggtgctggttacgttcccttcacaacccaattatcgggaggaatagctttatcgcagcaactgaagttattcgaagagtatgtagagaagatgaagaaaatggttggggaagaaaggacaaagctcataattaaaaacagtttgttcatggttatatgtggcagtaatgatataaccaacacctactttggtcttccttctgttcaacaacaatacgacgtcgcttcctttaccactcttatggccgacaatgctcgatcttttgctcaaaaattacatgaatatggagcgaggagaatacaagtattcggtgcaccaccagtaggatgtgtcccatcacagagaaccttagcaggagggccaacaagaaattgtgttgttaggttcaatgatgcaacaaagctctacaatgttaagctcgctgcaaatttgggttctttgtcaagaactttaggagacaagacaataatctacgttgacatatatgattctctccttgatatcattcttgaccctcgacaatatggatttaaggtggttgataaaggatgttgtggaactggactaattgaagttgctcttttatgcaacaactttgcagctgatgtatgtccaaatagagatgaatatgtgttttgggatagtttccatccgactgagaagacttacagaattatggccacaaaatattttgagagatatgtatga

SEQ ID NO: 44548 - protein, 372 aa, Arabidopsis thaliana
  peptide (1)..(372): Ceres Seq. ID no. 13509549
  misc_feature (54)..(367): Pfam Name: GDSL-like Lipase/Acylhydrolase Pfam Description: GDSL-like Lipase/Acylhydrolase
  misc_feature (41)..(369): Homolog of NCBI NO: 21592372 NR Description: anter-specific proline-rich protein APG
  misc_feature (41)..(369): Homolog of NCBI NO: 18394825 NR Description: lipase, putative [Arabidopsis thaliana]
  misc_feature (26)..(371): Homolog of NCBI NO: 25404994 NR Description: protein T4O12.13 [imported] - Arabidopsis
  misc_feature (26)..(372): Homolog of NCBI NO: 26449364 NR Description: putative family II lipase EXL3 [Arabidopsis
  misc_feature (26)..(372): Homolog of NCBI NO: 15222901 NR Description: family II extracellular lipase 3 (EXL3)
  misc_feature (7)..(343): Homolog of NCBI NO: 8778807 NR Description: T4O12.12 [Arabidopsis thaliana]
  misc_feature (7)..(372): Homolog of NCBI NO: 18410954 NR Description: family II extracellular lipase 1 (EXL1)
  misc_feature (7)..(372): Homolog of NCBI NO: 28393626 NR Description: putative family II extracellular lipase 1 (EXL1)
  misc_feature (37)..(372): Homolog of NCBI NO: 8778807 NR Description: T4O12.12 [Arabidopsis thaliana]
  misc_feature (7)..(372): Homolog of NCBI NO: 18410956 NR Description: family II extracellular lipase 2 (EXL2)
KKQRVTMKRNSINIHHVTSFSSSPFWCVFFLVLLCKTSTNALVKQPPNETTPAIIVFGDSIVDAGNNDDIMTTLARCNYPPYGIDFDGGIPTGRFCNGKVATDFIAGKFGIKPSIPAYRNPNLKPEDLLTGVTFASGGAGYVPFTTQLSGGIALSQQLKLFEEYVEKMKKMVGEERTKLIIKNSLFMVICGSNDITNTYFGLPSVQQQYDVASFTTLMADNARSFAQKLHEYGARRIQVFGAPPVGCVPSQRTLAGGPTRNCVVRFNDATKLYNVKLAANLGSLSRTLGDKTIIYVDIYDSLLDIILDPRQYGFKVVDKGCCGTGLIEVALLCNNFAADVCPNRDEYVFWDSFHPTEKTYRIMATKYFERYV

SEQ ID NO: 44549 - protein, 366 aa, Arabidopsis thaliana
  peptide (1)..(366): Ceres Seq. ID no. 13509550
  misc_feature (48)..(361): Pfam Name: GDSL-like Lipase/Acylhydrolase Pfam Description: GDSL-like Lipase/Acylhydrolase
  misc_feature (35)..(363): Homolog of NCBI NO: 21592372 NR Description: anter-specific proline-rich protein APG
  misc_feature (35)..(363): Homolog of NCBI NO: 18394825 NR Description: lipase, putative [Arabidopsis thaliana]
  misc_feature (20)..(365): Homolog of NCBI NO: 25404994 NR Description: protein T4O12.13 [imported] - Arabidopsis
  misc_feature (20)..(366): Homolog of NCBI NO: 26449364 NR Description: putative family II lipase EXL3 [Arabidopsis
  misc_feature (20)..(366): Homolog of NCBI NO: 15222901 NR Description: family II extracellular lipase 3 (EXL3)
  misc_feature (1)..(337): Homolog of NCBI NO: 8778807 NR Description: T4O12.12 [Arabidopsis thaliana]
  misc_feature (1)..(366): Homolog of NCBI NO: 18410954 NR Description: family II extracellular lipase 1 (EXL1)
  misc_feature (1)..(366): Homolog of NCBI NO: 28393626 NR Description: putative family II extracellular lipase 1 (EXL1)
  misc_feature (31)..(366): Homolog of NCBI NO: 8778807 NR Description: T4O12.12 [Arabidopsis thaliana]
  misc_feature (1)..(366): Homolog of NCBI NO: 18410956 NR Description: family II extracellular lipase 2 (EXL2)
MKRNSINIHHVTSFSSSPFWCVFFLVLLCKTSTNALVKQPPNETTPAIIVFGDSIVDAGNNDDIMTTLARCNYPPYGIDFDGGIPTGRFCNGKVATDFIAGKFGIKPSIPAYRNPNLKPEDLLTGVTFASGGAGYVPFTTQLSGGIALSQQLKLFEEYVEKMKKMVGEERTKLIIKNSLFMVICGSNDITNTYFGLPSVQQQYDVASFTTLMADNARSFAQKLHEYGARRIQVFGAPPVGCVPSQRTLAGGPTRNCVVRFNDATKLYNVKLAANLGSLSRTLGDKTIIYVDIYDSLLDIILDPRQYGFKVVDKGCCGTGLIEVALLCNNFAADVCPNRDEYVFWDSFHPTEKTYRIMATKYFERYV

SEQ ID NO: 44550 - protein, 302 aa, Arabidopsis thaliana
  peptide (1)..(302): Ceres Seq. ID no. 13509551
  misc_feature (1)..(297): Pfam Name: GDSL-like Lipase/Acylhydrolase Pfam Description: GDSL-like Lipase/Acylhydrolase
  misc_feature (1)..(299): Homolog of NCBI NO: 21592372 NR Description: anter-specific proline-rich protein APG
  misc_feature (1)..(299): Homolog of NCBI NO: 18394825 NR Description: lipase, putative [Arabidopsis thaliana]
  misc_feature (1)..(301): Homolog of NCBI NO: 25404994 NR Description: protein T4O12.13 [imported] - Arabidopsis
  misc_feature (1)..(302): Homolog of NCBI NO: 26449364 NR Description: putative family II lipase EXL3 [Arabidopsis
  misc_feature (1)..(302): Homolog of NCBI NO: 15222901 NR Description: family II extracellular lipase 3 (EXL3)
  misc_feature (1)..(273): Homolog of NCBI NO: 8778807 NR Description: T4O12.12 [Arabidopsis thaliana]
  misc_feature (1)..(302): Homolog of NCBI NO: 18410954 NR Description: family II extracellular lipase 1 (EXL1)
  misc_feature (1)..(302): Homolog of NCBI NO: 28393626 NR Description: putative family II extracellular lipase 1 (EXL1)
  misc_feature (1)..(302): Homolog of NCBI NO: 8778807 NR Description: T4O12.12 [Arabidopsis thaliana]
  misc_feature (1)..(302): Homolog of NCBI NO: 18410956 NR Description: family II extracellular lipase 2 (EXL2)
MTTLARCNYPPYGIDFDGGIPTGRFCNGKVATDFIAGKFGIKPSIPAYRNPNLKPEDLLTGVTFASGGAGYVPFTTQLSGGIALSQQLKLFEEYVEKMKKMVGEERTKLIIKNSLFMVICGSNDITNTYFGLPSVQQQYDVASFTTLMADNARSFAQKLHEYGARRIQVFGAPPVGCVPSQRTLAGGPTRNCVVRFNDATKLYNVKLAANLGSLSRTLGDKTIIYVDIYDSLLDIILDPRQYGFKVVDKGCCGTGLIEVALLCNNFAADVCPNRDEYVFWDSFHPTEKTYRIMATKYFERYV

SEQ ID NO: 44551 - DNA, 1868 bp, Arabidopsis thaliana
  misc_feature (1)..(1868): Ceres Seq. ID no. 13509820
  misc_feature: MA Experiment ID: 20000234 Result: Down-regulated in Transcription
  misc_feature: MA Experiment 20000234 PARAMETER Experiment Name: At_Siliques_P Parameter: Age (day) Value: 21
  misc_feature: MA Experiment 20000234 PARAMETER Experiment Name: At_Siliques_P Parameter: Organism Value: A. thaliana
  misc_feature: MA Experiment 20000234 PARAMETER Experiment Name: At_Siliques_P Parameter: Plant Line Value: WS
  misc_feature: MA Experiment 20000234 PARAMETER Experiment Name: At_Siliques_P Parameter: Tissue Value: Less Than 5mm Siliques vs. Whole Plant
  misc_feature: MA Experiment ID: 20000264 Result: Down-regulated in Transcription
  misc_feature: MA Experiment 20000264 PARAMETER Experiment Name: At_Open_Flower_P Parameter: Age (day) Value: 21
  misc_feature: MA Experiment 20000264 PARAMETER Experiment Name: At_Open_Flower_P Parameter: Plant Line Value: WS
  misc_feature: MA Experiment 20000264 PARAMETER Experiment Name: At_Open_Flower_P Parameter: Tissue Value: Open Flower vs. Whole Plant
agattctccatcttagttcttgtaacctctccctcttcttctccaaattccacctgagagaagagaactcattccacccaaaaagcaataatatatagtaccgtactttgattttttcgataatctgttgattgaagttaagccaaaactcagctctgttcttattcttcttcaaacccaagtttcccacttcactgattctttcatcttagctcgttttaaccacaaagttcagttcttttttggtgtgtttctttttcgttattggcttttgccttttttgggtatagggtgtttacgatttatctctcggttccgatgttgttcaaaggtgtttttgctgtctttttcgtaatcactttgttgtacgcaagtttgttaattgaagttgaagggattggtgtgaactggggctcacaggcgaggcatcccctacctccggctacggtggtgaggcttctccgagaaaacggtatccaaaaggtgaaacttttcgaggccgactctgcgattctcaaagctttaagtcggacagggattcaagttatggtcggaatccctaacgacttgcttgctcctttagccggtagcgttgcagccgctgagagatgggtctctcagaatgtatctgctcatgtctcctctaatggcgtcgatatcaggtatgtggcagttgggaatgagccttttctaaaagcattcaatggaacatttgagggtataactctacctgctcttcagaatatacaatcagctatcatcaaagctggtttagcgactcaggtgaaagtcacagtgcctcttaacgcagatgtgtaccaaagtgcgtctaatctcccttcggatggagatttcaggcctgaaatccgtgatctcatgttgaacattgttaagtttctgagtgataacggagcaccattcactatcaacatttaccctttcatcagtctctacaacgacccgaatttccctgtggagtttgctttctttgatggaactggtactccgataaacgacaatggaagaatctacgacaatgttcttgatgcaaactacgatacacttgtgtggtcgttgcagaagaatgggtttgggaatttgactattattgttggggaagttgggtggccaacagatggagataagaacgcaaacttgatgtatgccaggcggtataatcaaggttttatgaaccgtcaaaaggctaataaaggaacacctatgagacctggggcaatggatgcttacttgtttggtcttatcgatgaagatgccaaaagcattcagcctggaaactttgaaagacactgggggatattttatattgatggacagcctaagtatcagctcagtcttggcagtggtaacgggctgatccctgcaaaggatgttcattatttggctaagaaatggtgtattcttgcgccaaatgctaatcttcaggatcctcagttgggaccaagcgtgagctacgcttgtgatcatgctgattgcaccagtcttggttatggctcctcttgtggtaacctgaatctagcacagaatgtttcgtatgcgttcaatagctattaccaggtaagtaatcagctcgacagtgcgtgtaagttcccgggtctctctatagtcagtactagggatccttctgttgggagttgcaaattcaagataatgatcaagtcagaagatgctagtgaagcaagtgccatgatgcctataacacgatcaacggcagtgctgctacttctctccatctgtctgtatattgttctgtgaatactgaagaaaatttgatgggtttgattatttctttttttccttttttcttttgcaaaacttttggtgtttatggagaaacagaaaagttttgc

SEQ ID NO: 44552 - protein, 484 aa, Arabidopsis thaliana
  peptide (1)..(484): Ceres Seq. ID no. 13509821
  misc_feature (27)..(346): Pfam Name: Glycosyl hydrolases family 17 Pfam Description: Glycosyl hydrolases family 17
  misc_feature (8)..(452): Homolog of NCBI NO: 6223646 NR Description: putative beta-1,3-glucanase [Arabidopsis thaliana]
  misc_feature (6)..(476): Homolog of NCBI NO: 18483232 NR Description: 3-glucanase [Sorghum bicolor]
  misc_feature (20)..(478): Homolog of NCBI NO: 28269434 NR Description: putative beta-1,3 glucanase
  misc_feature (24)..(480): Homolog of NCBI NO: 34395009 NR Description: putative 3-glucanase [Oryza sativa (japonica
  misc_feature (9)..(470): Homolog of NCBI NO: 15242078 NR Description: glycosyl hydrolase family 17 [Arabidopsis
  misc_feature (27)..(478): Homolog of NCBI NO: 30017525 NR Description: putative 1,3-beta-glucanase
  misc_feature (12)..(484): Homolog of NCBI NO: 30060382 NR Description: putative glucan endo-1,3-beta-glucosidase
  misc_feature (12)..(453): Homolog of NCBI NO: 16604491 NR Description: AT5g58090/k21l19_70 [Arabidopsis thaliana]
  misc_feature (12)..(453): Homolog of NCBI NO: 22327934 NR Description: glycosyl hydrolase family 17 [Arabidopsis
  misc_feature (1)..(484): Homolog of NCBI NO: 15235840 NR Description: glycosyl hydrolase family 17 [Arabidopsis
MLFKGVFAVFFVITLLYASLLIEVEGIGVNWGSQARHPLPPATVVRLLRENGIQKVKLFEADSAILKALSRTGIQVMVGIPNDLLAPLAGSVAAAERWVSQNVSAHVSSNGVDIRYVAVGNEPFLKAFNGTFEGITLPALQNIQSAIIKAGLATQVKVTVPLNADVYQSASNLPSDGDFRPEIRDLMLNIVKFLSDNGAPFTINIYPFISLYNDPNFPVEFAFFDGTGTPINDNGRIYDNVLDANYDTLVWSLQKNGFGNLTIIVGEVGWPTDGDKNANLMYARRYNQGFMNRQKANKGTPMRPGAMDAYLFGLIDEDAKSIQPGNFERHWGIFYIDGQPKYQLSLGSGNGLIPAKDVHYLAKKWCILAPNANLQDPQLGPSVSYACDHADCTSLGYGSSCGNLNLAQNVSYAFNSYYQVSNQLDSACKFPGLSIVSTRDPSVGSCKFKIMIKSEDASEASAMMPITRSTAVLLLLSICLYIVL

SEQ ID NO: 44553 - protein, 408 aa, Arabidopsis thaliana
  peptide (1)..(408): Ceres Seq. ID no. 13509822
  misc_feature (1)..(270): Pfam Name: Glycosyl hydrolases family 17 Pfam Description: Glycosyl hydrolases family 17
  misc_feature (1)..(376): Homolog of NCBI NO: 6223646 NR Description: putative beta-1,3-glucanase [Arabidopsis thaliana]
  misc_feature (1)..(400): Homolog of NCBI NO: 18483232 NR Description: 3-glucanase [Sorghum bicolor]
  misc_feature (1)..(402): Homolog of NCBI NO: 28269434 NR Description: putative beta-1,3 glucanase
  misc_feature (1)..(404): Homolog of NCBI NO: 34395009 NR Description: putative 3-glucanase [Oryza sativa (japonica
  misc_feature (1)..(394): Homolog of NCBI NO: 15242078 NR Description: glycosyl hydrolase family 17 [Arabidopsis
  misc_feature (1)..(402): Homolog of NCBI NO: 30017525 NR Description: putative 1,3-beta-glucanase
  misc_feature (1)..(408): Homolog of NCBI NO: 30060382 NR Description: putative glucan endo-1,3-beta-glucosidase
  misc_feature (1)..(377): Homolog of NCBI NO: 16604491 NR Description: AT5g58090/k21l19_70 [Arabidopsis thaliana]
  misc_feature (1)..(377): Homolog of NCBI NO: 22327934 NR Description: glycosyl hydrolase family 17 [Arabidopsis
  misc_feature (1)..(408): Homolog of NCBI NO: 15235840 NR Description: glycosyl hydrolase family 17 [Arabidopsis
MVGIPNDLLAPLAGSVAAAERWVSQNVSAHVSSNGVDIRYVAVGNEPFLKAFNGTFEGITLPALQNIQSAIIKAGLATQVKVTVPLNADVYQSASNLPSDGDFRPEIRDLMLNIVKFLSDNGAPFTINIYPFISLYNDPNFPVEFAFFDGTGTPINDNGRIYDNVLDANYDTLVWSLQKNGFGNLTIIVGEVGWPTDGDKNANLMYARRYNQGFMNRQKANKGTPMRPGAMDAYLFGLIDEDAKSIQPGNFERHWGIFYIDGQPKYQLSLGSGNGLIPAKDVHYLAKKWCILAPNANLQDPQLGPSVSYACDHADCTSLGYGSSCGNLNLAQNVSYAFNSYYQVSNQLDSACKFPGLSIVSTRDPSVGSCKFKIMIKSEDASEASAMMPITRSTAVLLLLSICLYIVL

SEQ ID NO: 44554 - protein, 298 aa, Arabidopsis thaliana
  peptide (1)..(298): Ceres Seq. ID no. 13509823
  misc_feature (1)..(160): Pfam Name: Glycosyl hydrolases family 17 Pfam Description: Glycosyl hydrolases family 17
  misc_feature (1)..(266): Homolog of NCBI NO: 6223646 NR Description: putative beta-1,3-glucanase [Arabidopsis thaliana]
  misc_feature (1)..(290): Homolog of NCBI NO: 18483232 NR Description: 3-glucanase [Sorghum bicolor]
  misc_feature (1)..(292): Homolog of NCBI NO: 28269434 NR Description: putative beta-1,3 glucanase
  misc_feature (1)..(294): Homolog of NCBI NO: 34395009 NR Description: putative 3-glucanase [Oryza sativa (japonica
  misc_feature (1)..(284): Homolog of NCBI NO: 15242078 NR Description: glycosyl hydrolase family 17 [Arabidopsis
  misc_feature (1)..(292): Homolog of NCBI NO: 30017525 NR Description: putative 1,3-beta-glucanase
  misc_feature (1)..(298): Homolog of NCBI NO: 30060382 NR Description: putative glucan endo-1,3-beta-glucosidase
  misc_feature (1)..(267): Homolog of NCBI NO: 16604491 NR Description: AT5g58090/k21l19_70 [Arabidopsis thaliana]
  misc_feature (1)..(267): Homolog of NCBI NO: 22327934 NR Description: glycosyl hydrolase family 17 [Arabidopsis
  misc_feature (1)..(298): Homolog of NCBI NO: 15235840 NR Description: glycosyl hydrolase family 17 [Arabidopsis
MLNIVKFLSDNGAPFTINIYPFISLYNDPNFPVEFAFFDGTGTPINDNGRIYDNVLDANYDTLVWSLQKNGFGNLTIIVGEVGWPTDGDKNANLMYARRYNQGFMNRQKANKGTPMRPGAMDAYLFGLIDEDAKSIQPGNFERHWGIFYIDGQPKYQLSLGSGNGLIPAKDVHYLAKKWCILAPNANLQDPQLGPSVSYACDHADCTSLGYGSSCGNLNLAQNVSYAFNSYYQVSNQLDSACKFPGLSIVSTRDPSVGSCKFKIMIKSEDASEASAMMPITRSTAVLLLLSICLYIVL

SEQ ID NO: 44555 - DNA, 1687 bp, Arabidopsis thaliana
  misc_feature (1)..(1687): Ceres Seq. ID no. 13509518
  misc_feature: MA Experiment ID: 20000171 Result: Down-regulated in Transcription
  misc_feature: MA Experiment 20000171 PARAMETER Experiment Name: At_42deg_Heat_P Parameter: Age (day) Value: 14
  misc_feature: MA Experiment 20000171 PARAMETER Experiment Name: At_42deg_Heat_P Parameter: Organism Value: A. thaliana
  misc_feature: MA Experiment 20000171 PARAMETER Experiment Name: At_42deg_Heat_P Parameter: Plant Line Value: WS
  misc_feature: MA Experiment 20000171 PARAMETER Experiment Name: At_42deg_Heat_P Parameter: Temperature (deg C) Value: 42 vs. 22
  misc_feature: MA Experiment 20000171 PARAMETER Experiment Name: At_42deg_Heat_P Parameter: Timepoint (hr) Value: 1
  misc_feature: MA Experiment 20000171 PARAMETER Experiment Name: At_42deg_Heat_P Parameter: Tissue Value: Aerial
  misc_feature: MA Experiment ID: 20000173 Result: Down-regulated in Transcription
  misc_feature: MA Experiment 20000173 PARAMETER Experiment Name: At_42deg_Heat_P Parameter: Age (day) Value: 14
  misc_feature: MA Experiment 20000173 PARAMETER Experiment Name: At_42deg_Heat_P Parameter: Organism Value: A. thaliana
  misc_feature: MA Experiment 20000173 PARAMETER Experiment Name: At_42deg_Heat_P Parameter: Plant Line Value: WS
  misc_feature: MA Experiment 20000173 PARAMETER Experiment Name: At_42deg_Heat_P Parameter: Temperature (deg C) Value: 42 vs. 22
  misc_feature: MA Experiment 20000173 PARAMETER Experiment Name: At_42deg_Heat_P Parameter: Timepoint (hr) Value: 6
  misc_feature: MA Experiment 20000173 PARAMETER Experiment Name: At_42deg_Heat_P Parameter: Tissue Value: Aerial
  misc_feature: MA Experiment ID: 20000180 Result: Down-regulated in Transcription
  misc_feature: MA Experiment 20000180 PARAMETER Experiment Name: At_Germinating_Seeds_P Parameter: Age (hr) Value: 24 vs. 0
  misc_feature: MA Experiment 20000180 PARAMETER Experiment Name: At_Germinating_Seeds_P Parameter: Tissue Value: Germinating Seeds
  misc_feature: MA Experiment ID: 20000184 Result: Down-regulated in Transcription
  misc_feature: MA Experiment 20000184 PARAMETER Experiment Name: At_Shoots__P Parameter: Age (day) Value: 7
  misc_feature: MA Experiment 20000184 PARAMETER Experiment Name: At_Shoots__P Parameter: Tissue Value: Shoots vs. Whole Plant
  misc_feature: MA Experiment ID: 20000227 Result: Down-regulated in Transcription
  misc_feature: MA Experiment 20000227 PARAMETER Experiment Name: At_Root-Tips-vs-Tops_P Parameter: Tissue Value: Root Tips vs. Root Tops
  misc_feature: MA Experiment ID: 20000268 Result: Up-regulated in Transcription
  misc_feature: MA Experiment 20000268 PARAMETER Experiment Name: At_100mM_NaCl__P Parameter: Age (day) Value: 14
  misc_feature: MA Experiment 20000268 PARAMETER Experiment Name: At_100mM_NaCl__P Parameter: Organism Value: A. thaliana
  misc_feature: MA Experiment 20000268 PARAMETER Experiment Name: At_100mM_NaCl__P Parameter: Plant Line Value: WS
  misc_feature: MA Experiment 20000268 PARAMETER Experiment Name: At_100mM_NaCl__P Parameter: Timepoint (hr) Value: 6
  misc_feature: MA Experiment 20000268 PARAMETER Experiment Name: At_100mM_NaCl__P Parameter: Tissue Value: Whole Plant
  misc_feature: MA Experiment 20000268 PARAMETER Experiment Name: At_100mM_NaCl__P Parameter: Treatment Value: 100mM NaCl vs. No Treatment
  misc_feature: MA Experiment ID: 20000286 Result: Down-regulated in Transcription
  misc_feature: MA Experiment 20000286 PARAMETER Experiment Name: At_Open_Flower_P Parameter: Age (day) Value: 21
  misc_feature: MA Experiment 20000286 PARAMETER Experiment Name: At_Open_Flower_P Parameter: Plant Line Value: WS
  misc_feature: MA Experiment 20000286 PARAMETER Experiment Name: At_Open_Flower_P Parameter: Tissue Value: Half Open vs. Whole Plant
  misc_feature: MA Experiment ID: 20000437 Result: Up-regulated in Transcription
  misc_feature: MA Experiment 20000437 PARAMETER Experiment Name: At_Drought_P Parameter: Age (day) Value: 8
  misc_feature: MA Experiment 20000437 PARAMETER Experiment Name: At_Drought_P Parameter: Organism Value: A. thaliana
  misc_feature: MA Experiment 20000437 PARAMETER Experiment Name: At_Drought_P Parameter: Plant Line Value: WS
  misc_feature: MA Experiment 20000437 PARAMETER Experiment Name: At_Drought_P Parameter: Timepoint (hr) Value: 24
  misc_feature: MA Experiment 20000437 PARAMETER Experiment Name: At_Drought_P Parameter: Tissue Value: Whole Plant
  misc_feature: MA Experiment 20000437 PARAMETER Experiment Name: At_Drought_P Parameter: Treatment Value: Drought vs. No Drought
  misc_feature: MA Experiment ID: 20000438 Result: Down-regulated in Transcription
  misc_feature: MA Experiment 20000438 PARAMETER Experiment Name: At_Shoots__P Parameter: Age (day) Value: 14
  misc_feature: MA Experiment 20000438 PARAMETER Experiment Name: At_Shoots__P Parameter: Tissue Value: Shoots vs. Whole Plant
  misc_feature: MA Experiment ID: 20000445 Result: Up-regulated in Transcription
  misc_feature: MA Experiment 20000445 PARAMETER Experiment Name: At_100uM_NAA__P Parameter: Age (day) Value: 14
  misc_feature: MA Experiment 20000445 PARAMETER Experiment Name: At_100uM_NAA__P Parameter: Organism Value: A. thaliana
  misc_feature: MA Experiment 20000445 PARAMETER Experiment Name: At_100uM_NAA__P Parameter: Plant Line Value: WS
  misc_feature: MA Experiment 20000445 PARAMETER Experiment Name: At_100uM_NAA__P Parameter: Timepoint (hr) Value: 6
  misc_feature: MA Experiment 20000445 PARAMETER Experiment Name: At_100uM_NAA__P Parameter: Tissue Value: Aerial
  misc_feature: MA Experiment 20000445 PARAMETER Experiment Name: At_100uM_NAA__P Parameter: Treatment Value: 100uM NAA vs. No Treatment
aaatcacacatcaatagggacaaagcgagagagaagagagagaccggaccaaacacaaagcccttaaagataggaagatactttgtcatagctttgctatttctcaaaaaaaaatgagggacgacagagaaagaggagagggtgatttgtcatggcctttgatcggagagaaaagtagtgtcaaggaagaagtgaagaagcagctatggctttcaggcccactcatcgccgtgagtcttcttcagttttgtctacaagttatctccgtcatgttcgttggccatcttggctctcttcctctctccgccgcatccatcgccacctctttcgcctccgtcaccggtttcagcttcctcatgggaacagcaagtgcgttagatacgctttgtggccaagcgtacggagcaaagaagtacggaatgttaggaatacaaatgcaaagagctatgtttgttcttacactagcttctattcctctctccatcatttgggctaacacagagcaccttctcgtcttctttggacaaaacaaatccattgctacactcgctggctcctacgcaaaattcatgatcccaagcatcttcgcctacggtcttcttcaatgctttaacaggttcttgcaggcccaaaacaatgtgtttcctgtggttttctgctctggagtaacaacttctctacatgtcctcctttgttgggtcttggttttcaaatctggtttagggtttcaaggagctgctcttgccaactccatttcgtattggcttaatgtcgttctcttgttctgttacgtcaagttttcgccttcttgctcactaacttggaccggtttctctaaggaggctctacgcgatatcctcccttttctgagactagctgttccttctgcacttatggtctgcttagagatgtggtcctttgaacttttagttctcttatcaggacttcttccaaacccggttctagaaacttctgttctctcaatctgccttaatacatcaggaacaatgtggatgatcccatttggtctaagtggcgctgcaagcacgaggatctcaaatgaattaggagcgggtaacccgaaagtggctaagcttgcggtgcgtgtggtcatttgcattgcagtagcagaaagtatagtgatcggatcagtcttgatattgataaggaatatatggggattagcttatagtagtgaactagaagtagtcagctacgtagcctcgatgatgccaattctcgccttaggaaattttctagacagtcttcaatgcgttctctcaggggttgctagaggatgtggatggcagaagataggagcaatcattaatcttggttcatattatcttgttggagttccttcaggattgttacttgcttttcactttcacgttggtggtcgggggctttggcttggaatcatatgtgccctcgttgttcaagtttttggtcttggcctcgtcactatttttacaaattgggatgaagaggccaagaaagctacaaacagaattgagtcttcttcaagtgtgaaagattttgcagtcgatgacagatcagttgttgtattttgagaaccattgtgtgtgttttgttcttaacaacaaagacactcaatcattgtcattgatagtttaaaaaatgtattttacttcatcatttttaaccaatatggaagagaaatggt

SEQ ID NO: 44556 - protein, 486 aa, Arabidopsis thaliana
  peptide (1)..(486): Ceres Seq. ID no. 13509519
  misc_feature (6)..(467): Homolog of NCBI NO: 15218070 NR Description: MATE efflux protein family [Arabidopsis thaliana]
  misc_feature (26)..(471): Homolog of NCBI NO: 37533148 NR Description: putative transmembrane protein
  misc_feature (6)..(471): Homolog of NCBI NO: 37533146 NR Description: putative integral membrane protein
  misc_feature (18)..(470): Homolog of NCBI NO: 16797803 NR Description: hypothetical membrane protein-1 [Marchantia
  misc_feature (19)..(467): Homolog of NCBI NO: 22138480 NR Description: hypothetical protein [Oryza sativa (japonica
  misc_feature (22)..(475): Homolog of NCBI NO: 38346676 NR Description: OSJNBa0069D17.7 [Oryza sativa (japonica
  misc_feature (16)..(475): Homolog of NCBI NO: 21537267 NR Description: putative integral membrane protein [Arabidopsis
  misc_feature (16)..(475): Homolog of NCBI NO: 15219524 NR Description: MATE efflux protein family [Arabidopsis thaliana]
  misc_feature (5)..(461): Homolog of NCBI NO: 15226290 NR Description: MATE efflux protein family [Arabidopsis thaliana]
  misc_feature (1)..(486): Homolog of NCBI NO: 15237158 NR Description: MATE efflux protein - related [Arabidopsis
MRDDRERGEGDLSWPLIGEKSSVKEEVKKQLWLSGPLIAVSLLQFCLQVISVMFVGHLGSLPLSAASIATSFASVTGFSFLMGTASALDTLCGQAYGAKKYGMLGIQMQRAMFVLTLASIPLSIIWANTEHLLVFFGQNKSIATLAGSYAKFMIPSIFAYGLLQCFNRFLQAQNNVFPVVFCSGVTTSLHVLLCWVLVFKSGLGFQGAALANSISYWLNVVLLFCYVKFSPSCSLTWTGFSKEALRDILPFLRLAVPSALMVCLEMWSFELLVLLSGLLPNPVLETSVLSICLNTSGTMWMIPFGLSGAASTRISNELGAGNPKVAKLAVRVVICIAVAESIVIGSVLILIRNIWGLAYSSELEVVSYVASMMPILALGNFLDSLQCVLSGVARGCGWQKIGAIINLGSYYLVGVPSGLLLAFHFHVGGRGLWLGIICALVVQVFGLGLVTIFTNWDEEAKKATNRIESSSSVKDFAVDDRSVVVF

SEQ ID NO: 44557 - protein, 434 aa, Arabidopsis thaliana
  peptide (1)..(434): Ceres Seq. ID no. 13509520
  misc_feature (1)..(415): Homolog of NCBI NO: 15218070 NR Description: MATE efflux protein family [Arabidopsis thaliana]
  misc_feature (1)..(419): Homolog of NCBI NO: 37533148 NR Description: putative transmembrane protein
  misc_feature (1)..(419): Homolog of NCBI NO: 37533146 NR Description: putative integral membrane protein
  misc_feature (1)..(418): Homolog of NCBI NO: 16797803 NR Description: hypothetical membrane protein-1 [Marchantia
  misc_feature (1)..(415): Homolog of NCBI NO: 22138480 NR Description: hypothetical protein [Oryza sativa (japonica
  misc_feature (1)..(423): Homolog of NCBI NO: 38346676 NR Description: OSJNBa0069D17.7 [Oryza sativa (japonica
  misc_feature (1)..(423): Homolog of NCBI NO: 21537267 NR Description: putative integral membrane protein [Arabidopsis
  misc_feature (1)..(423): Homolog of NCBI NO: 15219524 NR Description: MATE efflux protein family [Arabidopsis thaliana]
  misc_feature (1)..(409): Homolog of NCBI NO: 15226290 NR Description: MATE efflux protein family [Arabidopsis thaliana]
  misc_feature (1)..(434): Homolog of NCBI NO: 15237158 NR Description: MATE efflux protein - related [Arabidopsis
MFVGHLGSLPLSAASIATSFASVTGFSFLMGTASALDTLCGQAYGAKKYGMLGIQMQRAMFVLTLASIPLSIIWANTEHLLVFFGQNKSIATLAGSYAKFMIPSIFAYGLLQCFNRFLQAQNNVFPVVFCSGVTTSLHVLLCWVLVFKSGLGFQGAALANSISYWLNVVLLFCYVKFSPSCSLTWTGFSKEALRDILPFLRLAVPSALMVCLEMWSFELLVLLSGLLPNPVLETSVLSICLNTSGTMWMIPFGLSGAASTRISNELGAGNPKVAKLAVRVVICIAVAESIVIGSVLILIRNIWGLAYSSELEVVSYVASMMPILALGNFLDSLQCVLSGVARGCGWQKIGAIINLGSYYLVGVPSGLLLAFHFHVGGRGLWLGIICALVVQVFGLGLVTIFTNWDEEAKKATNRIESSSSVKDFAVDDRSVVVF

SEQ ID NO: 44558 - protein, 405 aa, Arabidopsis thaliana
  peptide (1)..(405): Ceres Seq. ID no. 13509521
  misc_feature (1)..(386): Homolog of NCBI NO: 15218070 NR Description: MATE efflux protein family [Arabidopsis thaliana]
  misc_feature (1)..(390): Homolog of NCBI NO: 37533148 NR Description: putative transmembrane protein
  misc_feature (1)..(390): Homolog of NCBI NO: 37533146 NR Description: putative integral membrane protein
  misc_feature (1)..(389): Homolog of NCBI NO: 16797803 NR Description: hypothetical membrane protein-1 [Marchantia
  misc_feature (1)..(386): Homolog of NCBI NO: 22138480 NR Description: hypothetical protein [Oryza sativa (japonica
  misc_feature (1)..(394): Homolog of NCBI NO: 38346676 NR Description: OSJNBa0069D17.7 [Oryza sativa (japonica
  misc_feature (1)..(394): Homolog of NCBI NO: 21537267 NR Description: putative integral membrane protein [Arabidopsis
  misc_feature (1)..(394): Homolog of NCBI NO: 15219524 NR Description: MATE efflux protein family [Arabidopsis thaliana]
  misc_feature (1)..(380): Homolog of NCBI NO: 15226290 NR Description: MATE efflux protein family [Arabidopsis thaliana]
  misc_feature (1)..(405): Homolog of NCBI NO: 15237158 NR Description: MATE efflux protein - related [Arabidopsis
MGTASALDTLCGQAYGAKKYGMLGIQMQRAMFVLTLASIPLSIIWANTEHLLVFFGQNKSIATLAGSYAKFMIPSIFAYGLLQCFNRFLQAQNNVFPVVFCSGVTTSLHVLLCWVLVFKSGLGFQGAALANSISYWLNVVLLFCYVKFSPSCSLTWTGFSKEALRDILPFLRLAVPSALMVCLEMWSFELLVLLSGLLPNPVLETSVLSICLNTSGTMWMIPFGLSGAASTRISNELGAGNPKVAKLAVRVVICIAVAESIVIGSVLILIRNIWGLAYSSELEVVSYVASMMPILALGNFLDSLQCVLSGVARGCGWQKIGAIINLGSYYLVGVPSGLLLAFHFHVGGRGLWLGIICALVVQVFGLGLVTIFTNWDEEAKKATNRIESSSSVKDFAVDDRSVVVF

SEQ ID NO: 44559 - DNA, 2413 bp, Arabidopsis thaliana
  misc_feature (1)..(2413): Ceres Seq. ID no. 12488993
  misc_feature: MA Experiment ID: 20000171 Result: Down-regulated in Transcription
  misc_feature: MA Experiment 20000171 PARAMETER Experiment Name: At_42deg_Heat_P Parameter: Age (day) Value: 14
  misc_feature: MA Experiment 20000171 PARAMETER Experiment Name: At_42deg_Heat_P Parameter: Organism Value: A. thaliana
  misc_feature: MA Experiment 20000171 PARAMETER Experiment Name: At_42deg_Heat_P Parameter: Plant Line Value: WS
  misc_feature: MA Experiment 20000171 PARAMETER Experiment Name: At_42deg_Heat_P Parameter: Temperature (deg C) Value: 42 vs. 22
  misc_feature: MA Experiment 20000171 PARAMETER Experiment Name: At_42deg_Heat_P Parameter: Timepoint (hr) Value: 1
  misc_feature: MA Experiment 20000171 PARAMETER Experiment Name: At_42deg_Heat_P Parameter: Tissue Value: Aerial
  misc_feature: MA Experiment ID: 20000234 Result: Up-regulated in Transcription
  misc_feature: MA Experiment 20000234 PARAMETER Experiment Name: At_Siliques_P Parameter: Age (day) Value: 21
  misc_feature: MA Experiment 20000234 PARAMETER Experiment Name: At_Siliques_P Parameter: Organism Value: A. thaliana
  misc_feature: MA Experiment 20000234 PARAMETER Experiment Name: At_Siliques_P Parameter: Plant Line Value: WS
  misc_feature: MA Experiment 20000234 PARAMETER Experiment Name: At_Siliques_P Parameter: Tissue Value: Less Than 5mm Siliques vs. Whole Plant
  misc_feature: MA Experiment ID: 20000264 Result: Up-regulated in Transcription
  misc_feature: MA Experiment 20000264 PARAMETER Experiment Name: At_Open_Flower_P Parameter: Age (day) Value: 21
  misc_feature: MA Experiment 20000264 PARAMETER Experiment Name: At_Open_Flower_P Parameter: Plant Line Value: WS
  misc_feature: MA Experiment 20000264 PARAMETER Experiment Name: At_Open_Flower_P Parameter: Tissue Value: Open Flower vs. Whole Plant
  misc_feature: MA Experiment ID: 20000265 Result: Up-regulated in Transcription
  misc_feature: MA Experiment 20000265 PARAMETER Experiment Name: At_Open_Flower_P Parameter: Age (day) Value: 21
  misc_feature: MA Experiment 20000265 PARAMETER Experiment Name: At_Open_Flower_P Parameter: Plant Line Value: WS
  misc_feature: MA Experiment 20000265 PARAMETER Experiment Name: At_Open_Flower_P Parameter: Tissue Value: Closed Flower vs. Whole Plant
  misc_feature: MA Experiment ID: 20000286 Result: Up-regulated in Transcription
  misc_feature: MA Experiment 20000286 PARAMETER Experiment Name: At_Open_Flower_P Parameter: Age (day) Value: 21
  misc_feature: MA Experiment 20000286 PARAMETER Experiment Name: At_Open_Flower_P Parameter: Plant Line Value: WS
  misc_feature: MA Experiment 20000286 PARAMETER Experiment Name: At_Open_Flower_P Parameter: Tissue Value: Half Open vs. Whole Plant
  misc_feature: MA Experiment ID: 20000437 Result: Down-regulated in Transcription
  misc_feature: MA Experiment 20000437 PARAMETER Experiment Name: At_Drought_P Parameter: Age (day) Value: 8
  misc_feature: MA Experiment 20000437 PARAMETER Experiment Name: At_Drought_P Parameter: Organism Value: A. thaliana
  misc_feature: MA Experiment 20000437 PARAMETER Experiment Name: At_Drought_P Parameter: Plant Line Value: WS
  misc_feature: MA Experiment 20000437 PARAMETER Experiment Name: At_Drought_P Parameter: Timepoint (hr) Value: 24
  misc_feature: MA Experiment 20000437 PARAMETER Experiment Name: At_Drought_P Parameter: Tissue Value: Whole Plant
  misc_feature: MA Experiment 20000437 PARAMETER Experiment Name: At_Drought_P Parameter: Treatment Value: Drought vs. No Drought
  misc_feature: MA Experiment ID: 20001451 Result: Down-regulated in Transcription
  misc_feature: MA Experiment 20001451 PARAMETER Experiment Name: At_Far-red-induction_P Parameter: Age (day) Value: 7
  misc_feature: MA Experiment 20001451 PARAMETER Experiment Name: At_Far-red-induction_P Parameter: Light Value: Far-red vs. White
  misc_feature: MA Experiment 20001451 PARAMETER Experiment Name: At_Far-red-induction_P Parameter: Organism Value: A. thaliana
  misc_feature: MA Experiment 20001451 PARAMETER Experiment Name: At_Far-red-induction_P Parameter: Plant Line Value: Columbia
  misc_feature: MA Experiment 20001451 PARAMETER Experiment Name: At_Far-red-induction_P Parameter: Timepoint (hr) Value: 24
  misc_feature: MA Experiment 20001451 PARAMETER Experiment Name: At_Far-red-induction_P Parameter: Tissue Value: Whole Plant
acactgtttcgcaccggcgcggacaaagttttttttttgttcgaaatccgacaacaaccctagattataaacaaaataaaccagtgtctgcatagaggcaatgtagatgtgatttttgctggaaaatggacaaatcccagaagaatcctacttcccagatcggaacttcaactcccaaatccaaattcgaggattctccagtgttcaactacataagcaacctctctccaattgagtcggtcaaatctatctccactgctcaaacgtttagctctcttagtttcacatctcctcctcctgtgtttacttctcctcacgtcatttctcacagagaatccagattcttcagatgtcataactctgttgatcgttcaaagcacttagaatctttagatggatctgctgttaaaggagaagttgtagtaccattagttgaagatctaaataaagaagcttctttggaagatgaagaagaaacttctgttgaaacgtcttctgagctgccacagatcatgaagttcgatagccaaacttctgagcatagtgattcaccttgcactgaagatgttgttattgaagcttcatctgatcctcctcgaggagacaatggttcgtcatccgaggatgtcacgatgggacttcagaatatgcttgttgttcgggaagggaatgacactcctggttgtggacgtttgatctcagatgcaactgagctgttagtatttcgatctccgaatgattctgaggcttttagatgcttggtcgataaaatatcaagctcagaaagacggttctgtgctggtgtcaagtctacaaagcggcctgatatcaacaaagatattccagccaatggatctagtaatgaaaatcagcctttggctgtgcttcctacaaacgagtctgtctttaacttgcatcgtggtggcatgcgaagacgctgccttgactttgagatgccagggaaacggaagaaggatattgttgatgatcagcaatctgtgtgtgacaataatgtggctggtgaatcttcctcgagctgtgttgtacctggtattggtcttcatctaaacgccgttgcaatgtctgcaaaggacagtaacatcagtgtcatacatggctattccatatctggagagattcaaaagagtttctcaggctctaccactccaattcagtcccaagacactgtgcaagaaacttcggaccaggcagaaaacgaacctgtagaagaagttcccaaagcattggtgttcccagagttgaatctaggcagccttaagaaaaagatgcgtaaatctgaacaagctggggagggtgagtcatgtaaacgatgcaactgcaaaaagtctaagtgtttgaagctttactgtgaatgctttgctgctggggtttattgcatagagccatgttcatgtatagattgcttcaacaaacctatccatgaagaaactgttttggctacccgcaaacagattgaatcccgaaatccacttgcatttgctcctaaagtcatcagaaatgcagattccatcatggaagctagtgatgatgccagtaaaaccccggcttctgcacgacacaaacgtggctgcaactgcaagaaatcaaactgtatgaagaaatactgtgaatgctatcagggtggagtcggctgttccatgaactgtagatgcgaaggatgcacaaatgtattcggcagaaaagatgggtctttacttgttatcatggaaagcaaactagaggagaatcaggagacatatgagaaaagaatagcaaaaatccaacacaacgtcgaggtgtcgaaagaagtggagcagaacccaagttctgatcaaccttcgacaccactgccaccgtacagacatttggtggttcatcagccattcttgtctaagaacagactgcctccgacacagttttttcttggcacaggttcttcctctttcagaaaaccaaacagtgatttggcgcaatcacagaatgagaagaagcctcttgaaactgtgactgaggacaaaacagagattatgcctgagattctcctcaattcccctatagctaacatcaaggccatctctcccaacagcaagagagtctctccccctcaacccggctcctcggagtcaggctcaatcctaaggagaagaggtaatggccggaagctgatactacggtctattccagcatttccttctctcaacccaaatcagtgaatcaaaaacaatttggttaagctatggaaaaattctttgtatctttgtaatgttccagatcctattagcctatcattgtttccataacataaggcataagcaacgttattgtaagatactttattctagtagtagtaggtaatgtaatagtacattctagttcataatcttccagaaagaacgtcctaaactggactttg

SEQ ID NO: 44560 - protein, 695 aa, Arabidopsis thaliana
  peptide (1)..(695): Ceres Seq. ID no. 12488994
  misc_feature (484)..(525): Pfam Name: Tesmin/TSO1-like CXC domain Pfam Description: Tesmin/TSO1-like CXC domain
  misc_feature (160)..(291): Homolog of NCBI NO: 18403510 NR Description: expressed protein
  misc_feature (160)..(291): Homolog of NCBI NO: 7767427 NR Description: CXC domain containing TSO1-like protein 1
  misc_feature (1)..(149): Homolog of NCBI NO: 18403510 NR Description: expressed protein
  misc_feature (263)..(694): Homolog of NCBI NO: 18403510 NR Description: expressed protein
  misc_feature (1)..(149): Homolog of NCBI NO: 7767427 NR Description: CXC domain containing TSO1-like protein 1
  misc_feature (263)..(694): Homolog of NCBI NO: 7767427 NR Description: CXC domain containing TSO1-like protein 1
  misc_feature (412)..(693): Homolog of NCBI NO: 15233572 NR Description: hypothetical protein; protein id: At4g14770.1
  misc_feature (1)..(387): Homolog of NCBI NO: 15233572 NR Description: hypothetical protein; protein id: At4g14770.1
  misc_feature (170)..(695): Homolog of NCBI NO: 15028139 NR Description: putative DNA binding protein [Arabidopsis
  misc_feature (170)..(695): Homolog of NCBI NO: 23297130 NR Description: putative DNA binding protein [Arabidopsis
MDKSQKNPTSQIGTSTPKSKFEDSPVFNYISNLSPIESVKSISTAQTFSSLSFTSPPPVFTSPHVISHRESRFFRCHNSVDRSKHLESLDGSAVKGEVVVPLVEDLNKEASLEDEEETSVETSSELPQIMKFDSQTSEHSDSPCTEDVVIEASSDPPRGDNGSSSEDVTMGLQNMLVVREGNDTPGCGRLISDATELLVFRSPNDSEAFRCLVDKISSSERRFCAGVKSTKRPDINKDIPANGSSNENQPLAVLPTNESVFNLHRGGMRRRCLDFEMPGKRKKDIVDDQQSVCDNNVAGESSSSCVVPGIGLHLNAVAMSAKDSNISVIHGYSISGEIQKSFSGSTTPIQSQDTVQETSDQAENEPVEEVPKALVFPELNLGSLKKKMRKSEQAGEGESCKRCNCKKSKCLKLYCECFAAGVYCIEPCSCIDCFNKPIHEETVLATRKQIESRNPLAFAPKVIRNADSIMEASDDASKTPASARHKRGCNCKKSNCMKKYCECYQGGVGCSMNCRCEGCTNVFGRKDGSLLVIMESKLEENQETYEKRIAKIQHNVEVSKEVEQNPSSDQPSTPLPPYRHLVVHQPFLSKNRLPPTQFFLGTGSSSFRKPNSDLAQSQNEKKPLETVTEDKTEIMPEILLNSPIANIKAISPNSKRVSPPQPGSSESGSILRRRGNGRKLILRSIPAFPSLNPNQ

SEQ ID NO: 44561 - protein, 566 aa, Arabidopsis thaliana
  peptide (1)..(566): Ceres Seq. ID no. 12488995
  misc_feature (355)..(396): Pfam Name: Tesmin/TSO1-like CXC domain Pfam Description: Tesmin/TSO1-like CXC domain
  misc_feature (31)..(162): Homolog of NCBI NO: 18403510 NR Description: expressed protein
  misc_feature (31)..(162): Homolog of NCBI NO: 7767427 NR Description: CXC domain containing TSO1-like protein 1
  misc_feature (1)..(20): Homolog of NCBI NO: 18403510 NR Description: expressed protein
  misc_feature (134)..(565): Homolog of NCBI NO: 18403510 NR Description: expressed protein
  misc_feature (1)..(20): Homolog of NCBI NO: 7767427 NR Description: CXC domain containing TSO1-like protein 1
  misc_feature (134)..(565): Homolog of NCBI NO: 7767427 NR Description: CXC domain containing TSO1-like protein 1
  misc_feature (283)..(564): Homolog of NCBI NO: 15233572 NR Description: hypothetical protein; protein id: At4g14770.1
  misc_feature (1)..(258): Homolog of NCBI NO: 15233572 NR Description: hypothetical protein; protein id: At4g14770.1
  misc_feature (41)..(566): Homolog of NCBI NO: 15028139 NR Description: putative DNA binding protein [Arabidopsis
  misc_feature (41)..(566): Homolog of NCBI NO: 23297130 NR Description: putative DNA binding protein [Arabidopsis
MKFDSQTSEHSDSPCTEDVVIEASSDPPRGDNGSSSEDVTMGLQNMLVVREGNDTPGCGRLISDATELLVFRSPNDSEAFRCLVDKISSSERRFCAGVKSTKRPDINKDIPANGSSNENQPLAVLPTNESVFNLHRGGMRRRCLDFEMPGKRKKDIVDDQQSVCDNNVAGESSSSCVVPGIGLHLNAVAMSAKDSNISVIHGYSISGEIQKSFSGSTTPIQSQDTVQETSDQAENEPVEEVPKALVFPELNLGSLKKKMRKSEQAGEGESCKRCNCKKSKCLKLYCECFAAGVYCIEPCSCIDCFNKPIHEETVLATRKQIESRNPLAFAPKVIRNADSIMEASDDASKTPASARHKRGCNCKKSNCMKKYCECYQGGVGCSMNCRCEGCTNVFGRKDGSLLVIMESKLEENQETYEKRIAKIQHNVEVSKEVEQNPSSDQPSTPLPPYRHLVVHQPFLSKNRLPPTQFFLGTGSSSFRKPNSDLAQSQNEKKPLETVTEDKTEIMPEILLNSPIANIKAISPNSKRVSPPQPGSSESGSILRRRGNGRKLILRSIPAFPSLNPNQ

SEQ ID NO: 44562 - protein, 526 aa, Arabidopsis thaliana
  peptide (1)..(526): Ceres Seq. ID no. 12488996
  misc_feature (315)..(356): Pfam Name: Tesmin/TSO1-like CXC domain Pfam Description: Tesmin/TSO1-like CXC domain
  misc_feature (1)..(122): Homolog of NCBI NO: 9279694 NR Description: DNA binding protein-like [Arabidopsis thaliana]
  misc_feature (94)..(336): Homolog of NCBI NO: 9279694 NR Description: DNA binding protein-like [Arabidopsis thaliana]
  misc_feature (1)..(122): Homolog of NCBI NO: 18403510 NR Description: expressed protein
  misc_feature (1)..(122): Homolog of NCBI NO: 7767427 NR Description: CXC domain containing TSO1-like protein 1
  misc_feature (94)..(525): Homolog of NCBI NO: 18403510 NR Description: expressed protein
  misc_feature (94)..(525): Homolog of NCBI NO: 7767427 NR Description: CXC domain containing TSO1-like protein 1
  misc_feature (243)..(524): Homolog of NCBI NO: 15233572 NR Description: hypothetical protein; protein id: At4g14770.1
  misc_feature (1)..(218): Homolog of NCBI NO: 15233572 NR Description: hypothetical protein; protein id: At4g14770.1
  misc_feature (1)..(526): Homolog of NCBI NO: 15028139 NR Description: putative DNA binding protein [Arabidopsis
  misc_feature (1)..(526): Homolog of NCBI NO: 23297130 NR Description: putative DNA binding protein [Arabidopsis
MGLQNMLVVREGNDTPGCGRLISDATELLVFRSPNDSEAFRCLVDKISSSERRFCAGVKSTKRPDINKDIPANGSSNENQPLAVLPTNESVFNLHRGGMRRRCLDFEMPGKRKKDIVDDQQSVCDNNVAGESSSSCVVPGIGLHLNAVAMSAKDSNISVIHGYSISGEIQKSFSGSTTPIQSQDTVQETSDQAENEPVEEVPKALVFPELNLGSLKKKMRKSEQAGEGESCKRCNCKKSKCLKLYCECFAAGVYCIEPCSCIDCFNKPIHEETVLATRKQIESRNPLAFAPKVIRNADSIMEASDDASKTPASARHKRGCNCKKSNCMKKYCECYQGGVGCSMNCRCEGCTNVFGRKDGSLLVIMESKLEENQETYEKRIAKIQHNVEVSKEVEQNPSSDQPSTPLPPYRHLVVHQPFLSKNRLPPTQFFLGTGSSSFRKPNSDLAQSQNEKKPLETVTEDKTEIMPEILLNSPIANIKAISPNSKRVSPPQPGSSESGSILRRRGNGRKLILRSIPAFPSLNPNQ

SEQ ID NO: 44563 - DNA, 931 bp, Arabidopsis thaliana
  misc_feature (1)..(931): Ceres Seq. ID no. 13646306
  misc_feature: MA Experiment ID: 20000171 Result: Down-regulated in Transcription
  misc_feature: MA Experiment 20000171 PARAMETER Experiment Name: At_42deg_Heat_P Parameter: Age (day) Value: 14
  misc_feature: MA Experiment 20000171 PARAMETER Experiment Name: At_42deg_Heat_P Parameter: Organism Value: A. thaliana
  misc_feature: MA Experiment 20000171 PARAMETER Experiment Name: At_42deg_Heat_P Parameter: Plant Line Value: WS
  misc_feature: MA Experiment 20000171 PARAMETER Experiment Name: At_42deg_Heat_P Parameter: Temperature (deg C) Value: 42 vs. 22
  misc_feature: MA Experiment 20000171 PARAMETER Experiment Name: At_42deg_Heat_P Parameter: Timepoint (hr) Value: 1
  misc_feature: MA Experiment 20000171 PARAMETER Experiment Name: At_42deg_Heat_P Parameter: Tissue Value: Aerial
  misc_feature: MA Experiment ID: 20000184 Result: Down-regulated in Transcription
  misc_feature: MA Experiment 20000184 PARAMETER Experiment Name: At_Shoots__P Parameter: Age (day) Value: 7
  misc_feature: MA Experiment 20000184 PARAMETER Experiment Name: At_Shoots__P Parameter: Tissue Value: Shoots vs. Whole Plant
  misc_feature: MA Experiment ID: 20000234 Result: Down-regulated in Transcription
  misc_feature: MA Experiment 20000234 PARAMETER Experiment Name: At_Siliques_P Parameter: Age (day) Value: 21
  misc_feature: MA Experiment 20000234 PARAMETER Experiment Name: At_Siliques_P Parameter: Organism Value: A. thaliana
  misc_feature: MA Experiment 20000234 PARAMETER Experiment Name: At_Siliques_P Parameter: Plant Line Value: WS
  misc_feature: MA Experiment 20000234 PARAMETER Experiment Name: At_Siliques_P Parameter: Tissue Value: Less Than 5mm Siliques vs. Whole Plant
  misc_feature: MA Experiment ID: 20000235 Result: Down-regulated in Transcription
  misc_feature: MA Experiment 20000235 PARAMETER Experiment Name: At_Siliques_P Parameter: Age (day) Value: 21
  misc_feature: MA Experiment 20000235 PARAMETER Experiment Name: At_Siliques_P Parameter: Organism Value: A. thaliana
  misc_feature: MA Experiment 20000235 PARAMETER Experiment Name: At_Siliques_P Parameter: Plant Line Value: WS
  misc_feature: MA Experiment 20000235 PARAMETER Experiment Name: At_Siliques_P Parameter: Tissue Value: 5-10mm Siliques vs. Whole Plant
  misc_feature: MA Experiment ID: 20000264 Result: Down-regulated in Transcription
  misc_feature: MA Experiment 20000264 PARAMETER Experiment Name: At_Open_Flower_P Parameter: Age (day) Value: 21
  misc_feature: MA Experiment 20000264 PARAMETER Experiment Name: At_Open_Flower_P Parameter: Plant Line Value: WS
  misc_feature: MA Experiment 20000264 PARAMETER Experiment Name: At_Open_Flower_P Parameter: Tissue Value: Open Flower vs. Whole Plant
  misc_feature: MA Experiment ID: 20000265 Result: Down-regulated in Transcription
  misc_feature: MA Experiment 20000265 PARAMETER Experiment Name: At_Open_Flower_P Parameter: Age (day) Value: 21
  misc_feature: MA Experiment 20000265 PARAMETER Experiment Name: At_Open_Flower_P Parameter: Plant Line Value: WS
  misc_feature: MA Experiment 20000265 PARAMETER Experiment Name: At_Open_Flower_P Parameter: Tissue Value: Closed Flower vs. Whole Plant
  misc_feature: MA Experiment ID: 20000286 Result: Down-regulated in Transcription
  misc_feature: MA Experiment 20000286 PARAMETER Experiment Name: At_Open_Flower_P Parameter: Age (day) Value: 21
  misc_feature: MA Experiment 20000286 PARAMETER Experiment Name: At_Open_Flower_P Parameter: Plant Line Value: WS
  misc_feature: MA Experiment 20000286 PARAMETER Experiment Name: At_Open_Flower_P Parameter: Tissue Value: Half Open vs. Whole Plant
  misc_feature: MA Experiment ID: 20000438 Result: Down-regulated in Transcription
  misc_feature: MA Experiment 20000438 PARAMETER Experiment Name: At_Shoots__P Parameter: Age (day) Value: 14
  misc_feature: MA Experiment 20000438 PARAMETER Experiment Name: At_Shoots__P Parameter: Tissue Value: Shoots vs. Whole Plant
  misc_feature: MA Experiment ID: 20000441 Result: Up-regulated in Transcription
  misc_feature: MA Experiment 20000441 PARAMETER Experiment Name: At_1uM_BR-BRZ__P Parameter: Tissue Value: Shoot Apices
  misc_feature: MA Experiment 20000441 PARAMETER Experiment Name: At_1uM_BR-BRZ__P Parameter: Treatment Value: 1uM BR vs. No Treatment
  misc_feature: MA Experiment ID: 20000443 Result: Up-regulated in Transcription
  misc_feature: MA Experiment 20000443 PARAMETER Experiment Name: At_1uM_BR-BRZ__P Parameter: Tissue Value: Shoot Apices
  misc_feature: MA Experiment 20000443 PARAMETER Experiment Name: At_1uM_BR-BRZ__P Parameter: Treatment Value: 1uM BRZ vs. No Treatment
  misc_feature: MA Experiment ID: 20000444 Result: Down-regulated in Transcription
  misc_feature: MA Experiment 20000444 PARAMETER Experiment Name: At_100uM_NAA__P Parameter: Age (day) Value: 14
  misc_feature: MA Experiment 20000444 PARAMETER Experiment Name: At_100uM_NAA__P Parameter: Organism Value: A. thaliana
  misc_feature: MA Experiment 20000444 PARAMETER Experiment Name: At_100uM_NAA__P Parameter: Plant Line Value: WS
  misc_feature: MA Experiment 20000444 PARAMETER Experiment Name: At_100uM_NAA__P Parameter: Timepoint (hr) Value: 1
  misc_feature: MA Experiment 20000444 PARAMETER Experiment Name: At_100uM_NAA__P Parameter: Tissue Value: Aerial
  misc_feature: MA Experiment 20000444 PARAMETER Experiment Name: At_100uM_NAA__P Parameter: Treatment Value: 100uM NAA vs. No Treatment
  misc_feature: MA Experiment ID: 20000456 Result: Down-regulated in Transcription
  misc_feature: MA Experiment 20000456 PARAMETER Experiment Name: At_100uM_BA_P Parameter: Age (day) Value: 14
  misc_feature: MA Experiment 20000456 PARAMETER Experiment Name: At_100uM_BA_P Parameter: Organism Value: A. thaliana
  misc_feature: MA Experiment 20000456 PARAMETER Experiment Name: At_100uM_BA_P Parameter: Plant Line Value: WS
  misc_feature: MA Experiment 20000456 PARAMETER Experiment Name: At_100uM_BA_P Parameter: Timepoint (hr) Value: 6
  misc_feature: MA Experiment 20000456 PARAMETER Experiment Name: At_100uM_BA_P Parameter: Tissue Value: Aerial
  misc_feature: MA Experiment 20000456 PARAMETER Experiment Name: At_100uM_BA_P Parameter: Treatment Value: 100uM BA vs. No Treatment
  misc_feature: MA Experiment ID: 20000460 Result: Up-regulated in Transcription
  misc_feature: MA Experiment 20000460 PARAMETER Experiment Name: At_10percent_PEG_P Parameter: Age (day) Value: 12
  misc_feature: MA Experiment 20000460 PARAMETER Experiment Name: At_10percent_PEG_P Parameter: Organism Value: A. thaliana
  misc_feature: MA Experiment 20000460 PARAMETER Experiment Name: At_10percent_PEG_P Parameter: Plant Line Value: WS
  misc_feature: MA Experiment 20000460 PARAMETER Experiment Name: At_10percent_PEG_P Parameter: Timepoint (day) Value: 12
  misc_feature: MA Experiment 20000460 PARAMETER Experiment Name: At_10percent_PEG_P Parameter: Tissue Value: Whole Plant
  misc_feature: MA Experiment 20000460 PARAMETER Experiment Name: At_10percent_PEG_P Parameter: Treatment Value: 10percent PEG vs. No Treatment
  misc_feature: MA Experiment ID: 20000495 Result: Down-regulated in Transcription
  misc_feature: MA Experiment 20000495 PARAMETER Experiment Name: At_Guard_Cells_P Parameter: Harvest Date Value: 8/2/2002
  misc_feature: MA Experiment 20000495 PARAMETER Experiment Name: At_Guard_Cells_P Parameter: Organism Value: A. thaliana
  misc_feature: MA Experiment 20000495 PARAMETER Experiment Name: At_Guard_Cells_P Parameter: Tissue Value: Guard Cells vs. Leaves
  misc_feature: MA Experiment ID: 20000506 Result: Down-regulated in Transcription
  misc_feature: MA Experiment 20000506 PARAMETER Experiment Name: At_Wounding_P Parameter: Organism Value: A. thaliana
  misc_feature: MA Experiment 20000506 PARAMETER Experiment Name: At_Wounding_P Parameter: Plant Line Value: WS
  misc_feature: MA Experiment 20000506 PARAMETER Experiment Name: At_Wounding_P Parameter: Timepoint (hr) Value: 6
  misc_feature: MA Experiment 20000506 PARAMETER Experiment Name: At_Wounding_P Parameter: Tissue Value: Aerial
  misc_feature: MA Experiment 20000506 PARAMETER Experiment Name: At_Wounding_P Parameter: Treatment Value: Wounding vs. No Wounding
  misc_feature: MA Experiment ID: 20000527 Result: Up-regulated in Transcription
  misc_feature: MA Experiment 20000527 PARAMETER Experiment Name: At_10percent_PEG_P Parameter: Age (day) Value: 20
  misc_feature: MA Experiment 20000527 PARAMETER Experiment Name: At_10percent_PEG_P Parameter: Organism Value: A. thaliana
  misc_feature: MA Experiment 20000527 PARAMETER Experiment Name: At_10percent_PEG_P Parameter: Plant Line Value: WS
  misc_feature: MA Experiment 20000527 PARAMETER Experiment Name: At_10percent_PEG_P Parameter: Timepoint (day) Value: 20
  misc_feature: MA Experiment 20000527 PARAMETER Experiment Name: At_10percent_PEG_P Parameter: Tissue Value: Whole Plant
  misc_feature: MA Experiment 20000527 PARAMETER Experiment Name: At_10percent_PEG_P Parameter: Treatment Value: 10percent PEG vs. No Treatment
  misc_feature: MA Experiment ID: 20000573 Result: Down-regulated in Transcription
  misc_feature: MA Experiment 20000573 PARAMETER Experiment Name: At_100uM_ABA_Mutants__P Parameter: Organism Value: A. thaliana
  misc_feature: MA Experiment 20000573 PARAMETER Experiment Name: At_100uM_ABA_Mutants__P Parameter: Plant Line Value: CS22 vs. Ler wt
  misc_feature: MA Experiment 20000573 PARAMETER Experiment Name: At_100uM_ABA_Mutants__P Parameter: Timepoint (hr) Value: N/A
  misc_feature: MA Experiment 20000573 PARAMETER Experiment Name: At_100uM_ABA_Mutants__P Parameter: Tissue Value: Whole Plant
  misc_feature: MA Experiment 20000573 PARAMETER Experiment Name: At_100uM_ABA_Mutants__P Parameter: Treatment Value: None
  misc_feature: MA Experiment ID: 20000574 Result: Down-regulated in Transcription
  misc_feature: MA Experiment 20000574 PARAMETER Experiment Name: At_100uM_ABA_Mutants__P Parameter: Organism Value: A. thaliana
  misc_feature: MA Experiment 20000574 PARAMETER Experiment Name: At_100uM_ABA_Mutants__P Parameter: Plant Line Value: CS23 vs. Ler wt
  misc_feature: MA Experiment 20000574 PARAMETER Experiment Name: At_100uM_ABA_Mutants__P Parameter: Timepoint (hr) Value: N/A
  misc_feature: MA Experiment 20000574 PARAMETER Experiment Name: At_100uM_ABA_Mutants__P Parameter: Tissue Value: Whole Plant
  misc_feature: MA Experiment 20000574 PARAMETER Experiment Name: At_100uM_ABA_Mutants__P Parameter: Treatment Value: None
  misc_feature: MA Experiment ID: 20000794 Result: Down-regulated in Transcription
  misc_feature: MA Experiment 20000794 PARAMETER Experiment Name: At_Petals_P Parameter: Age (day) Value: 23-25 days
  misc_feature: MA Experiment 20000794 PARAMETER Experiment Name: At_Petals_P Parameter: Plant Line Value: WS
  misc_feature: MA Experiment 20000794 PARAMETER Experiment Name: At_Petals_P Parameter: Tissue Value: Petals vs. Whole plant
  misc_feature: MA Experiment ID: 20001757 Result: Down-regulated in Transcription
  misc_feature: MA Experiment 20001757 PARAMETER Experiment Name: At_50mM_NH4NO3_L-to-H_P Parameter: Timepoint (hr) Value: 6
  misc_feature: MA Experiment 20001757 PARAMETER Experiment Name: At_50mM_NH4NO3_L-to-H_P Parameter: Tissue Value: Leaf
  misc_feature: MA Experiment 20001757 PARAMETER Experiment Name: At_50mM_NH4NO3_L-to-H_P Parameter: Treatment Value: 50mM NH4NO3 vs 100mM Mannitol
  misc_feature: MA Experiment ID: 20001760 Result: Down-regulated in Transcription
  misc_feature: MA Experiment 20001760 PARAMETER Experiment Name: At_50mM_NH4NO3_L-to-H_P Parameter: Timepoint (hr) Value: 2
  misc_feature: MA Experiment 20001760 PARAMETER Experiment Name: At_50mM_NH4NO3_L-to-H_P Parameter: Tissue Value: Siliques
  misc_feature: MA Experiment 20001760 PARAMETER Experiment Name: At_50mM_NH4NO3_L-to-H_P Parameter: Treatment Value: 50mM NH4NO3 vs 100mM Mannitol
  misc_feature: MA Experiment ID: 20001773 Result: Down-regulated in Transcription
  misc_feature: MA Experiment 20001773 PARAMETER Experiment Name: At_Far-red-enriched-adult_P Parameter: Age (day) Value: 30
  misc_feature: MA Experiment 20001773 PARAMETER Experiment Name: At_Far-red-enriched-adult_P Parameter: Light Value: Far-red enriched vs. White
  misc_feature: MA Experiment 20001773 PARAMETER Experiment Name: At_Far-red-enriched-adult_P Parameter: Organism Value: A. thaliana
  misc_feature: MA Experiment 20001773 PARAMETER Experiment Name: At_Far-red-enriched-adult_P Parameter: Plant Line Value: Columbia
  misc_feature: MA Experiment 20001773 PARAMETER Experiment Name: At_Far-red-enriched-adult_P Parameter: Timepoint (hr) Value: 48
  misc_feature: MA Experiment 20001773 PARAMETER Experiment Name: At_Far-red-enriched-adult_P Parameter: Tissue Value: Aerial
  misc_feature: MA Experiment ID: 20001904 Result: Down-regulated in Transcription
  misc_feature: MA Experiment 20001904 PARAMETER Experiment Name: At_Drought_Reproduction_P Parameter: Age (day) Value: 37
  misc_feature: MA Experiment 20001904 PARAMETER Experiment Name: At_Drought_Reproduction_P Parameter: Organism Value: A. thaliana
  misc_feature: MA Experiment 20001904 PARAMETER Experiment Name: At_Drought_Reproduction_P Parameter: Plant Line Value: WS
  misc_feature: MA Experiment 20001904 PARAMETER Experiment Name: At_Drought_Reproduction_P Parameter: Timepoint (day) Value: 7
  misc_feature: MA Experiment 20001904 PARAMETER Experiment Name: At_Drought_Reproduction_P Parameter: Tissue Value: Rosettes
  misc_feature: MA Experiment 20001904 PARAMETER Experiment Name: At_Drought_Reproduction_P Parameter: Treatment Value: Drought vs. No Drought
  misc_feature: MA Experiment ID: 20001905 Result: Up-regulated in Transcription
  misc_feature: MA Experiment 20001905 PARAMETER Experiment Name: At_Drought_Reproduction_P Parameter: Age (day) Value: 40
  misc_feature: MA Experiment 20001905 PARAMETER Experiment Name: At_Drought_Reproduction_P Parameter: Organism Value: A. thaliana
  misc_feature: MA Experiment 20001905 PARAMETER Experiment Name: At_Drought_Reproduction_P Parameter: Plant Line Value: WS
  misc_feature: MA Experiment 20001905 PARAMETER Experiment Name: At_Drought_Reproduction_P Parameter: Timepoint (day) Value: 10
  misc_feature: MA Experiment 20001905 PARAMETER Experiment Name: At_Drought_Reproduction_P Parameter: Tissue Value: Rosettes
  misc_feature: MA Experiment 20001905 PARAMETER Experiment Name: At_Drought_Reproduction_P Parameter: Treatment Value: Drought vs. No Drought
atcctaatcgaaaaaaccagatataacagaattaacctacacaactgaaactcgagttaagaaccggaaacagaatccaattcaaccaaaccgaatcgaaccgaaccggagtttttatccaatggtgaagcaagcgatgaaggaagaggagaagaagagaaacacggcgatgcagtcaaagtacaaaggagtgaggaagaggaaatggggaaaatgggtatcggagatcagactttcacacagcagagaacgaatttggttaggctcttacgacactcccgagaaggcgccgcgtgctttcgacgccgctcaattttgtctccgcggcggcgatgctaatttcaatttccctaataatccaccgtcgatctccgtagaaaagtcgttgacgcctccggagattcaggaagctgctgctagattcgctaacacattccaagacattgtcaagggagaagaagaatcgggtttagtacccggatccgagatccgaccagagtctccttctacatctgcatctgttgctacatcgacggtggattatgatttttcgtttttggatttgcttccgatgaatttcgggtttgattccttctccgacgacttctctggcttctccggtggtgatcgatttacagagattttacccatcgaagattacggaggagagagtttattagatgaatctttgattctttgggatttttgaattcccaaacataatatttttttagagcgaactgtgagattttccttggagtcatggagaaatctggagattttttgtaacacggagctccaatgacccgggaatttctttcgtttcggatccgaatttgatgtggatcatattcacacctatattttttcatttttttgttgtaaagaaaaatcggataagattctagtaataaatgttaaaagtccattt

SEQ ID NO: 44564 - protein, 195 aa, Arabidopsis thaliana
  peptide (1)..(195): Ceres Seq. ID no. 13646307
  misc_feature (18)..(82): Pfam Name: AP2 domain Pfam Description: AP2 domain
  misc_feature (1)..(195): Homolog of NCBI NO: 15219139 NR Description: transcription factor TINY family [Arabidopsis
  misc_feature (1)..(138): Homolog of NCBI NO: 18417729 NR Description: AP2 domain transcription factor, putative
  misc_feature (20)..(142): Homolog of NCBI NO: 15224024 NR Description: AP2 domain transcription factor, putative
  misc_feature (9)..(122): Homolog of NCBI NO: 21554403 NR Description: transcription factor TINY, putative [Arabidopsis
  misc_feature (9)..(122): Homolog of NCBI NO: 25406719 NR Description: protein Similar to transcription factor TINY
  misc_feature (9)..(122): Homolog of NCBI NO: 18378818 NR Description: AP2 domain transcription factor, putative
  misc_feature (20)..(102): Homolog of NCBI NO: 22326940 NR Description: AP2 domain transcription factor, putative
  misc_feature (17)..(195): Homolog of NCBI NO: 22329667 NR Description: AP2 domain transcription factor, putative
  misc_feature (14)..(195): Homolog of NCBI NO: 29893536 NR Description: putative AP2 domain transcription factor
  misc_feature (1)..(195): Homolog of NCBI NO: 15222040 NR Description: AP2 domain transcription factor, putative
MVKQAMKEEEKKRNTAMQSKYKGVRKRKWGKWVSEIRLSHSRERIWLGSYDTPEKAPRAFDAAQFCLRGGDANFNFPNNPPSISVEKSLTPPEIQEAAARFANTFQDIVKGEEESGLVPGSEIRPESPSTSASVATSTVDYDFSFLDLLPMNFGFDSFSDDFSGFSGGDRFTEILPIEDYGGESLLDESLILWDF

SEQ ID NO: 44565 - protein, 190 aa, Arabidopsis thaliana
  peptide (1)..(190): Ceres Seq. ID no. 13646308
  misc_feature (13)..(77): Pfam Name: AP2 domain Pfam Description: AP2 domain
  misc_feature (1)..(190): Homolog of NCBI NO: 15219139 NR Description: transcription factor TINY family [Arabidopsis
  misc_feature (1)..(133): Homolog of NCBI NO: 18417729 NR Description: AP2 domain transcription factor, putative
  misc_feature (15)..(137): Homolog of NCBI NO: 15224024 NR Description: AP2 domain transcription factor, putative
  misc_feature (4)..(117): Homolog of NCBI NO: 25406719 NR Description: protein Similar to transcription factor TINY
  misc_feature (4)..(117): Homolog of NCBI NO: 21554403 NR Description: transcription factor TINY, putative [Arabidopsis
  misc_feature (4)..(117): Homolog of NCBI NO: 18378818 NR Description: AP2 domain transcription factor, putative
  misc_feature (15)..(97): Homolog of NCBI NO: 22326940 NR Description: AP2 domain transcription factor, putative
  misc_feature (12)..(190): Homolog of NCBI NO: 22329667 NR Description: AP2 domain transcription factor, putative
  misc_feature (9)..(190): Homolog of NCBI NO: 29893536 NR Description: putative AP2 domain transcription factor
  misc_feature (1)..(190): Homolog of NCBI NO: 15222040 NR Description: AP2 domain transcription factor, putative
MKEEEKKRNTAMQSKYKGVRKRKWGKWVSEIRLSHSRERIWLGSYDTPEKAPRAFDAAQFCLRGGDANFNFPNNPPSISVEKSLTPPEIQEAAARFANTFQDIVKGEEESGLVPGSEIRPESPSTSASVATSTVDYDFSFLDLLPMNFGFDSFSDDFSGFSGGDRFTEILPIEDYGGESLLDESLILWDF

SEQ ID NO: 44566 - protein, 179 aa, Arabidopsis thaliana
  peptide (1)..(179): Ceres Seq. ID no. 13646309
  misc_feature (2)..(66): Pfam Name: AP2 domain Pfam Description: AP2 domain
  misc_feature (1)..(179): Homolog of NCBI NO: 15219139 NR Description: transcription factor TINY family [Arabidopsis
  misc_feature (1)..(122): Homolog of NCBI NO: 18417729 NR Description: AP2 domain transcription factor, putative
  misc_feature (4)..(126): Homolog of NCBI NO: 15224024 NR Description: AP2 domain transcription factor, putative
  misc_feature (1)..(106): Homolog of NCBI NO: 21554403 NR Description: transcription factor TINY, putative [Arabidopsis
  misc_feature (1)..(106): Homolog of NCBI NO: 25406719 NR Description: protein Similar to transcription factor TINY
  misc_feature (1)..(106): Homolog of NCBI NO: 18378818 NR Description: AP2 domain transcription factor, putative
  misc_feature (4)..(86): Homolog of NCBI NO: 22326940 NR Description: AP2 domain transcription factor, putative
  misc_feature (1)..(179): Homolog of NCBI NO: 22329667 NR Description: AP2 domain transcription factor, putative
  misc_feature (1)..(179): Homolog of NCBI NO: 29893536 NR Description: putative AP2 domain transcription factor
  misc_feature (1)..(179): Homolog of NCBI NO: 15222040 NR Description: AP2 domain transcription factor, putative
MQSKYKGVRKRKWGKWVSEIRLSHSRERIWLGSYDTPEKAPRAFDAAQFCLRGGDANFNFPNNPPSISVEKSLTPPEIQEAAARFANTFQDIVKGEEESGLVPGSEIRPESPSTSASVATSTVDYDFSFLDLLPMNFGFDSFSDDFSGFSGGDRFTEILPIEDYGGESLLDESLILWDF

SEQ ID NO: 44567 - DNA, 907 bp, Arabidopsis thaliana
  misc_feature (1)..(907): Ceres Seq. ID no. 12603686
  misc_feature: MA Experiment ID: 20000264 Result: Up-regulated in Transcription
  misc_feature: MA Experiment 20000264 PARAMETER Experiment Name: At_Open_Flower_P Parameter: Age (day) Value: 21
  misc_feature: MA Experiment 20000264 PARAMETER Experiment Name: At_Open_Flower_P Parameter: Plant Line Value: WS
  misc_feature: MA Experiment 20000264 PARAMETER Experiment Name: At_Open_Flower_P Parameter: Tissue Value: Open Flower vs. Whole Plant
  misc_feature: MA Experiment ID: 20000286 Result: Up-regulated in Transcription
  misc_feature: MA Experiment 20000286 PARAMETER Experiment Name: At_Open_Flower_P Parameter: Age (day) Value: 21
  misc_feature: MA Experiment 20000286 PARAMETER Experiment Name: At_Open_Flower_P Parameter: Plant Line Value: WS
  misc_feature: MA Experiment 20000286 PARAMETER Experiment Name: At_Open_Flower_P Parameter: Tissue Value: Half Open vs. Whole Plant
  misc_feature: MA Experiment ID: 20000439 Result: Up-regulated in Transcription
  misc_feature: MA Experiment 20000439 PARAMETER Experiment Name: At_Roots__P Parameter: Age (day) Value: 14 vs. 21
  misc_feature: MA Experiment 20000439 PARAMETER Experiment Name: At_Roots__P Parameter: Organism Value: A. thaliana
  misc_feature: MA Experiment 20000439 PARAMETER Experiment Name: At_Roots__P Parameter: Tissue Value: Roots vs. Whole Plant
  misc_feature: MA Experiment ID: 20000794 Result: Up-regulated in Transcription
  misc_feature: MA Experiment 20000794 PARAMETER Experiment Name: At_Petals_P Parameter: Age (day) Value: 23-25 days
  misc_feature: MA Experiment 20000794 PARAMETER Experiment Name: At_Petals_P Parameter: Plant Line Value: WS
  misc_feature: MA Experiment 20000794 PARAMETER Experiment Name: At_Petals_P Parameter: Tissue Value: Petals vs. Whole plant
  misc_feature: MA Experiment ID: 20001450 Result: Down-regulated in Transcription
  misc_feature: MA Experiment 20001450 PARAMETER Experiment Name: At_Far-red-induction_P Parameter: Age (day) Value: 7
  misc_feature: MA Experiment 20001450 PARAMETER Experiment Name: At_Far-red-induction_P Parameter: Light Value: Far-red vs. White
  misc_feature: MA Experiment 20001450 PARAMETER Experiment Name: At_Far-red-induction_P Parameter: Organism Value: A. thaliana
  misc_feature: MA Experiment 20001450 PARAMETER Experiment Name: At_Far-red-induction_P Parameter: Plant Line Value: Columbia
  misc_feature: MA Experiment 20001450 PARAMETER Experiment Name: At_Far-red-induction_P Parameter: Timepoint (hr) Value: 8
  misc_feature: MA Experiment 20001450 PARAMETER Experiment Name: At_Far-red-induction_P Parameter: Tissue Value: Whole Plant
  misc_feature: MA Experiment ID: 20001910 Result: Up-regulated in Transcription
  misc_feature: MA Experiment 20001910 PARAMETER Experiment Name: At_Drought_Reproduction_P Parameter: Age (day) Value: 37
  misc_feature: MA Experiment 20001910 PARAMETER Experiment Name: At_Drought_Reproduction_P Parameter: Organism Value: A. thaliana
  misc_feature: MA Experiment 20001910 PARAMETER Experiment Name: At_Drought_Reproduction_P Parameter: Plant Line Value: WS
  misc_feature: MA Experiment 20001910 PARAMETER Experiment Name: At_Drought_Reproduction_P Parameter: Timepoint (day) Value: 7
  misc_feature: MA Experiment 20001910 PARAMETER Experiment Name: At_Drought_Reproduction_P Parameter: Tissue Value: Flowers
  misc_feature: MA Experiment 20001910 PARAMETER Experiment Name: At_Drought_Reproduction_P Parameter: Treatment Value: Drought vs. No Drought
  misc_feature: MA Experiment ID: 20001911 Result: Up-regulated in Transcription
  misc_feature: MA Experiment 20001911 PARAMETER Experiment Name: At_Drought_Reproduction_P Parameter: Age (day) Value: 40
  misc_feature: MA Experiment 20001911 PARAMETER Experiment Name: At_Drought_Reproduction_P Parameter: Organism Value: A. thaliana
  misc_feature: MA Experiment 20001911 PARAMETER Experiment Name: At_Drought_Reproduction_P Parameter: Plant Line Value: WS
  misc_feature: MA Experiment 20001911 PARAMETER Experiment Name: At_Drought_Reproduction_P Parameter: Timepoint (day) Value: 10
  misc_feature: MA Experiment 20001911 PARAMETER Experiment Name: At_Drought_Reproduction_P Parameter: Tissue Value: Flowers
  misc_feature: MA Experiment 20001911 PARAMETER Experiment Name: At_Drought_Reproduction_P Parameter: Treatment Value: Drought vs. No Drought
attttttgtttttgtccctttgaaacgaaagaagatccaaagatgagtgaagaagcatatgaagaaactcaggaatcaagtcaatctcctcgtccggttccaaaactgaacgagaggattctctcaacactatccaggagatctgtagctgcacatccatggcacgaccttgagattggtcctgaagctccattggtcttcaatgtggtggttgagatcacaaagggaagcaaagtgaaatatgaactcgacaaaaagaccggtcttatcaaggttgaccggatcttgtactcctccgttgtttatccacacaattacggattcatcccacggacattgtgtgaagacaacgatcctcttgatgtccttgtccttatgcaggaaccagtgcttcccggatgtttcctccgtgctagagccattggattaatgcccatgattgatcagggagagaaagacgacaaaatcatagccgtatgtgctgatgatccagagtacaaacatttcacagacatcaaacaactcgctcctcatcgtctccaagaaatccgccgtttcttcgaagactataagaagaacgagaacaagaaagtggctgtcaacgatttcttgccatcagagagtgcacatgaagctattcagtactccatggatctatacgctgagtatattctccacacgttgaggagatgaacaacaacaacaacatatgattctcttcgcagcatccgcatataaatatatttaaatggaatattattttacataattcataaccatatgattggctttttgcagttttttgttttgttttgttttctgtttgtttttttccttgtgatgatgcaattttgttcaattgtataatttgaaactggtaagatataatgacaaacgcagttttgcc

SEQ ID NO: 44568 - protein, 230 aa, Arabidopsis thaliana
  peptide (1)..(230): Ceres Seq. ID no. 12603687
  misc_feature (68)..(222): Pfam Name: Inorganic pyrophosphatase Pfam Description: Inorganic pyrophosphatase
  misc_feature (15)..(230): Homolog of NCBI NO: 38345829 NR Description: OSJNBa0070M12.12 [Oryza sativa (japonica
  misc_feature (15)..(230): Homolog of NCBI NO: 15234191 NR Description: putative inorganic phosphatase
  misc_feature (29)..(230): Homolog of NCBI NO: 2500047 NR Description: Soluble inorganic pyrophosphatase (Pyrophosphate
  misc_feature (15)..(230): Homolog of NCBI NO: 4033424 NR Description: Soluble inorganic pyrophosphatase (Pyrophosphate
  misc_feature (191)..(230): Homolog of NCBI NO: 25290346 NR Description: protein T25K16.5 [imported] - Arabidopsis
  misc_feature (21)..(189): Homolog of NCBI NO: 25290346 NR Description: protein T25K16.5 [imported] - Arabidopsis
  misc_feature (22)..(230): Homolog of NCBI NO: 5669924 NR Description: soluble inorganic pyrophosphatase
  misc_feature (21)..(230): Homolog of NCBI NO: 15223288 NR Description: soluble inorganic pyrophosphatase, putative
  misc_feature (15)..(230): Homolog of NCBI NO: 26451240 NR Description: putative inorganic pyrophosphatase [Arabidopsis
  misc_feature (15)..(230): Homolog of NCBI NO: 15226453 NR Description: putative inorganic pyrophosphatase; protein id:
IFCFCPFETKEDPKMSEEAYEETQESSQSPRPVPKLNERILSTLSRRSVAAHPWHDLEIGPEAPLVFNVVVEITKGSKVKYELDKKTGLIKVDRILYSSVVYPHNYGFIPRTLCEDNDPLDVLVLMQEPVLPGCFLRARAIGLMPMIDQGEKDDKIIAVCADDPEYKHFTDIKQLAPHRLQEIRRFFEDYKKNENKKVAVNDFLPSESAHEAIQYSMDLYAEYILHTLRR

SEQ ID NO: 44569 - protein, 216 aa, Arabidopsis thaliana
  peptide (1)..(216): Ceres Seq. ID no. 12603688
  misc_feature (54)..(208): Pfam Name: Inorganic pyrophosphatase Pfam Description: Inorganic pyrophosphatase
  misc_feature (1)..(216): Homolog of NCBI NO: 38345829 NR Description: OSJNBa0070M12.12 [Oryza sativa (japonica
  misc_feature (1)..(216): Homolog of NCBI NO: 15234191 NR Description: putative inorganic phosphatase
  misc_feature (15)..(216): Homolog of NCBI NO: 2500047 NR Description: Soluble inorganic pyrophosphatase (Pyrophosphate
  misc_feature (1)..(216): Homolog of NCBI NO: 4033424 NR Description: Soluble inorganic pyrophosphatase (Pyrophosphate
  misc_feature (177)..(216): Homolog of NCBI NO: 25290346 NR Description: protein T25K16.5 [imported] - Arabidopsis
  misc_feature (7)..(175): Homolog of NCBI NO: 25290346 NR Description: protein T25K16.5 [imported] - Arabidopsis
  misc_feature (8)..(216): Homolog of NCBI NO: 5669924 NR Description: soluble inorganic pyrophosphatase
  misc_feature (7)..(216): Homolog of NCBI NO: 15223288 NR Description: soluble inorganic pyrophosphatase, putative
  misc_feature (1)..(216): Homolog of NCBI NO: 26451240 NR Description: putative inorganic pyrophosphatase [Arabidopsis
  misc_feature (1)..(216): Homolog of NCBI NO: 15226453 NR Description: putative inorganic pyrophosphatase; protein id:
MSEEAYEETQESSQSPRPVPKLNERILSTLSRRSVAAHPWHDLEIGPEAPLVFNVVVEITKGSKVKYELDKKTGLIKVDRILYSSVVYPHNYGFIPRTLCEDNDPLDVLVLMQEPVLPGCFLRARAIGLMPMIDQGEKDDKIIAVCADDPEYKHFTDIKQLAPHRLQEIRRFFEDYKKNENKKVAVNDFLPSESAHEAIQYSMDLYAEYILHTLRR

SEQ ID NO: 44570 - DNA, 736 bp, Arabidopsis thaliana
  misc_feature (1)..(736): Ceres Seq. ID no. 12466142
  misc_feature: MA Experiment ID: 20000173 Result: Up-regulated in Transcription
  misc_feature: MA Experiment 20000173 PARAMETER Experiment Name: At_42deg_Heat_P Parameter: Age (day) Value: 14
  misc_feature: MA Experiment 20000173 PARAMETER Experiment Name: At_42deg_Heat_P Parameter: Organism Value: A. thaliana
  misc_feature: MA Experiment 20000173 PARAMETER Experiment Name: At_42deg_Heat_P Parameter: Plant Line Value: WS
  misc_feature: MA Experiment 20000173 PARAMETER Experiment Name: At_42deg_Heat_P Parameter: Temperature (deg C) Value: 42 vs. 22
  misc_feature: MA Experiment 20000173 PARAMETER Experiment Name: At_42deg_Heat_P Parameter: Timepoint (hr) Value: 6
  misc_feature: MA Experiment 20000173 PARAMETER Experiment Name: At_42deg_Heat_P Parameter: Tissue Value: Aerial
  misc_feature: MA Experiment ID: 20000184 Result: Up-regulated in Transcription
  misc_feature: MA Experiment 20000184 PARAMETER Experiment Name: At_Shoots__P Parameter: Age (day) Value: 7
  misc_feature: MA Experiment 20000184 PARAMETER Experiment Name: At_Shoots__P Parameter: Tissue Value: Shoots vs. Whole Plant
  misc_feature: MA Experiment ID: 20000264 Result: Up-regulated in Transcription
  misc_feature: MA Experiment 20000264 PARAMETER Experiment Name: At_Open_Flower_P Parameter: Age (day) Value: 21
  misc_feature: MA Experiment 20000264 PARAMETER Experiment Name: At_Open_Flower_P Parameter: Plant Line Value: WS
  misc_feature: MA Experiment 20000264 PARAMETER Experiment Name: At_Open_Flower_P Parameter: Tissue Value: Open Flower vs. Whole Plant
  misc_feature: MA Experiment ID: 20000439 Result: Down-regulated in Transcription
  misc_feature: MA Experiment 20000439 PARAMETER Experiment Name: At_Roots__P Parameter: Age (day) Value: 14 vs. 21
  misc_feature: MA Experiment 20000439 PARAMETER Experiment Name: At_Roots__P Parameter: Organism Value: A. thaliana
  misc_feature: MA Experiment 20000439 PARAMETER Experiment Name: At_Roots__P Parameter: Tissue Value: Roots vs. Whole Plant
  misc_feature: MA Experiment ID: 20000794 Result: Up-regulated in Transcription
  misc_feature: MA Experiment 20000794 PARAMETER Experiment Name: At_Petals_P Parameter: Age (day) Value: 23-25 days
  misc_feature: MA Experiment 20000794 PARAMETER Experiment Name: At_Petals_P Parameter: Plant Line Value: WS
  misc_feature: MA Experiment 20000794 PARAMETER Experiment Name: At_Petals_P Parameter: Tissue Value: Petals vs. Whole plant
  misc_feature: MA Experiment ID: 20001248 Result: Down-regulated in Transcription
  misc_feature: MA Experiment 20001248 PARAMETER Experiment Name: At_Far-red-induction_P Parameter: Age (day) Value: 7
  misc_feature: MA Experiment 20001248 PARAMETER Experiment Name: At_Far-red-induction_P Parameter: Light Value: Far-red vs. White
  misc_feature: MA Experiment 20001248 PARAMETER Experiment Name: At_Far-red-induction_P Parameter: Organism Value: A. thaliana
  misc_feature: MA Experiment 20001248 PARAMETER Experiment Name: At_Far-red-induction_P Parameter: Plant Line Value: Columbia
  misc_feature: MA Experiment 20001248 PARAMETER Experiment Name: At_Far-red-induction_P Parameter: Timepoint (hr) Value: 4
  misc_feature: MA Experiment 20001248 PARAMETER Experiment Name: At_Far-red-induction_P Parameter: Tissue Value: Whole Plant
  misc_feature: MA Experiment ID: 20001557 Result: Up-regulated in Transcription
  misc_feature: MA Experiment 20001557 PARAMETER Experiment Name: At_Drought_Soil_Dry_P Parameter: Age (day) Value: 27
  misc_feature: MA Experiment 20001557 PARAMETER Experiment Name: At_Drought_Soil_Dry_P Parameter: Organism Value: A. thaliana
  misc_feature: MA Experiment 20001557 PARAMETER Experiment Name: At_Drought_Soil_Dry_P Parameter: Plant Line Value: WS
  misc_feature: MA Experiment 20001557 PARAMETER Experiment Name: At_Drought_Soil_Dry_P Parameter: Post Timepoint (hr) Value: 3
  misc_feature: MA Experiment 20001557 PARAMETER Experiment Name: At_Drought_Soil_Dry_P Parameter: Post-Treatment Value: Re-Water vs. No Drought
  misc_feature: MA Experiment 20001557 PARAMETER Experiment Name: At_Drought_Soil_Dry_P Parameter: Timepoint (day) Value: 13
  misc_feature: MA Experiment 20001557 PARAMETER Experiment Name: At_Drought_Soil_Dry_P Parameter: Treatment Value: Drought vs. No Drought
  misc_feature: MA Experiment ID: 20001904 Result: Up-regulated in Transcription
  misc_feature: MA Experiment 20001904 PARAMETER Experiment Name: At_Drought_Reproduction_P Parameter: Age (day) Value: 37
  misc_feature: MA Experiment 20001904 PARAMETER Experiment Name: At_Drought_Reproduction_P Parameter: Organism Value: A. thaliana
  misc_feature: MA Experiment 20001904 PARAMETER Experiment Name: At_Drought_Reproduction_P Parameter: Plant Line Value: WS
  misc_feature: MA Experiment 20001904 PARAMETER Experiment Name: At_Drought_Reproduction_P Parameter: Timepoint (day) Value: 7
  misc_feature: MA Experiment 20001904 PARAMETER Experiment Name: At_Drought_Reproduction_P Parameter: Tissue Value: Rosettes
  misc_feature: MA Experiment 20001904 PARAMETER Experiment Name: At_Drought_Reproduction_P Parameter: Treatment Value: Drought vs. No Drought
cacttctatggctgttatggctgtttactacagattctcttggcaaatggagggaggtgagatctcaatgttggaaatgtttggtacatttgctctctctgttggtgctgctgttggtatggaattctgggcaagatgggctcatagagctctgtggcacgcttctctatggaatatgcatgagtcacatcacaaaccaagagaaggaccgtttgagctaaacgatgtttttgctatagtgaacgctggtccagcgattggtctcctctcttatggattcttcaataaaggactcgttcctggtctctgctttggcgccgggttaggcataacggtgtttggaatcgcctacatgtttgtccccgatggtctcgtgcccaagcgtttccctgtaggtcccatcgccgacgtcccttacctccgaaaggtcgccgccgctcaccagttacatcacacagacaaattcaatggtgtaccatatggactgtttcttggacccaaggaattggaagaagttggaggaaatgaagagttagataaggggattagtcggggaatcaaatcatacaaaaaggcctcgggttccgggtcgagttcttgacttgaaacaagttttaaatcccaaattcttttttgtcttctgtcattatgatcatcttaagacggtctatgttgataaatcctatatgccgatttttgattttaatgaatatttataaaaaatatagatacctcc

SEQ ID NO: 44571 - protein, 199 aa, Arabidopsis thaliana
  peptide (1)..(199): Ceres Seq. ID no. 12466143
  misc_feature (27)..(186): Pfam Name: Carotene hydroxylase Pfam Description: Carotene hydroxylase
  misc_feature (1)..(184): Homolog of NCBI NO: 5870598 NR Description: beta-carotene hydroxylase [Lycopersicon
  misc_feature (1)..(190): Homolog of NCBI NO: 5870600 NR Description: beta-carotene hydroxylase [Lycopersicon
  misc_feature (1)..(193): Homolog of NCBI NO: 2956717 NR Description: beta-carotene hydroxylase 2 [Capsicum annuum]
  misc_feature (1)..(188): Homolog of NCBI NO: 21734857 NR Description: beta-carotene hydroxylase [Vitis vinifera]
  misc_feature (1)..(189): Homolog of NCBI NO: 9971820 NR Description: beta hydroxylase [Tagetes erecta]
  misc_feature (1)..(191): Homolog of NCBI NO: 11245486 NR Description: beta-carotene hydroxylase [Citrus unshiu]
  misc_feature (1)..(191): Homolog of NCBI NO: 9988836 NR Description: beta-carotene hydroxylase [Citrus unshiu]
  misc_feature (1)..(195): Homolog of NCBI NO: 15237204 NR Description: beta-carotene hydroxylase, putative
  misc_feature (1)..(199): Homolog of NCBI NO: 15235959 NR Description: beta-carotene hydroxylase
  misc_feature (1)..(199): Homolog of NCBI NO: 1575296 NR Description: beta-carotene hydroxylase [Arabidopsis thaliana]
TSMAVMAVYYRFSWQMEGGEISMLEMFGTFALSVGAAVGMEFWARWAHRALWHASLWNMHESHHKPREGPFELNDVFAIVNAGPAIGLLSYGFFNKGLVPGLCFGAGLGITVFGIAYMFVPDGLVPKRFPVGPIADVPYLRKVAAAHQLHHTDKFNGVPYGLFLGPKELEEVGGNEELDKGISRGIKSYKKASGSGSSS

SEQ ID NO: 44572 - protein, 197 aa, Arabidopsis thaliana
  peptide (1)..(197): Ceres Seq. ID no. 12466144
  misc_feature (25)..(184): Pfam Name: Carotene hydroxylase Pfam Description: Carotene hydroxylase
  misc_feature (1)..(182): Homolog of NCBI NO: 5870598 NR Description: beta-carotene hydroxylase [Lycopersicon
  misc_feature (1)..(188): Homolog of NCBI NO: 5870600 NR Description: beta-carotene hydroxylase [Lycopersicon
  misc_feature (1)..(191): Homolog of NCBI NO: 2956717 NR Description: beta-carotene hydroxylase 2 [Capsicum annuum]
  misc_feature (1)..(186): Homolog of NCBI NO: 21734857 NR Description: beta-carotene hydroxylase [Vitis vinifera]
  misc_feature (1)..(187): Homolog of NCBI NO: 9971820 NR Description: beta hydroxylase [Tagetes erecta]
  misc_feature (1)..(189): Homolog of NCBI NO: 11245486 NR Description: beta-carotene hydroxylase [Citrus unshiu]
  misc_feature (1)..(189): Homolog of NCBI NO: 9988836 NR Description: beta-carotene hydroxylase [Citrus unshiu]
  misc_feature (1)..(193): Homolog of NCBI NO: 15237204 NR Description: beta-carotene hydroxylase, putative
  misc_feature (1)..(197): Homolog of NCBI NO: 15235959 NR Description: beta-carotene hydroxylase
  misc_feature (1)..(197): Homolog of NCBI NO: 1575296 NR Description: beta-carotene hydroxylase [Arabidopsis thaliana]
MAVMAVYYRFSWQMEGGEISMLEMFGTFALSVGAAVGMEFWARWAHRALWHASLWNMHESHHKPREGPFELNDVFAIVNAGPAIGLLSYGFFNKGLVPGLCFGAGLGITVFGIAYMFVPDGLVPKRFPVGPIADVPYLRKVAAAHQLHHTDKFNGVPYGLFLGPKELEEVGGNEELDKGISRGIKSYKKASGSGSSS

SEQ ID NO: 44573 - protein, 194 aa, Arabidopsis thaliana
  peptide (1)..(194): Ceres Seq. ID no. 12466145
  misc_feature (22)..(181): Pfam Name: Carotene hydroxylase Pfam Description: Carotene hydroxylase
  misc_feature (1)..(179): Homolog of NCBI NO: 5870598 NR Description: beta-carotene hydroxylase [Lycopersicon
  misc_feature (1)..(185): Homolog of NCBI NO: 5870600 NR Description: beta-carotene hydroxylase [Lycopersicon
  misc_feature (1)..(188): Homolog of NCBI NO: 2956717 NR Description: beta-carotene hydroxylase 2 [Capsicum annuum]
  misc_feature (1)..(183): Homolog of NCBI NO: 21734857 NR Description: beta-carotene hydroxylase [Vitis vinifera]
  misc_feature (1)..(184): Homolog of NCBI NO: 9971820 NR Description: beta hydroxylase [Tagetes erecta]
  misc_feature (1)..(186): Homolog of NCBI NO: 11245486 NR Description: beta-carotene hydroxylase [Citrus unshiu]
  misc_feature (1)..(186): Homolog of NCBI NO: 9988836 NR Description: beta-carotene hydroxylase [Citrus unshiu]
  misc_feature (1)..(190): Homolog of NCBI NO: 15237204 NR Description: beta-carotene hydroxylase, putative
  misc_feature (1)..(194): Homolog of NCBI NO: 15235959 NR Description: beta-carotene hydroxylase
  misc_feature (1)..(194): Homolog of NCBI NO: 1575296 NR Description: beta-carotene hydroxylase [Arabidopsis thaliana]
MAVYYRFSWQMEGGEISMLEMFGTFALSVGAAVGMEFWARWAHRALWHASLWNMHESHHKPREGPFELNDVFAIVNAGPAIGLLSYGFFNKGLVPGLCFGAGLGITVFGIAYMFVPDGLVPKRFPVGPIADVPYLRKVAAAHQLHHTDKFNGVPYGLFLGPKELEEVGGNEELDKGISRGIKSYKKASGSGSSS

SEQ ID NO: 44574 - DNA, 2976 bp, Arabidopsis thaliana
  misc_feature (1)..(2976): Ceres Seq. ID no. 12488998
  misc_feature: MA Experiment ID: 20000440 Result: Up-regulated in Transcription
  misc_feature: MA Experiment 20000440 PARAMETER Experiment Name: At_Closed-Flower__Sub_P Parameter: Tissue Value: Closed Flower vs. Whole Plant
  misc_feature (2861)..(2861): n is a, c, t, g, unknown, or other
ctagtcacttggcataagcaaaccaagctatccagccaaataattagtgttgggctagtggtgaacgtcatgcgaatagtctggataccctagtttgagtttaagttgagagggtttctaaacgatttttggaaatacattaactttggttcagactttctcgattaattaccattaaaaatcaaaaggtcaatgttgtcgaaaatgtaaaagtataggcttcaaatagtacaatggtacaatcaatgcccaacgaaacgaacgaagcatatgaaacaaatatagtggtagatacatgtgatcgtgtatgattagaatttgctactctcgaattatttctgtttagtttctagagagtttggttggtttactatttgcagatagatcatggagaatgctacttcgacctcaatctctgggaaccatatactcactaatcatcttcaaacgatttgtcccaaaacaacgtatattactaactgcgtttgatgttttgaatatgtatgataaggttaaacatatagagcgtatagattttcaaaagcatggtagctgttggtgaaaatgcatggcttattagtgtttcttttagagaagctaacgttgtatatagcattaatttacatatctaattttgtcaattgtaatgagactttggatacaacaacatccggctgcgaaataattgtgactttatatgtatttttaataaattaaatggtccaactaacacagaaaacgtacgagtacactgtctcaatatttgtttctcattggtccacgtccaacttggccagccactgaccacttcaactacaatttaaaatgaactgacaaatctccaaccaaacactgacccgtaataaattctatctatctttagagacttcgagtcctttcccttttctactttcctcttttggattcattaattaactacacaaatcaatttgaggaaaatcacatgattctaacacacttctttcaggtaaagtgtcaaaagtttcacagaccatatcaattcaaatactccatgcgaaattaatttattaatgctatgaaagtgtgcaaccggtgcacccatgggaaacaatcataacacaaataattggtatacatattttgtaataaacatggtaacaattagaatggttaaaatgtttaaacagtgaattgagataagttttaactcgtgatcagaactatttttatgctcttttgtttaaaatggtcgtattcatgtgttcttatacgtataaagtcacaaaaagacgaccattttttaaaagtgcgttcacctatttgtacaacttgcggtaacgattttgtgttttaataaacggtaaccttaaaacgcagaccacattttccgcggcacaaacgcgcttaacgccatctctataaattaaaacccacccaatgcccaatattttctcatatgttcattgcaatggcagatttcaaaattcttttgcttatactcatccttatatctctctttgaacttgatctacttcattttcaccatgacttcttctctccttttccggtcaagatcggtttactcctgatatccatcttcttctatgcctactcaaccacccggtctaaaccggtttacctagtggatttctcatgtcaccaacccacggattcttgcaaaatctcatccgaaacgttcttcaacatggccaaaggcgctcaactctacaccgatgaaacaatccaattcatgacgaggatattaaaccggtccggtttaggagacgatacgtactccccacgttgcatgttaacctctccaccaactccatcaatgtacgaggcgagacatgaatccgaattagttatcttcggagctcttaactcactattcaagaaaaccggaatcgaaccgagagaagtcggaatcttcattgtaaactgcagcttgtttaaccctaacccatctctctcgtccatgatcgtaaaccggtacaagcttaaaaccgacgtcaaaacttacaatctctccggtatgggatgcagcgccggcgcaatctccgtcgacctcgccacaaatctactaaaggcaaaccctaatacctacgcagttattgttagtacggagaacatgaccctaagcatgtatcgaggcaacgaccggtcaatgttagtccctaactgtctattccgagtaggtggcgctgcggttatgctctcaaaccggagtcaagaccgagtccggtctaagtacgaattgactcatattgtaaggactcacaaaggctctagcgataaacactacacttgtgctgaacaaaaagaagatagtaaaggtatcgttggagtcgcactctctaaagaactaacggttgttgctggtgactcgttaaagacgaatctaacagcacttggtccgcttgtgttgcctttatctgaaaaactccggtttatcctctttttggtaaagagtaagcttttccggttaaaggttagtccatatgttccggattttaaactatgtttcaagcatttctgtattcacgctggtggtagagcgttacttgacgcggttgaaaaaggtcttggacttagtgagtttgatcttgagccgtctcggatgactttgcaccgctttggaaacacttcaagctcgtcgctgtggtacgagctggcttacgtggaggctaaatgtcgggtcaaacgaggagatagggtttggcagttggcgtttgggtcgggttttaaatgtaatagtattgtgtggagagcgttgagaacgattccggctaacgagtcattggtgggtaacccgtggggtgactcggttcataagtatccagttcacgtgacctaagttttaagtaatactactacgngtgtgaagtcacgttataagttatcataagtcaacaatatgttattagctttctattaaagtgtagtttttttttttttttccccacaaatatgtattatttgcttgtttttgcc

SEQ ID NO: 44575 - protein, 466 aa, Arabidopsis thaliana
  peptide (1)..(466): Ceres Seq. ID no. 12488999
  misc_feature (296)..(441): Pfam Name: Chalcone and stilbene synthases, C-terminal domain Pfam Description: Chalcone and stilbene synthases, C-terminal
  misc_feature (43)..(465): Homolog of NCBI NO: 15239981 NR Description: beta-ketoacyl-CoA synthase
  misc_feature (43)..(465): Homolog of NCBI NO: 14334714 NR Description: putative beta-ketoacyl-CoA synthase [Arabidopsis
  misc_feature (8)..(463): Homolog of NCBI NO: 3551960 NR Description: senescence-associated protein 15 [Hemerocallis
  misc_feature (1)..(466): Homolog of NCBI NO: 18377979 NR Description: putative beta-ketoacyl-CoA synthase [Arabidopsis
  misc_feature (1)..(466): Homolog of NCBI NO: 15219676 NR Description: putative beta-ketoacyl-CoA synthase; protein id:
  misc_feature (1)..(465): Homolog of NCBI NO: 15225767 NR Description: putative beta-ketoacyl-CoA synthase; protein id:
  misc_feature (42)..(465): Homolog of NCBI NO: 22329274 NR Description: fatty acid elongase 3-ketoacyl-CoA synthase 1
  misc_feature (42)..(465): Homolog of NCBI NO: 4091810 NR Description: fatty acid elongase 3-ketoacyl-CoA synthase 1
  misc_feature (1)..(466): Homolog of NCBI NO: 15228247 NR Description: putative fatty acid elongase 3-ketoacyl-CoA
  misc_feature (1)..(466): Homolog of NCBI NO: 15226428 NR Description: putative beta-ketoacyl-CoA synthase; protein id:
MFIAMADFKILLLILILISLFELDLLHFHHDFFSPFPVKIGLLLISIFFYAYSTTRSKPVYLVDFSCHQPTDSCKISSETFFNMAKGAQLYTDETIQFMTRILNRSGLGDDTYSPRCMLTSPPTPSMYEARHESELVIFGALNSLFKKTGIEPREVGIFIVNCSLFNPNPSLSSMIVNRYKLKTDVKTYNLSGMGCSAGAISVDLATNLLKANPNTYAVIVSTENMTLSMYRGNDRSMLVPNCLFRVGGAAVMLSNRSQDRVRSKYELTHIVRTHKGSSDKHYTCAEQKEDSKGIVGVALSKELTVVAGDSLKTNLTALGPLVLPLSEKLRFILFLVKSKLFRLKVSPYVPDFKLCFKHFCIHAGGRALLDAVEKGLGLSEFDLEPSRMTLHRFGNTSSSSLWYELAYVEAKCRVKRGDRVWQLAFGSGFKCNSIVWRALRTIPANESLVGNPWGDSVHKYPVHVT

SEQ ID NO: 44576 - protein, 462 aa, Arabidopsis thaliana
  peptide (1)..(462): Ceres Seq. ID no. 12489000
  misc_feature (292)..(437): Pfam Name: Chalcone and stilbene synthases, C-terminal domain Pfam Description: Chalcone and stilbene synthases, C-terminal
  misc_feature (39)..(461): Homolog of NCBI NO: 15239981 NR Description: beta-ketoacyl-CoA synthase
  misc_feature (39)..(461): Homolog of NCBI NO: 14334714 NR Description: putative beta-ketoacyl-CoA synthase [Arabidopsis
  misc_feature (4)..(459): Homolog of NCBI NO: 3551960 NR Description: senescence-associated protein 15 [Hemerocallis
  misc_feature (1)..(462): Homolog of NCBI NO: 18377979 NR Description: putative beta-ketoacyl-CoA synthase [Arabidopsis
  misc_feature (1)..(462): Homolog of NCBI NO: 15219676 NR Description: putative beta-ketoacyl-CoA synthase; protein id:
  misc_feature (1)..(461): Homolog of NCBI NO: 15225767 NR Description: putative beta-ketoacyl-CoA synthase; protein id:
  misc_feature (38)..(461): Homolog of NCBI NO: 22329274 NR Description: fatty acid elongase 3-ketoacyl-CoA synthase 1
  misc_feature (38)..(461): Homolog of NCBI NO: 4091810 NR Description: fatty acid elongase 3-ketoacyl-CoA synthase 1
  misc_feature (1)..(462): Homolog of NCBI NO: 15228247 NR Description: putative fatty acid elongase 3-ketoacyl-CoA
  misc_feature (1)..(462): Homolog of NCBI NO: 15226428 NR Description: putative beta-ketoacyl-CoA synthase; protein id:
MADFKILLLILILISLFELDLLHFHHDFFSPFPVKIGLLLISIFFYAYSTTRSKPVYLVDFSCHQPTDSCKISSETFFNMAKGAQLYTDETIQFMTRILNRSGLGDDTYSPRCMLTSPPTPSMYEARHESELVIFGALNSLFKKTGIEPREVGIFIVNCSLFNPNPSLSSMIVNRYKLKTDVKTYNLSGMGCSAGAISVDLATNLLKANPNTYAVIVSTENMTLSMYRGNDRSMLVPNCLFRVGGAAVMLSNRSQDRVRSKYELTHIVRTHKGSSDKHYTCAEQKEDSKGIVGVALSKELTVVAGDSLKTNLTALGPLVLPLSEKLRFILFLVKSKLFRLKVSPYVPDFKLCFKHFCIHAGGRALLDAVEKGLGLSEFDLEPSRMTLHRFGNTSSSSLWYELAYVEAKCRVKRGDRVWQLAFGSGFKCNSIVWRALRTIPANESLVGNPWGDSVHKYPVHVT

SEQ ID NO: 44577 - protein, 383 aa, Arabidopsis thaliana
  peptide (1)..(383): Ceres Seq. ID no. 12489001
  misc_feature (213)..(358): Pfam Name: Chalcone and stilbene synthases, C-terminal domain Pfam Description: Chalcone and stilbene synthases, C-terminal
  misc_feature (1)..(382): Homolog of NCBI NO: 15239981 NR Description: beta-ketoacyl-CoA synthase
  misc_feature (1)..(382): Homolog of NCBI NO: 14334714 NR Description: putative beta-ketoacyl-CoA synthase [Arabidopsis
  misc_feature (1)..(380): Homolog of NCBI NO: 3551960 NR Description: senescence-associated protein 15 [Hemerocallis
  misc_feature (1)..(383): Homolog of NCBI NO: 18377979 NR Description: putative beta-ketoacyl-CoA synthase [Arabidopsis
  misc_feature (1)..(383): Homolog of NCBI NO: 15219676 NR Description: putative beta-ketoacyl-CoA synthase; protein id:
  misc_feature (1)..(382): Homolog of NCBI NO: 15225767 NR Description: putative beta-ketoacyl-CoA synthase; protein id:
  misc_feature (1)..(382): Homolog of NCBI NO: 22329274 NR Description: fatty acid elongase 3-ketoacyl-CoA synthase 1
  misc_feature (1)..(382): Homolog of NCBI NO: 4091810 NR Description: fatty acid elongase 3-ketoacyl-CoA synthase 1
  misc_feature (1)..(383): Homolog of NCBI NO: 15228247 NR Description: putative fatty acid elongase 3-ketoacyl-CoA
  misc_feature (1)..(383): Homolog of NCBI NO: 15226428 NR Description: putative beta-ketoacyl-CoA synthase; protein id:
MAKGAQLYTDETIQFMTRILNRSGLGDDTYSPRCMLTSPPTPSMYEARHESELVIFGALNSLFKKTGIEPREVGIFIVNCSLFNPNPSLSSMIVNRYKLKTDVKTYNLSGMGCSAGAISVDLATNLLKANPNTYAVIVSTENMTLSMYRGNDRSMLVPNCLFRVGGAAVMLSNRSQDRVRSKYELTHIVRTHKGSSDKHYTCAEQKEDSKGIVGVALSKELTVVAGDSLKTNLTALGPLVLPLSEKLRFILFLVKSKLFRLKVSPYVPDFKLCFKHFCIHAGGRALLDAVEKGLGLSEFDLEPSRMTLHRFGNTSSSSLWYELAYVEAKCRVKRGDRVWQLAFGSGFKCNSIVWRALRTIPANESLVGNPWGDSVHKYPVHVT

SEQ ID NO: 44578 - DNA, 1490 bp, Arabidopsis thaliana
  misc_feature (1)..(1490): Ceres Seq. ID no. 13509561
  misc_feature: MA Experiment ID: 20000173 Result: Down-regulated in Transcription
  misc_feature: MA Experiment 20000173 PARAMETER Experiment Name: At_42deg_Heat_P Parameter: Age (day) Value: 14
  misc_feature: MA Experiment 20000173 PARAMETER Experiment Name: At_42deg_Heat_P Parameter: Organism Value: A. thaliana
  misc_feature: MA Experiment 20000173 PARAMETER Experiment Name: At_42deg_Heat_P Parameter: Plant Line Value: WS
  misc_feature: MA Experiment 20000173 PARAMETER Experiment Name: At_42deg_Heat_P Parameter: Temperature (deg C) Value: 42 vs. 22
  misc_feature: MA Experiment 20000173 PARAMETER Experiment Name: At_42deg_Heat_P Parameter: Timepoint (hr) Value: 6
  misc_feature: MA Experiment 20000173 PARAMETER Experiment Name: At_42deg_Heat_P Parameter: Tissue Value: Aerial
  misc_feature: MA Experiment ID: 20000180 Result: Up-regulated in Transcription
  misc_feature: MA Experiment 20000180 PARAMETER Experiment Name: At_Germinating_Seeds_P Parameter: Age (hr) Value: 24 vs. 0
  misc_feature: MA Experiment 20000180 PARAMETER Experiment Name: At_Germinating_Seeds_P Parameter: Tissue Value: Germinating Seeds
  misc_feature: MA Experiment ID: 20000264 Result: Down-regulated in Transcription
  misc_feature: MA Experiment 20000264 PARAMETER Experiment Name: At_Open_Flower_P Parameter: Age (day) Value: 21
  misc_feature: MA Experiment 20000264 PARAMETER Experiment Name: At_Open_Flower_P Parameter: Plant Line Value: WS
  misc_feature: MA Experiment 20000264 PARAMETER Experiment Name: At_Open_Flower_P Parameter: Tissue Value: Open Flower vs. Whole Plant
  misc_feature: MA Experiment ID: 20000437 Result: Down-regulated in Transcription
  misc_feature: MA Experiment 20000437 PARAMETER Experiment Name: At_Drought_P Parameter: Age (day) Value: 8
  misc_feature: MA Experiment 20000437 PARAMETER Experiment Name: At_Drought_P Parameter: Organism Value: A. thaliana
  misc_feature: MA Experiment 20000437 PARAMETER Experiment Name: At_Drought_P Parameter: Plant Line Value: WS
  misc_feature: MA Experiment 20000437 PARAMETER Experiment Name: At_Drought_P Parameter: Timepoint (hr) Value: 24
  misc_feature: MA Experiment 20000437 PARAMETER Experiment Name: At_Drought_P Parameter: Tissue Value: Whole Plant
  misc_feature: MA Experiment 20000437 PARAMETER Experiment Name: At_Drought_P Parameter: Treatment Value: Drought vs. No Drought
  misc_feature: MA Experiment ID: 20000495 Result: Down-regulated in Transcription
  misc_feature: MA Experiment 20000495 PARAMETER Experiment Name: At_Guard_Cells_P Parameter: Harvest Date Value: 8/2/2002
  misc_feature: MA Experiment 20000495 PARAMETER Experiment Name: At_Guard_Cells_P Parameter: Organism Value: A. thaliana
  misc_feature: MA Experiment 20000495 PARAMETER Experiment Name: At_Guard_Cells_P Parameter: Tissue Value: Guard Cells vs. Leaves
  misc_feature: MA Experiment ID: 20001451 Result: Down-regulated in Transcription
  misc_feature: MA Experiment 20001451 PARAMETER Experiment Name: At_Far-red-induction_P Parameter: Age (day) Value: 7
  misc_feature: MA Experiment 20001451 PARAMETER Experiment Name: At_Far-red-induction_P Parameter: Light Value: Far-red vs. White
  misc_feature: MA Experiment 20001451 PARAMETER Experiment Name: At_Far-red-induction_P Parameter: Organism Value: A. thaliana
  misc_feature: MA Experiment 20001451 PARAMETER Experiment Name: At_Far-red-induction_P Parameter: Plant Line Value: Columbia
  misc_feature: MA Experiment 20001451 PARAMETER Experiment Name: At_Far-red-induction_P Parameter: Timepoint (hr) Value: 24
  misc_feature: MA Experiment 20001451 PARAMETER Experiment Name: At_Far-red-induction_P Parameter: Tissue Value: Whole Plant
  misc_feature: MA Experiment ID: 20001757 Result: Up-regulated in Transcription
  misc_feature: MA Experiment 20001757 PARAMETER Experiment Name: At_50mM_NH4NO3_L-to-H_P Parameter: Timepoint (hr) Value: 6
  misc_feature: MA Experiment 20001757 PARAMETER Experiment Name: At_50mM_NH4NO3_L-to-H_P Parameter: Tissue Value: Leaf
  misc_feature: MA Experiment 20001757 PARAMETER Experiment Name: At_50mM_NH4NO3_L-to-H_P Parameter: Treatment Value: 50mM NH4NO3 vs 100mM Mannitol
gagaaaaatggattcctctccatcagaagtaaagattatctcaaaatgcttcgtcaaacccaaaaccatacctgaaaaatggaaagagccataccatttttcaccaatggatcatgtaatactctcaatccattacatccaaaagggtcttctctttctcaaaccatcgttttctgaatctgtcacaccaaaagagttcatggagactttgctgcagaagcttaaagactctctagccatagcacttgtccatttctatccgcttgcaggtcgcatctcgactttgaaaaccaacgactcaagatctcactcggtgtttgtggattgtaataacagtcctgctggatttatccatgctgaatcagatctaagtgtatcagacattcttggttccaaatatgttcctttggttgttcaatctttctttgaccatcacaaagcattgagtcgtgatggtgacaccatgactctcttatcagtcaaggtaacagaattggtagatggagtgttcataggattgtctatgaatcattcgcttggagatggaagttccttctggcacttcttcaactctttgtccgagattttcaattctcaagaagataacaacaagtttctctgtctgaagaatcctccaatctttcgtgaagtgtccggtcctatgtacagccttcccttcagtgaacctgatgagtccattagtcaatcagaacgtccggttttgaaggagagaatgttccatttctcatcagaaacagtgagatcactaaaatcaaaggcgaatgaagaatgcggaacaacaaagatatcttctttgcagtcgctgactgcattgatatggagaagcattacaagagcaagaaaactaccaaatgatcaagaaactacttgcaggcttgctgctggcaatagatcaagaatgaatccaccattgccgatgaatcactttggaaattacatctctcttgtgatagctactactacaactggtgatctattggagaatgagtttggatgtgctgctttgaaactgcatcaagctgtaaccgaacacactggcgaaaagatctctgccgacatggaccgttggttgaaggctcatttgaaactagatggatttttcagtccaaatattgttcacatgggaagctctccgaggtttaacaagtacggaagcgagtttgggatggggaaagcagtggcggttagaagcggttatggtggtaagtatgacgggaaggtatcagcttatccagggagagaaggaggagcaagcatagatttggaagtatgtctacctccagagtgtatggaagctttggaattagatcaagagtttatgtctcttgtctcttcttcttcttcttcttgatctaatattcttattcatatgtgctcccatcatatctctatctaaactggatttgttagattggagtattttgtgttgctgttaaaactcaatcaatattatgtgacaatgtgttatt

SEQ ID NO: 44579 - protein, 456 aa, Arabidopsis thaliana
  peptide (1)..(456): Ceres Seq. ID no. 13509562
  misc_feature (8)..(447): Pfam Name: Transferase family Pfam Description: Transferase family
  misc_feature (265)..(451): Homolog of NCBI NO: 21666314 NR Description: AER [Nicotiana tabacum]
  misc_feature (8)..(263): Homolog of NCBI NO: 21666314 NR Description: AER [Nicotiana tabacum]
  misc_feature (9)..(450): Homolog of NCBI NO: 15240227 NR Description: hydroxycinnamoyl/benzoyltransferase-related
  misc_feature (3)..(451): Homolog of NCBI NO: 24413968 NR Description: N-hydroxycinnamoyl/benzoyltransferase-like
  misc_feature (250)..(452): Homolog of NCBI NO: 15225603 NR Description: transferase family [Arabidopsis thaliana]
  misc_feature (3)..(263): Homolog of NCBI NO: 15225603 NR Description: transferase family [Arabidopsis thaliana]
  misc_feature (3)..(451): Homolog of NCBI NO: 15239072 NR Description: hydroxycinnamoyl benzoyltransferase-related
  misc_feature (3)..(454): Homolog of NCBI NO: 15240871 NR Description: hydroxycinnamoyl benzoyltransferase-related
  misc_feature (3)..(454): Homolog of NCBI NO: 15241433 NR Description: hydroxycinnamoyl benzoyltransferase-related
  misc_feature (3)..(456): Homolog of NCBI NO: 15241431 NR Description: hydroxycinnamoyl benzoyltransferase-related
RKMDSSPSEVKIISKCFVKPKTIPEKWKEPYHFSPMDHVILSIHYIQKGLLFLKPSFSESVTPKEFMETLLQKLKDSLAIALVHFYPLAGRISTLKTNDSRSHSVFVDCNNSPAGFIHAESDLSVSDILGSKYVPLVVQSFFDHHKALSRDGDTMTLLSVKVTELVDGVFIGLSMNHSLGDGSSFWHFFNSLSEIFNSQEDNNKFLCLKNPPIFREVSGPMYSLPFSEPDESISQSERPVLKERMFHFSSETVRSLKSKANEECGTTKISSLQSLTALIWRSITRARKLPNDQETTCRLAAGNRSRMNPPLPMNHFGNYISLVIATTTTGDLLENEFGCAALKLHQAVTEHTGEKISADMDRWLKAHLKLDGFFSPNIVHMGSSPRFNKYGSEFGMGKAVAVRSGYGGKYDGKVSAYPGREGGASIDLEVCLPPECMEALELDQEFMSLVSSSSSS

SEQ ID NO: 44580 - protein, 454 aa, Arabidopsis thaliana
  peptide (1)..(454): Ceres Seq. ID no. 13509563
  misc_feature (6)..(445): Pfam Name: Transferase family Pfam Description: Transferase family
  misc_feature (263)..(449): Homolog of NCBI NO: 21666314 NR Description: AER [Nicotiana tabacum]
  misc_feature (6)..(261): Homolog of NCBI NO: 21666314 NR Description: AER [Nicotiana tabacum]
  misc_feature (7)..(448): Homolog of NCBI NO: 15240227 NR Description: hydroxycinnamoyl/benzoyltransferase-related
  misc_feature (1)..(449): Homolog of NCBI NO: 24413968 NR Description: N-hydroxycinnamoyl/benzoyltransferase-like
  misc_feature (248)..(450): Homolog of NCBI NO: 15225603 NR Description: transferase family [Arabidopsis thaliana]
  misc_feature (1)..(261): Homolog of NCBI NO: 15225603 NR Description: transferase family [Arabidopsis thaliana]
  misc_feature (1)..(449): Homolog of NCBI NO: 15239072 NR Description: hydroxycinnamoyl benzoyltransferase-related
  misc_feature (1)..(452): Homolog of NCBI NO: 15240871 NR Description: hydroxycinnamoyl benzoyltransferase-related
  misc_feature (1)..(452): Homolog of NCBI NO: 15241433 NR Description: hydroxycinnamoyl benzoyltransferase-related
  misc_feature (1)..(454): Homolog of NCBI NO: 15241431 NR Description: hydroxycinnamoyl benzoyltransferase-related
MDSSPSEVKIISKCFVKPKTIPEKWKEPYHFSPMDHVILSIHYIQKGLLFLKPSFSESVTPKEFMETLLQKLKDSLAIALVHFYPLAGRISTLKTNDSRSHSVFVDCNNSPAGFIHAESDLSVSDILGSKYVPLVVQSFFDHHKALSRDGDTMTLLSVKVTELVDGVFIGLSMNHSLGDGSSFWHFFNSLSEIFNSQEDNNKFLCLKNPPIFREVSGPMYSLPFSEPDESISQSERPVLKERMFHFSSETVRSLKSKANEECGTTKISSLQSLTALIWRSITRARKLPNDQETTCRLAAGNRSRMNPPLPMNHFGNYISLVIATTTTGDLLENEFGCAALKLHQAVTEHTGEKISADMDRWLKAHLKLDGFFSPNIVHMGSSPRFNKYGSEFGMGKAVAVRSGYGGKYDGKVSAYPGREGGASIDLEVCLPPECMEALELDQEFMSLVSSSSSS

SEQ ID NO: 44581 - protein, 421 aa, Arabidopsis thaliana
  peptide (1)..(421): Ceres Seq. ID no. 13509564
  misc_feature (1)..(412): Pfam Name: Transferase family Pfam Description: Transferase family
  misc_feature (230)..(416): Homolog of NCBI NO: 21666314 NR Description: AER [Nicotiana tabacum]
  misc_feature (1)..(228): Homolog of NCBI NO: 21666314 NR Description: AER [Nicotiana tabacum]
  misc_feature (1)..(415): Homolog of NCBI NO: 15240227 NR Description: hydroxycinnamoyl/benzoyltransferase-related
  misc_feature (1)..(416): Homolog of NCBI NO: 24413968 NR Description: N-hydroxycinnamoyl/benzoyltransferase-like
  misc_feature (215)..(417): Homolog of NCBI NO: 15225603 NR Description: transferase family [Arabidopsis thaliana]
  misc_feature (1)..(228): Homolog of NCBI NO: 15225603 NR Description: transferase family [Arabidopsis thaliana]
  misc_feature (1)..(416): Homolog of NCBI NO: 15239072 NR Description: hydroxycinnamoyl benzoyltransferase-related
  misc_feature (1)..(419): Homolog of NCBI NO: 15240871 NR Description: hydroxycinnamoyl benzoyltransferase-related
  misc_feature (1)..(419): Homolog of NCBI NO: 15241433 NR Description: hydroxycinnamoyl benzoyltransferase-related
  misc_feature (1)..(421): Homolog of NCBI NO: 15241431 NR Description: hydroxycinnamoyl benzoyltransferase-related
MDHVILSIHYIQKGLLFLKPSFSESVTPKEFMETLLQKLKDSLAIALVHFYPLAGRISTLKTNDSRSHSVFVDCNNSPAGFIHAESDLSVSDILGSKYVPLVVQSFFDHHKALSRDGDTMTLLSVKVTELVDGVFIGLSMNHSLGDGSSFWHFFNSLSEIFNSQEDNNKFLCLKNPPIFREVSGPMYSLPFSEPDESISQSERPVLKERMFHFSSETVRSLKSKANEECGTTKISSLQSLTALIWRSITRARKLPNDQETTCRLAAGNRSRMNPPLPMNHFGNYISLVIATTTTGDLLENEFGCAALKLHQAVTEHTGEKISADMDRWLKAHLKLDGFFSPNIVHMGSSPRFNKYGSEFGMGKAVAVRSGYGGKYDGKVSAYPGREGGASIDLEVCLPPECMEALELDQEFMSLVSSSSSS

SEQ ID NO: 44582 - DNA, 640 bp, Arabidopsis thaliana
  misc_feature (1)..(640): Ceres Seq. ID no. 13575440
  misc_feature: MA Experiment ID: 20000307 Result: Up-regulated in Transcription
  misc_feature: MA Experiment 20000307 PARAMETER Experiment Name: At_Germinating_Seeds_Sub_P Parameter: Age (hr) Value: 24 vs. 0
  misc_feature: MA Experiment 20000307 PARAMETER Experiment Name: At_Germinating_Seeds_Sub_P Parameter: Organism Value: A. thaliana
  misc_feature: MA Experiment 20000307 PARAMETER Experiment Name: At_Germinating_Seeds_Sub_P Parameter: Plant Line Value: WS
  misc_feature: MA Experiment 20000307 PARAMETER Experiment Name: At_Germinating_Seeds_Sub_P Parameter: Tissue Value: Germinating Seeds
  misc_feature: MA Experiment ID: 20000314 Result: Down-regulated in Transcription
  misc_feature: MA Experiment 20000314 PARAMETER Experiment Name: At_14day_Shoots-Roots_Sub_P Parameter: Age (day) Value: 14
  misc_feature: MA Experiment 20000314 PARAMETER Experiment Name: At_14day_Shoots-Roots_Sub_P Parameter: Organism Value: A. thaliana
  misc_feature: MA Experiment 20000314 PARAMETER Experiment Name: At_14day_Shoots-Roots_Sub_P Parameter: Plant Line Value: WS
  misc_feature: MA Experiment 20000314 PARAMETER Experiment Name: At_14day_Shoots-Roots_Sub_P Parameter: Tissue Value: Roots vs. Whole Plant
  misc_feature: MA Experiment ID: 20000329 Result: Down-regulated in Transcription
  misc_feature: MA Experiment 20000329 PARAMETER Experiment Name: At_4deg_Cold_Sub_P Parameter: Age (day) Value: 14
  misc_feature: MA Experiment 20000329 PARAMETER Experiment Name: At_4deg_Cold_Sub_P Parameter: Organism Value: A. thaliana
  misc_feature: MA Experiment 20000329 PARAMETER Experiment Name: At_4deg_Cold_Sub_P Parameter: Plant Line Value: WS
  misc_feature: MA Experiment 20000329 PARAMETER Experiment Name: At_4deg_Cold_Sub_P Parameter: Temperature (deg C) Value: 4 vs. 22
  misc_feature: MA Experiment 20000329 PARAMETER Experiment Name: At_4deg_Cold_Sub_P Parameter: Timepoint (hr) Value: 6
  misc_feature: MA Experiment 20000329 PARAMETER Experiment Name: At_4deg_Cold_Sub_P Parameter: Tissue Value: Aerial
  misc_feature: MA Experiment ID: 20000355 Result: Down-regulated in Transcription
  misc_feature: MA Experiment 20000355 PARAMETER Experiment Name: At_Siliques_Sub_P Parameter: Age (day) Value: 21
  misc_feature: MA Experiment 20000355 PARAMETER Experiment Name: At_Siliques_Sub_P Parameter: Organism Value: A. thaliana
  misc_feature: MA Experiment 20000355 PARAMETER Experiment Name: At_Siliques_Sub_P Parameter: Plant Line Value: WS
  misc_feature: MA Experiment 20000355 PARAMETER Experiment Name: At_Siliques_Sub_P Parameter: Tissue Value: Less Than 5mm Siliques vs. Whole Plant
  misc_feature: MA Experiment ID: 20000440 Result: Down-regulated in Transcription
  misc_feature: MA Experiment 20000440 PARAMETER Experiment Name: At_Closed-Flower__Sub_P Parameter: Tissue Value: Closed Flower vs. Whole Plant
atcaaccagctcaccaagaacaagaacaagaagaagaagaacaagacaagaagaacaaagtacccaagaaaacacacaagaaggaaacacaaagattgatattgatccaaaagcaatggcgtacgagaaagtcaacgagcttaaccttaaggacacagagctatgtcttggattacccggaagaacagagaagatcaaagaagaacaagaggtttcttgcgttaaaagtaacaacaagcgtctatttgaggaaactcgtgatgaagaagaatctacacctcctaccaaaactcaaatcgttggttggccaccagtgagatcttcccgtaagaacaacaacagtgtgagctacgtgaaagtgagtatggacggagctccttaccttcgcaagatcgatctcaagacatacaaaaactaccccgagcttctcaaagcgttagagaatatgttcaaagtcatgattggtgaatattgtgagagagaaggatacaaaggatctggatttgtaccaacatacgaagataaagatggtgactggatgttggttggtgatgttccatgggacatgttctcttcttcttgtaagagactcagaatcatgaagggatccgacgctcctgctctagactcttccttatga

SEQ ID NO: 44583 - protein, 212 aa, Arabidopsis thaliana
  peptide (1)..(212): Ceres Seq. ID no. 13575441
  misc_feature (47)..(211): Pfam Name: AUX/IAA family Pfam Description: AUX/IAA family
  misc_feature (46)..(208): Homolog of NCBI NO: 4887014 NR Description: Nt-iaa2.5 deduced protein [Nicotiana tabacum]
  misc_feature (50)..(201): Homolog of NCBI NO: 18071490 NR Description: auxin-induced AUX/IAA1 [Antirrhinum majus]
  misc_feature (45)..(208): Homolog of NCBI NO: 34550779 NR Description: Gbiaa-Re [Gossypium barbadense]
  misc_feature (37)..(208): Homolog of NCBI NO: 99663 NR Description: auxin-induced protein AUX2-11 - Arabidopsis
  misc_feature (39)..(208): Homolog of NCBI NO: 4887012 NR Description: Nt-iaa2.3 deduced protein [Nicotiana tabacum]
  misc_feature (37)..(208): Homolog of NCBI NO: 15239950 NR Description: auxin-responsive protein IAA4 (Indoleacetic
  misc_feature (42)..(206): Homolog of NCBI NO: 15233496 NR Description: auxin-responsive protein IAA1 (Indoleacetic
  misc_feature (42)..(206): Homolog of NCBI NO: 454281 NR Description: auxin-responsive protein
  misc_feature (39)..(212): Homolog of NCBI NO: 2598932 NR Description: auxin-responsive protein IAA2 [Arabidopsis
  misc_feature (39)..(212): Homolog of NCBI NO: 15228939 NR Description: auxin-responsive protein IAA2 (Indoleacetic
STSSPRTRTRRRRTRQEEQSTQENTQEGNTKIDIDPKAMAYEKVNELNLKDTELCLGLPGRTEKIKEEQEVSCVKSNNKRLFEETRDEEESTPPTKTQIVGWPPVRSSRKNNNSVSYVKVSMDGAPYLRKIDLKTYKNYPELLKALENMFKVMIGEYCEREGYKGSGFVPTYEDKDGDWMLVGDVPWDMFSSSCKRLRIMKGSDAPALDSSL

SEQ ID NO: 44584 - protein, 174 aa, Arabidopsis thaliana
  peptide (1)..(174): Ceres Seq. ID no. 13575442
  misc_feature (9)..(173): Pfam Name: AUX/IAA family Pfam Description: AUX/IAA family
  misc_feature (8)..(170): Homolog of NCBI NO: 4887014 NR Description: Nt-iaa2.5 deduced protein [Nicotiana tabacum]
  misc_feature (12)..(163): Homolog of NCBI NO: 18071490 NR Description: auxin-induced AUX/IAA1 [Antirrhinum majus]
  misc_feature (7)..(170): Homolog of NCBI NO: 34550779 NR Description: Gbiaa-Re [Gossypium barbadense]
  misc_feature (1)..(170): Homolog of NCBI NO: 99663 NR Description: auxin-induced protein AUX2-11 - Arabidopsis
  misc_feature (1)..(170): Homolog of NCBI NO: 4887012 NR Description: Nt-iaa2.3 deduced protein [Nicotiana tabacum]
  misc_feature (1)..(170): Homolog of NCBI NO: 15239950 NR Description: auxin-responsive protein IAA4 (Indoleacetic
  misc_feature (4)..(168): Homolog of NCBI NO: 15233496 NR Description: auxin-responsive protein IAA1 (Indoleacetic
  misc_feature (4)..(168): Homolog of NCBI NO: 454281 NR Description: auxin-responsive protein
  misc_feature (1)..(174): Homolog of NCBI NO: 2598932 NR Description: auxin-responsive protein IAA2 [Arabidopsis
  misc_feature (1)..(174): Homolog of NCBI NO: 15228939 NR Description: auxin-responsive protein IAA2 (Indoleacetic
MAYEKVNELNLKDTELCLGLPGRTEKIKEEQEVSCVKSNNKRLFEETRDEEESTPPTKTQIVGWPPVRSSRKNNNSVSYVKVSMDGAPYLRKIDLKTYKNYPELLKALENMFKVMIGEYCEREGYKGSGFVPTYEDKDGDWMLVGDVPWDMFSSSCKRLRIMKGSDAPALDSSL

SEQ ID NO: 44585 - DNA, 608 bp, Arabidopsis thaliana
  misc_feature (1)..(608): Ceres Seq. ID no. 12489400
  misc_feature: MA Experiment ID: 20000173 Result: Up-regulated in Transcription
  misc_feature: MA Experiment 20000173 PARAMETER Experiment Name: At_42deg_Heat_P Parameter: Age (day) Value: 14
  misc_feature: MA Experiment 20000173 PARAMETER Experiment Name: At_42deg_Heat_P Parameter: Organism Value: A. thaliana
  misc_feature: MA Experiment 20000173 PARAMETER Experiment Name: At_42deg_Heat_P Parameter: Plant Line Value: WS
  misc_feature: MA Experiment 20000173 PARAMETER Experiment Name: At_42deg_Heat_P Parameter: Temperature (deg C) Value: 42 vs. 22
  misc_feature: MA Experiment 20000173 PARAMETER Experiment Name: At_42deg_Heat_P Parameter: Timepoint (hr) Value: 6
  misc_feature: MA Experiment 20000173 PARAMETER Experiment Name: At_42deg_Heat_P Parameter: Tissue Value: Aerial
  misc_feature: MA Experiment ID: 20000180 Result: Down-regulated in Transcription
  misc_feature: MA Experiment 20000180 PARAMETER Experiment Name: At_Germinating_Seeds_P Parameter: Age (hr) Value: 24 vs. 0
  misc_feature: MA Experiment 20000180 PARAMETER Experiment Name: At_Germinating_Seeds_P Parameter: Tissue Value: Germinating Seeds
  misc_feature: MA Experiment ID: 20000184 Result: Up-regulated in Transcription
  misc_feature: MA Experiment 20000184 PARAMETER Experiment Name: At_Shoots__P Parameter: Age (day) Value: 7
  misc_feature: MA Experiment 20000184 PARAMETER Experiment Name: At_Shoots__P Parameter: Tissue Value: Shoots vs. Whole Plant
  misc_feature: MA Experiment ID: 20000264 Result: Down-regulated in Transcription
  misc_feature: MA Experiment 20000264 PARAMETER Experiment Name: At_Open_Flower_P Parameter: Age (day) Value: 21
  misc_feature: MA Experiment 20000264 PARAMETER Experiment Name: At_Open_Flower_P Parameter: Plant Line Value: WS
  misc_feature: MA Experiment 20000264 PARAMETER Experiment Name: At_Open_Flower_P Parameter: Tissue Value: Open Flower vs. Whole Plant
  misc_feature: MA Experiment ID: 20000439 Result: Down-regulated in Transcription
  misc_feature: MA Experiment 20000439 PARAMETER Experiment Name: At_Roots__P Parameter: Age (day) Value: 14 vs. 21
  misc_feature: MA Experiment 20000439 PARAMETER Experiment Name: At_Roots__P Parameter: Organism Value: A. thaliana
  misc_feature: MA Experiment 20000439 PARAMETER Experiment Name: At_Roots__P Parameter: Tissue Value: Roots vs. Whole Plant
  misc_feature: MA Experiment ID: 20000794 Result: Down-regulated in Transcription
  misc_feature: MA Experiment 20000794 PARAMETER Experiment Name: At_Petals_P Parameter: Age (day) Value: 23-25 days
  misc_feature: MA Experiment 20000794 PARAMETER Experiment Name: At_Petals_P Parameter: Plant Line Value: WS
  misc_feature: MA Experiment 20000794 PARAMETER Experiment Name: At_Petals_P Parameter: Tissue Value: Petals vs. Whole plant
  misc_feature: MA Experiment ID: 20001450 Result: Up-regulated in Transcription
  misc_feature: MA Experiment 20001450 PARAMETER Experiment Name: At_Far-red-induction_P Parameter: Age (day) Value: 7
  misc_feature: MA Experiment 20001450 PARAMETER Experiment Name: At_Far-red-induction_P Parameter: Light Value: Far-red vs. White
  misc_feature: MA Experiment 20001450 PARAMETER Experiment Name: At_Far-red-induction_P Parameter: Organism Value: A. thaliana
  misc_feature: MA Experiment 20001450 PARAMETER Experiment Name: At_Far-red-induction_P Parameter: Plant Line Value: Columbia
  misc_feature: MA Experiment 20001450 PARAMETER Experiment Name: At_Far-red-induction_P Parameter: Timepoint (hr) Value: 8
  misc_feature: MA Experiment 20001450 PARAMETER Experiment Name: At_Far-red-induction_P Parameter: Tissue Value: Whole Plant
  misc_feature: MA Experiment ID: 20001451 Result: Up-regulated in Transcription
  misc_feature: MA Experiment 20001451 PARAMETER Experiment Name: At_Far-red-induction_P Parameter: Age (day) Value: 7
  misc_feature: MA Experiment 20001451 PARAMETER Experiment Name: At_Far-red-induction_P Parameter: Light Value: Far-red vs. White
  misc_feature: MA Experiment 20001451 PARAMETER Experiment Name: At_Far-red-induction_P Parameter: Organism Value: A. thaliana
  misc_feature: MA Experiment 20001451 PARAMETER Experiment Name: At_Far-red-induction_P Parameter: Plant Line Value: Columbia
  misc_feature: MA Experiment 20001451 PARAMETER Experiment Name: At_Far-red-induction_P Parameter: Timepoint (hr) Value: 24
  misc_feature: MA Experiment 20001451 PARAMETER Experiment Name: At_Far-red-induction_P Parameter: Tissue Value: Whole Plant
  misc_feature: MA Experiment ID: 20001560 Result: Up-regulated in Transcription
  misc_feature: MA Experiment 20001560 PARAMETER Experiment Name: At_Drought_Soil_Dry_P Parameter: Age (day) Value: 28
  misc_feature: MA Experiment 20001560 PARAMETER Experiment Name: At_Drought_Soil_Dry_P Parameter: Organism Value: A. thaliana
  misc_feature: MA Experiment 20001560 PARAMETER Experiment Name: At_Drought_Soil_Dry_P Parameter: Plant Line Value: WS
  misc_feature: MA Experiment 20001560 PARAMETER Experiment Name: At_Drought_Soil_Dry_P Parameter: Post Timepoint (hr) Value: None
  misc_feature: MA Experiment 20001560 PARAMETER Experiment Name: At_Drought_Soil_Dry_P Parameter: Post-Treatment Value: None
  misc_feature: MA Experiment 20001560 PARAMETER Experiment Name: At_Drought_Soil_Dry_P Parameter: Timepoint (day) Value: 14
  misc_feature: MA Experiment 20001560 PARAMETER Experiment Name: At_Drought_Soil_Dry_P Parameter: Treatment Value: Drought vs. No Drought
gtttcttcgacagtggcaatgttttcatcttcgattaggttaatcgtaactgggttccaccggactcaacccctaaaatcgccggtaaattctccgagcgtcttcatctccgtacctaaattcttcaactctgagtcaaaatcgacgggaactggttcaagatccgtagcaatgagcagcgttgagaaaaccgggtcggattctggagcaatagagaatcgagcgagcaggatgagagagaagcttcaaaaagagctcgaaccagtggagttagtgatcgaagatgtttcgtatcagcacgctggtcacgccggaatgaaaggtagaaccgacgatgagacgcatttcaatgtgaagatcgtttctaaaggattcgagggaatgaatttggtgaagagacacaggttggtctatcatttgctccgggaagagttggatactggattgcacgctctttctatcgtctccaagacgccgtctgagtctccttctaaagactagtgtactggtactgtttaatgtatcttctgtttctgttatcagagtttctcatcaaactctgttcgattcaaagattgaatttttaccatcaaagtgctctgttttgg

SEQ ID NO: 44586 - protein, 166 aa, Arabidopsis thaliana
  peptide (1)..(166): Ceres Seq. ID no. 12489401
  misc_feature (81)..(162): Pfam Name: BolA-like protein Pfam Description: BolA-like protein
  misc_feature (63)..(161): Homolog of NCBI NO: 28393578 NR Description: unknown protein [Arabidopsis thaliana]
  misc_feature (63)..(161): Homolog of NCBI NO: 15236742 NR Description: putative protein
  misc_feature (7)..(108): Homolog of NCBI NO: 8778331 NR Description: F14J16.3 [Arabidopsis thaliana]
  misc_feature (58)..(166): Homolog of NCBI NO: 18405543 NR Description: Expressed protein
  misc_feature (7)..(135): Homolog of NCBI NO: 8778492 NR Description: F20N2.18 [Arabidopsis thaliana]
VSSTVAMFSSSIRLIVTGFHRTQPLKSPVNSPSVFISVPKFFNSESKSTGTGSRSVAMSSVEKTGSDSGAIENRASRMREKLQKELEPVELVIEDVSYQHAGHAGMKGRTDDETHFNVKIVSKGFEGMNLVKRHRLVYHLLREELDTGLHALSIVSKTPSESPSKD

SEQ ID NO: 44587 - protein, 160 aa, Arabidopsis thaliana
  peptide (1)..(160): Ceres Seq. ID no. 12489402
  misc_feature (75)..(156): Pfam Name: BolA-like protein Pfam Description: BolA-like protein
  misc_feature (57)..(155): Homolog of NCBI NO: 28393578 NR Description: unknown protein [Arabidopsis thaliana]
  misc_feature (57)..(155): Homolog of NCBI NO: 15236742 NR Description: putative protein
  misc_feature (1)..(102): Homolog of NCBI NO: 8778331 NR Description: F14J16.3 [Arabidopsis thaliana]
  misc_feature (52)..(160): Homolog of NCBI NO: 18405543 NR Description: Expressed protein
  misc_feature (1)..(129): Homolog of NCBI NO: 8778492 NR Description: F20N2.18 [Arabidopsis thaliana]
MFSSSIRLIVTGFHRTQPLKSPVNSPSVFISVPKFFNSESKSTGTGSRSVAMSSVEKTGSDSGAIENRASRMREKLQKELEPVELVIEDVSYQHAGHAGMKGRTDDETHFNVKIVSKGFEGMNLVKRHRLVYHLLREELDTGLHALSIVSKTPSESPSKD

SEQ ID NO: 44588 - protein, 109 aa, Arabidopsis thaliana; identical to SEQ ID NO: 36885
  peptide (1)..(109): Ceres Seq. ID no. 12489403
  misc_feature (24)..(105): Pfam Name: BolA-like protein Pfam Description: BolA-like protein
  misc_feature (6)..(104): Homolog of NCBI NO: 28393578 NR Description: unknown protein [Arabidopsis thaliana]
  misc_feature (6)..(104): Homolog of NCBI NO: 15236742 NR Description: putative protein
  misc_feature (1)..(51): Homolog of NCBI NO: 8778331 NR Description: F14J16.3 [Arabidopsis thaliana]
  misc_feature (1)..(109): Homolog of NCBI NO: 18405543 NR Description: Expressed protein
  misc_feature (1)..(78): Homolog of NCBI NO: 8778492 NR Description: F20N2.18 [Arabidopsis thaliana]

SEQ ID NO: 44589 - DNA, 1528 bp, Arabidopsis thaliana
  misc_feature (1)..(1528): Ceres Seq. ID no. 13593371
  misc_feature: MA Experiment ID: 20000185 Result: Down-regulated in Transcription
  misc_feature: MA Experiment 20000185 PARAMETER Experiment Name: At_Roots__P Parameter: Age (day) Value: 7 vs. 21
  misc_feature: MA Experiment 20000185 PARAMETER Experiment Name: At_Roots__P Parameter: Organism Value: A. thaliana
  misc_feature: MA Experiment 20000185 PARAMETER Experiment Name: At_Roots__P Parameter: Tissue Value: Roots vs. Whole Plant
  misc_feature: MA Experiment ID: 20000234 Result: Down-regulated in Transcription
  misc_feature: MA Experiment 20000234 PARAMETER Experiment Name: At_Siliques_P Parameter: Age (day) Value: 21
  misc_feature: MA Experiment 20000234 PARAMETER Experiment Name: At_Siliques_P Parameter: Organism Value: A. thaliana
  misc_feature: MA Experiment 20000234 PARAMETER Experiment Name: At_Siliques_P Parameter: Plant Line Value: WS
  misc_feature: MA Experiment 20000234 PARAMETER Experiment Name: At_Siliques_P Parameter: Tissue Value: Less Than 5mm Siliques vs. Whole Plant
  misc_feature: MA Experiment ID: 20000264 Result: Down-regulated in Transcription
  misc_feature: MA Experiment 20000264 PARAMETER Experiment Name: At_Open_Flower_P Parameter: Age (day) Value: 21
  misc_feature: MA Experiment 20000264 PARAMETER Experiment Name: At_Open_Flower_P Parameter: Plant Line Value: WS
  misc_feature: MA Experiment 20000264 PARAMETER Experiment Name: At_Open_Flower_P Parameter: Tissue Value: Open Flower vs. Whole Plant
  misc_feature: MA Experiment ID: 20000437 Result: Up-regulated in Transcription
  misc_feature: MA Experiment 20000437 PARAMETER Experiment Name: At_Drought_P Parameter: Age (day) Value: 8
  misc_feature: MA Experiment 20000437 PARAMETER Experiment Name: At_Drought_P Parameter: Organism Value: A. thaliana
  misc_feature: MA Experiment 20000437 PARAMETER Experiment Name: At_Drought_P Parameter: Plant Line Value: WS
  misc_feature: MA Experiment 20000437 PARAMETER Experiment Name: At_Drought_P Parameter: Timepoint (hr) Value: 24
  misc_feature: MA Experiment 20000437 PARAMETER Experiment Name: At_Drought_P Parameter: Tissue Value: Whole Plant
  misc_feature: MA Experiment 20000437 PARAMETER Experiment Name: At_Drought_P Parameter: Treatment Value: Drought vs. No Drought
  misc_feature: MA Experiment ID: 20000439 Result: Down-regulated in Transcription
  misc_feature: MA Experiment 20000439 PARAMETER Experiment Name: At_Roots__P Parameter: Age (day) Value: 14 vs. 21
  misc_feature: MA Experiment 20000439 PARAMETER Experiment Name: At_Roots__P Parameter: Organism Value: A. thaliana
  misc_feature: MA Experiment 20000439 PARAMETER Experiment Name: At_Roots__P Parameter: Tissue Value: Roots vs. Whole Plant
  misc_feature: MA Experiment ID: 20000495 Result: Down-regulated in Transcription
  misc_feature: MA Experiment 20000495 PARAMETER Experiment Name: At_Guard_Cells_P Parameter: Harvest Date Value: 8/2/2002
  misc_feature: MA Experiment 20000495 PARAMETER Experiment Name: At_Guard_Cells_P Parameter: Organism Value: A. thaliana
  misc_feature: MA Experiment 20000495 PARAMETER Experiment Name: At_Guard_Cells_P Parameter: Tissue Value: Guard Cells vs. Leaves
  misc_feature: MA Experiment ID: 20000496 Result: Down-regulated in Transcription
  misc_feature: MA Experiment 20000496 PARAMETER Experiment Name: At_Guard_Cells_P Parameter: Harvest Date Value: 7/19/2002
  misc_feature: MA Experiment 20000496 PARAMETER Experiment Name: At_Guard_Cells_P Parameter: Organism Value: Canola
  misc_feature: MA Experiment 20000496 PARAMETER Experiment Name: At_Guard_Cells_P Parameter: Tissue Value: Guard Cells vs. Leaves
  misc_feature: MA Experiment ID: 20000794 Result: Down-regulated in Transcription
  misc_feature: MA Experiment 20000794 PARAMETER Experiment Name: At_Petals_P Parameter: Age (day) Value: 23-25 days
  misc_feature: MA Experiment 20000794 PARAMETER Experiment Name: At_Petals_P Parameter: Plant Line Value: WS
  misc_feature: MA Experiment 20000794 PARAMETER Experiment Name: At_Petals_P Parameter: Tissue Value: Petals vs. Whole plant
  misc_feature: MA Experiment ID: 20001911 Result: Down-regulated in Transcription
  misc_feature: MA Experiment 20001911 PARAMETER Experiment Name: At_Drought_Reproduction_P Parameter: Age (day) Value: 40
  misc_feature: MA Experiment 20001911 PARAMETER Experiment Name: At_Drought_Reproduction_P Parameter: Organism Value: A. thaliana
  misc_feature: MA Experiment 20001911 PARAMETER Experiment Name: At_Drought_Reproduction_P Parameter: Plant Line Value: WS
  misc_feature: MA Experiment 20001911 PARAMETER Experiment Name: At_Drought_Reproduction_P Parameter: Timepoint (day) Value: 10
  misc_feature: MA Experiment 20001911 PARAMETER Experiment Name: At_Drought_Reproduction_P Parameter: Tissue Value: Flowers
  misc_feature: MA Experiment 20001911 PARAMETER Experiment Name: At_Drought_Reproduction_P Parameter: Treatment Value: Drought vs. No Drought
ttgaagacagagagagaaagtgagtgtgtctgtgagggcgaatcaatgtctctgctttctccagaagatgatatttactttttgtgtcaattagctgtataacgtcttcttcacataaaacaagaacactccacttactaaaaaaaataattatttcttcttgaagagtggaattctttctcgaatcttagaaaattccatttagaactaaagaagagagagagatccagtttctcgtcccagttaagctatggccatgttcaaaaccttatcttttttgttccttttgtgctttcagatacatggaacggtggctgcagatgaaaattccttgttttcattcaatggttttgtaaaatctccgagctttgacaagagggttgctctgtttggagattcgaagctggtcaatgacagttctttgattcagctgactgactcagtgactcgaagcgttggtcgagtcgtttacaagaaacccatcaatcttttcaaaggtaaacagaggaattcgagatctttctctactcacttctcgttttcttccatgtccaacgagattggtgatgatgtcttggcttttgtaatggttccatctagtttggatcttagtctgtttggtaagaaggacaacagttcctctgctttaggttttttatcacaatatgcaaagaacgagacagttgttgctgtcgagtttggtatctccaggacaggaaacagtgcaagaattttagttggtagacctgaatctgctgaaattagaaacctttcgtttgtgggtgacttgatgatggacaatggaaggactctgagctgtatgattgagtatgaggcaagttctaagagaatgatggttcgattcagaaaatctggttcggtaaagctgtttgatccgttcttctctttctcggtagacttggccaagttatggaaaggtggtgaagtcactgtgggtttaagctctgccaatgggaactcttcttccaaggcacattttctccattcatggagatttgaaataagacatcctcctccgatgtggatgcattcagtgccgcttgaaccgaatgaagtttcaaaggaggaggaaaatggtcgagggagaagtgagtgtacgcggaaaatgcttggtgctttgatctttggtgcagcttgtggagccttaggggcactgctgggtttgtatctctggacgatatgccgtgttaggcggtcaatggccgtggttccagaggaatgtgctattgaacaaggcaagaagtagtgagtagtttggttttggtgttgaaaagttgtcttgtgttgtggtgtaaatttaggaactttctcttcttcttcttccctcttgtttacttgatcgttctttagtgattcttatgtctgtttacttagttgcaggttttgtgaaatgacttttcacatgtaaaatctaaactgtgagaagatgtaagcttattgatatgttgcaaattaacttagttgttcatgttgttcttgatccatttggattatgagctgtgcattt

SEQ ID NO: 44590 - protein, 338 aa, Arabidopsis thaliana
  peptide (1)..(338): Ceres Seq. ID no. 13593372
  misc_feature (48)..(256): Homolog of NCBI NO: 22773748 NR Description: lectin [Glechoma hederacea]
  misc_feature (1)..(258): Homolog of NCBI NO: 15227054 NR Description: receptor lectin kinase, putative [Arabidopsis
  misc_feature (10)..(256): Homolog of NCBI NO: 400179 NR Description: LECTIN 1 PRECURSOR
  misc_feature (21)..(256): Homolog of NCBI NO: 1755066 NR Description: lectin precursor
  misc_feature (1)..(335): Homolog of NCBI NO: 21593676 NR Description: lectin-like protein [Arabidopsis thaliana]
  misc_feature (1)..(335): Homolog of NCBI NO: 15240888 NR Description: lectin - like protein [Arabidopsis thaliana]
  misc_feature (39)..(333): Homolog of NCBI NO: 5923683 NR Description: putative lectin [Arabidopsis thaliana]
  misc_feature (1)..(338): Homolog of NCBI NO: 22330926 NR Description: lectin -related protein [Arabidopsis thaliana]
MAMFKTLSFLFLLCFQIHGTVAADENSLFSFNGFVKSPSFDKRVALFGDSKLVNDSSLIQLTDSVTRSVGRVVYKKPINLFKGKQRNSRSFSTHFSFSSMSNEIGDDVLAFVMVPSSLDLSLFGKKDNSSSALGFLSQYAKNETVVAVEFGISRTGNSARILVGRPESAEIRNLSFVGDLMMDNGRTLSCMIEYEASSKRMMVRFRKSGSVKLFDPFFSFSVDLAKLWKGGEVTVGLSSANGNSSSKAHFLHSWRFEIRHPPPMWMHSVPLEPNEVSKEEENGRGRSECTRKMLGALIFGAACGALGALLGLYLWTICRVRRSMAVVPEECAIEQGKK

SEQ ID NO: 44591 - protein, 336 aa, Arabidopsis thaliana
  peptide (1)..(336): Ceres Seq. ID no. 13593373
  misc_feature (46)..(254): Homolog of NCBI NO: 22773748 NR Description: lectin [Glechoma hederacea]
  misc_feature (1)..(256): Homolog of NCBI NO: 15227054 NR Description: receptor lectin kinase, putative [Arabidopsis
  misc_feature (8)..(254): Homolog of NCBI NO: 400179 NR Description: LECTIN 1 PRECURSOR
  misc_feature (19)..(254): Homolog of NCBI NO: 1755066 NR Description: lectin precursor
  misc_feature (1)..(333): Homolog of NCBI NO: 21593676 NR Description: lectin-like protein [Arabidopsis thaliana]
  misc_feature (1)..(333): Homolog of NCBI NO: 15240888 NR Description: lectin - like protein [Arabidopsis thaliana]
  misc_feature (37)..(331): Homolog of NCBI NO: 5923683 NR Description: putative lectin [Arabidopsis thaliana]
  misc_feature (1)..(336): Homolog of NCBI NO: 22330926 NR Description: lectin -related protein [Arabidopsis thaliana]
MFKTLSFLFLLCFQIHGTVAADENSLFSFNGFVKSPSFDKRVALFGDSKLVNDSSLIQLTDSVTRSVGRVVYKKPINLFKGKQRNSRSFSTHFSFSSMSNEIGDDVLAFVMVPSSLDLSLFGKKDNSSSALGFLSQYAKNETVVAVEFGISRTGNSARILVGRPESAEIRNLSFVGDLMMDNGRTLSCMIEYEASSKRMMVRFRKSGSVKLFDPFFSFSVDLAKLWKGGEVTVGLSSANGNSSSKAHFLHSWRFEIRHPPPMWMHSVPLEPNEVSKEEENGRGRSECTRKMLGALIFGAACGALGALLGLYLWTICRVRRSMAVVPEECAIEQGKK

SEQ ID NO: 44592 - protein, 239 aa, Arabidopsis thaliana
  peptide (1)..(239): Ceres Seq. ID no. 13593374
  misc_feature (1)..(157): Homolog of NCBI NO: 22773748 NR Description: lectin [Glechoma hederacea]
  misc_feature (1)..(159): Homolog of NCBI NO: 15227054 NR Description: receptor lectin kinase, putative [Arabidopsis
  misc_feature (1)..(157): Homolog of NCBI NO: 400179 NR Description: LECTIN 1 PRECURSOR
  misc_feature (1)..(157): Homolog of NCBI NO: 1755066 NR Description: lectin precursor
  misc_feature (1)..(236): Homolog of NCBI NO: 21593676 NR Description: lectin-like protein [Arabidopsis thaliana]
  misc_feature (1)..(236): Homolog of NCBI NO: 15240888 NR Description: lectin - like protein [Arabidopsis thaliana]
  misc_feature (1)..(234): Homolog of NCBI NO: 5923683 NR Description: putative lectin [Arabidopsis thaliana]
  misc_feature (1)..(239): Homolog of NCBI NO: 22330926 NR Description: lectin -related protein [Arabidopsis thaliana]
MSNEIGDDVLAFVMVPSSLDLSLFGKKDNSSSALGFLSQYAKNETVVAVEFGISRTGNSARILVGRPESAEIRNLSFVGDLMMDNGRTLSCMIEYEASSKRMMVRFRKSGSVKLFDPFFSFSVDLAKLWKGGEVTVGLSSANGNSSSKAHFLHSWRFEIRHPPPMWMHSVPLEPNEVSKEEENGRGRSECTRKMLGALIFGAACGALGALLGLYLWTICRVRRSMAVVPEECAIEQGKK

SEQ ID NO: 44593 - DNA, 1116 bp, Arabidopsis thaliana; identical to SEQ ID NO: 23062
  misc_feature (1)..(1116): Ceres Seq. ID no. 13509194
  misc_feature: MA Experiment ID: 108434 Result: Up-regulated in Transcription
  misc_feature: MA Experiment 108434 PARAMETER Experiment Name: At_Root_Tips_cDNA_P Parameter: Tissue Value: Root Tips
  misc_feature: MA Experiment ID: 108461 Result: Up-regulated in Transcription
  misc_feature: MA Experiment 108461 PARAMETER Experiment Name: At_Germinating_Seeds_cDNA_P Parameter: Age (day) Value: 1 vs. 0
  misc_feature: MA Experiment 108461 PARAMETER Experiment Name: At_Germinating_Seeds_cDNA_P Parameter: Tissue Value: Germinating Seeds
  misc_feature: MA Experiment ID: 108501 Result: Down-regulated in Transcription
  misc_feature: MA Experiment 108501 PARAMETER Experiment Name: At_ap2_floral_buds_cDNA_P Parameter: Plant Line Value: ap2 (Ler.)
  misc_feature: MA Experiment 108501 PARAMETER Experiment Name: At_ap2_floral_buds_cDNA_P Parameter: Tissue Value: Closed Flower
  misc_feature: MA Experiment ID: 108561 Result: Down-regulated in Transcription
  misc_feature: MA Experiment 108561 PARAMETER Experiment Name: At_100uM_ABA_cDNA_P Parameter: Timepoint (hr) Value: 6
  misc_feature: MA Experiment 108561 PARAMETER Experiment Name: At_100uM_ABA_cDNA_P Parameter: Tissue Value: Aerial
  misc_feature: MA Experiment 108561 PARAMETER Experiment Name: At_100uM_ABA_cDNA_P Parameter: Treatment Value: 100uM ABA vs. No Treatment
  misc_feature: MA Experiment ID: 108577 Result: Down-regulated in Transcription
  misc_feature: MA Experiment 108577 PARAMETER Experiment Name: At_42deg_Heat_cDNA_P Parameter: Temperature (deg C) Value: 42 vs. 22
  misc_feature: MA Experiment 108577 PARAMETER Experiment Name: At_42deg_Heat_cDNA_P Parameter: Timepoint (hr) Value: 6
  misc_feature: MA Experiment 108577 PARAMETER Experiment Name: At_42deg_Heat_cDNA_P Parameter: Tissue Value: Aerial
  misc_feature: MA Experiment ID: 108585 Result: Down-regulated in Transcription
  misc_feature: MA Experiment 108585 PARAMETER Experiment Name: At_5mM_NaNP_cDNA_P Parameter: Timepoint (hr) Value: 6
  misc_feature: MA Experiment 108585 PARAMETER Experiment Name: At_5mM_NaNP_cDNA_P Parameter: Tissue Value: Aerial
  misc_feature: MA Experiment 108585 PARAMETER Experiment Name: At_5mM_NaNP_cDNA_P Parameter: Treatment Value: null
  misc_feature: MA Experiment ID: 108595 Result: Down-regulated in Transcription
  misc_feature: MA Experiment 108595 PARAMETER Experiment Name: At_Ler-pi_Ovule_cDNA_P Parameter: Plant Line Value: null
  misc_feature: MA Experiment ID: 108609 Result: Down-regulated in Transcription
  misc_feature: MA Experiment 108609 PARAMETER Experiment Name: At_100uM_ABA_cDNA_P Parameter: Timepoint (hr) Value: 24
  misc_feature: MA Experiment 108609 PARAMETER Experiment Name: At_100uM_ABA_cDNA_P Parameter: Tissue Value: Aerial
  misc_feature: MA Experiment 108609 PARAMETER Experiment Name: At_100uM_ABA_cDNA_P Parameter: Treatment Value: 100uM ABA vs. No Treatment
  misc_feature: MA Experiment ID: 20000111 Result: Down-regulated in Transcription
  misc_feature: MA Experiment 20000111 PARAMETER Experiment Name: At_42deg_Heat_cDNA_P Parameter: Temperature (deg C) Value: 42 vs. 22
  misc_feature: MA Experiment 20000111 PARAMETER Experiment Name: At_42deg_Heat_cDNA_P Parameter: Timepoint (hr) Value: 6
  misc_feature: MA Experiment 20000111 PARAMETER Experiment Name: At_42deg_Heat_cDNA_P Parameter: Tissue Value: Aerial
  misc_feature: MA Experiment ID: 20000113 Result: Down-regulated in Transcription
  misc_feature: MA Experiment 20000113 PARAMETER Experiment Name: At_42deg_Heat_cDNA_P Parameter: Temperature (deg C) Value: 42 vs. 22
  misc_feature: MA Experiment 20000113 PARAMETER Experiment Name: At_42deg_Heat_cDNA_P Parameter: Timepoint (hr) Value: 8
  misc_feature: MA Experiment 20000113 PARAMETER Experiment Name: At_42deg_Heat_cDNA_P Parameter: Tissue Value: Aerial
  misc_feature: MA Experiment ID: 20000173 Result: Down-regulated in Transcription
  misc_feature: MA Experiment 20000173 PARAMETER Experiment Name: At_42deg_Heat_P Parameter: Age (day) Value: 14
  misc_feature: MA Experiment 20000173 PARAMETER Experiment Name: At_42deg_Heat_P Parameter: Organism Value: A. thaliana
  misc_feature: MA Experiment 20000173 PARAMETER Experiment Name: At_42deg_Heat_P Parameter: Plant Line Value: WS
  misc_feature: MA Experiment 20000173 PARAMETER Experiment Name: At_42deg_Heat_P Parameter: Temperature (deg C) Value: 42 vs. 22
  misc_feature: MA Experiment 20000173 PARAMETER Experiment Name: At_42deg_Heat_P Parameter: Timepoint (hr) Value: 6
  misc_feature: MA Experiment 20000173 PARAMETER Experiment Name: At_42deg_Heat_P Parameter: Tissue Value: Aerial
  misc_feature: MA Experiment ID: 20000185 Result: Down-regulated in Transcription
  misc_feature: MA Experiment 20000185 PARAMETER Experiment Name: At_Roots__P Parameter: Age (day) Value: 7 vs. 21
  misc_feature: MA Experiment 20000185 PARAMETER Experiment Name: At_Roots__P Parameter: Organism Value: A. thaliana
  misc_feature: MA Experiment 20000185 PARAMETER Experiment Name: At_Roots__P Parameter: Tissue Value: Roots vs. Whole Plant
  misc_feature: MA Experiment ID: 20000437 Result: Down-regulated in Transcription
  misc_feature: MA Experiment 20000437 PARAMETER Experiment Name: At_Drought_P Parameter: Age (day) Value: 8
  misc_feature: MA Experiment 20000437 PARAMETER Experiment Name: At_Drought_P Parameter: Organism Value: A. thaliana
  misc_feature: MA Experiment 20000437 PARAMETER Experiment Name: At_Drought_P Parameter: Plant Line Value: WS
  misc_feature: MA Experiment 20000437 PARAMETER Experiment Name: At_Drought_P Parameter: Timepoint (hr) Value: 24
  misc_feature: MA Experiment 20000437 PARAMETER Experiment Name: At_Drought_P Parameter: Tissue Value: Whole Plant
  misc_feature: MA Experiment 20000437 PARAMETER Experiment Name: At_Drought_P Parameter: Treatment Value: Drought vs. No Drought
  misc_feature: MA Experiment ID: 20000453 Result: Down-regulated in Transcription
  misc_feature: MA Experiment 20000453 PARAMETER Experiment Name: At_100uM_ABA_P Parameter: Age (day) Value: 15
  misc_feature: MA Experiment 20000453 PARAMETER Experiment Name: At_100uM_ABA_P Parameter: Organism Value: A. thaliana
  misc_feature: MA Experiment 20000453 PARAMETER Experiment Name: At_100uM_ABA_P Parameter: Plant Line Value: WS
  misc_feature: MA Experiment 20000453 PARAMETER Experiment Name: At_100uM_ABA_P Parameter: Timepoint (hr) Value: 24
  misc_feature: MA Experiment 20000453 PARAMETER Experiment Name: At_100uM_ABA_P Parameter: Tissue Value: Aerial
  misc_feature: MA Experiment 20000453 PARAMETER Experiment Name: At_100uM_ABA_P Parameter: Treatment Value: 100uM ABA vs. No Treatment
  misc_feature: MA Experiment ID: 20000794 Result: Down-regulated in Transcription
  misc_feature: MA Experiment 20000794 PARAMETER Experiment Name: At_Petals_P Parameter: Age (day) Value: 23-25 days
  misc_feature: MA Experiment 20000794 PARAMETER Experiment Name: At_Petals_P Parameter: Plant Line Value: WS
  misc_feature: MA Experiment 20000794 PARAMETER Experiment Name: At_Petals_P Parameter: Tissue Value: Petals vs. Whole plant
  misc_feature: MA Experiment ID: 20001247 Result: Down-regulated in Transcription
  misc_feature: MA Experiment 20001247 PARAMETER Experiment Name: At_Far-red-induction_P Parameter: Age (day) Value: 7
  misc_feature: MA Experiment 20001247 PARAMETER Experiment Name: At_Far-red-induction_P Parameter: Light Value: Far-red vs. White
  misc_feature: MA Experiment 20001247 PARAMETER Experiment Name: At_Far-red-induction_P Parameter: Organism Value: A. thaliana
  misc_feature: MA Experiment 20001247 PARAMETER Experiment Name: At_Far-red-induction_P Parameter: Plant Line Value: Columbia
  misc_feature: MA Experiment 20001247 PARAMETER Experiment Name: At_Far-red-induction_P Parameter: Timepoint (hr) Value: 1
  misc_feature: MA Experiment 20001247 PARAMETER Experiment Name: At_Far-red-induction_P Parameter: Tissue Value: Whole Plant
  misc_feature: MA Experiment ID: 20001451 Result: Down-regulated in Transcription
  misc_feature: MA Experiment 20001451 PARAMETER Experiment Name: At_Far-red-induction_P Parameter: Age (day) Value: 7
  misc_feature: MA Experiment 20001451 PARAMETER Experiment Name: At_Far-red-induction_P Parameter: Light Value: Far-red vs. White
  misc_feature: MA Experiment 20001451 PARAMETER Experiment Name: At_Far-red-induction_P Parameter: Organism Value: A. thaliana
  misc_feature: MA Experiment 20001451 PARAMETER Experiment Name: At_Far-red-induction_P Parameter: Plant Line Value: Columbia
  misc_feature: MA Experiment 20001451 PARAMETER Experiment Name: At_Far-red-induction_P Parameter: Timepoint (hr) Value: 24
  misc_feature: MA Experiment 20001451 PARAMETER Experiment Name: At_Far-red-induction_P Parameter: Tissue Value: Whole Plant
  misc_feature: MA Experiment ID: 20001458 Result: Up-regulated in Transcription
  misc_feature: MA Experiment 20001458 PARAMETER Experiment Name: At_50mM_NH4NO3_L-to-H_P Parameter: Age (day) Value: Undefined
  misc_feature: MA Experiment 20001458 PARAMETER Experiment Name: At_50mM_NH4NO3_L-to-H_P Parameter: Organism Value: Undefined
  misc_feature: MA Experiment 20001458 PARAMETER Experiment Name: At_50mM_NH4NO3_L-to-H_P Parameter: Plant Line Value: Undefined
  misc_feature: MA Experiment 20001458 PARAMETER Experiment Name: At_50mM_NH4NO3_L-to-H_P Parameter: Timepoint (hr) Value: 2
  misc_feature: MA Experiment 20001458 PARAMETER Experiment Name: At_50mM_NH4NO3_L-to-H_P Parameter: Tissue Value: Siliques
  misc_feature: MA Experiment 20001458 PARAMETER Experiment Name: At_50mM_NH4NO3_L-to-H_P Parameter: Treatment Value: 50mM NH4NO3 vs. 100mM Manitol
  misc_feature: MA Experiment ID: 20001557 Result: Down-regulated in Transcription
  misc_feature: MA Experiment 20001557 PARAMETER Experiment Name: At_Drought_Soil_Dry_P Parameter: Age (day) Value: 27
  misc_feature: MA Experiment 20001557 PARAMETER Experiment Name: At_Drought_Soil_Dry_P Parameter: Organism Value: A. thaliana
  misc_feature: MA Experiment 20001557 PARAMETER Experiment Name: At_Drought_Soil_Dry_P Parameter: Plant Line Value: WS
  misc_feature: MA Experiment 20001557 PARAMETER Experiment Name: At_Drought_Soil_Dry_P Parameter: Post Timepoint (hr) Value: 3
  misc_feature: MA Experiment 20001557 PARAMETER Experiment Name: At_Drought_Soil_Dry_P Parameter: Post-Treatment Value: Re-Water vs. No Drought
  misc_feature: MA Experiment 20001557 PARAMETER Experiment Name: At_Drought_Soil_Dry_P Parameter: Timepoint (day) Value: 13
  misc_feature: MA Experiment 20001557 PARAMETER Experiment Name: At_Drought_Soil_Dry_P Parameter: Treatment Value: Drought vs. No Drought
  misc_feature: MA Experiment ID: 20001757 Result: Up-regulated in Transcription
  misc_feature: MA Experiment 20001757 PARAMETER Experiment Name: At_50mM_NH4NO3_L-to-H_P Parameter: Timepoint (hr) Value: 6
  misc_feature: MA Experiment 20001757 PARAMETER Experiment Name: At_50mM_NH4NO3_L-to-H_P Parameter: Tissue Value: Leaf
  misc_feature: MA Experiment 20001757 PARAMETER Experiment Name: At_50mM_NH4NO3_L-to-H_P Parameter: Treatment Value: 50mM NH4NO3 vs 100mM Mannitol
  misc_feature: MA Experiment ID: 20001904 Result: Down-regulated in Transcription
  misc_feature: MA Experiment 20001904 PARAMETER Experiment Name: At_Drought_Reproduction_P Parameter: Age (day) Value: 37
  misc_feature: MA Experiment 20001904 PARAMETER Experiment Name: At_Drought_Reproduction_P Parameter: Organism Value: A. thaliana
  misc_feature: MA Experiment 20001904 PARAMETER Experiment Name: At_Drought_Reproduction_P Parameter: Plant Line Value: WS
  misc_feature: MA Experiment 20001904 PARAMETER Experiment Name: At_Drought_Reproduction_P Parameter: Timepoint (day) Value: 7
  misc_feature: MA Experiment 20001904 PARAMETER Experiment Name: At_Drought_Reproduction_P Parameter: Tissue Value: Rosettes
  misc_feature: MA Experiment 20001904 PARAMETER Experiment Name: At_Drought_Reproduction_P Parameter: Treatment Value: Drought vs. No Drought
  misc_feature: MA Experiment ID: 20001906 Result: Down-regulated in Transcription
  misc_feature: MA Experiment 20001906 PARAMETER Experiment Name: At_Drought_Reproduction_P Parameter: Age (day) Value: 35
  misc_feature: MA Experiment 20001906 PARAMETER Experiment Name: At_Drought_Reproduction_P Parameter: Organism Value: A. thaliana
  misc_feature: MA Experiment 20001906 PARAMETER Experiment Name: At_Drought_Reproduction_P Parameter: Plant Line Value: WS
  misc_feature: MA Experiment 20001906 PARAMETER Experiment Name: At_Drought_Reproduction_P Parameter: Timepoint (day) Value: 5
  misc_feature: MA Experiment 20001906 PARAMETER Experiment Name: At_Drought_Reproduction_P Parameter: Tissue Value: Siliques
  misc_feature: MA Experiment 20001906 PARAMETER Experiment Name: At_Drought_Reproduction_P Parameter: Treatment Value: Drought vs. No Drought
  misc_feature: MA Experiment ID: 20001908 Result: Down-regulated in Transcription
  misc_feature: MA Experiment 20001908 PARAMETER Experiment Name: At_Drought_Reproduction_P Parameter: Age (day) Value: 40
  misc_feature: MA Experiment 20001908 PARAMETER Experiment Name: At_Drought_Reproduction_P Parameter: Organism Value: A. thaliana
  misc_feature: MA Experiment 20001908 PARAMETER Experiment Name: At_Drought_Reproduction_P Parameter: Plant Line Value: WS
  misc_feature: MA Experiment 20001908 PARAMETER Experiment Name: At_Drought_Reproduction_P Parameter: Timepoint (day) Value: 10
  misc_feature: MA Experiment 20001908 PARAMETER Experiment Name: At_Drought_Reproduction_P Parameter: Tissue Value: Siliques
  misc_feature: MA Experiment 20001908 PARAMETER Experiment Name: At_Drought_Reproduction_P Parameter: Treatment Value: Drought vs. No Drought

SEQ ID NO: 44594 - protein, 307 aa, Arabidopsis thaliana; identical to SEQ ID NO: 23063
  peptide (1)..(307): Ceres Seq. ID no. 13509195
  misc_feature (46)..(305): Pfam Name: Aldose 1-epimerase Pfam Description: Aldose 1-epimerase
  misc_feature (46)..(305): Pfam Name: Aldose 1-epimerase Pfam Description: Aldose 1-epimerase
  misc_feature (40)..(306): Homolog of NCBI NO: 21593295 NR Description: possible apospory-associated like protein
  misc_feature (40)..(307): Homolog of NCBI NO: 18395868 NR Description: aldose 1-epimerase family [Arabidopsis thaliana]
  misc_feature (40)..(307): Homolog of NCBI NO: 16612258 NR Description: AT3g01590/F4P13_13 [Arabidopsis thaliana]
  misc_feature (36)..(287): Homolog of NCBI NO: 19387263 NR Description: putative apospory-associated protein C
  misc_feature (38)..(279): Homolog of NCBI NO: 40253263 NR Description: putative Aldose 1-epimerase
  misc_feature (40)..(306): Homolog of NCBI NO: 21593295 NR Description: possible apospory-associated like protein
  misc_feature (40)..(307): Homolog of NCBI NO: 16612258 NR Description: AT3g01590/F4P13_13 [Arabidopsis thaliana]
  misc_feature (38)..(279): Homolog of NCBI NO: 40253263 NR Description: putative Aldose 1-epimerase
  misc_feature (1)..(307): Homolog of NCBI NO: 15240009 NR Description: aldose 1-epimerase family [Arabidopsis thaliana]
  misc_feature (36)..(306): Homolog of NCBI NO: 6970044 NR Description: apospory-associated protein C; APOC
  misc_feature (36)..(279): Homolog of NCBI NO: 38344152 NR Description: OSJNBa0041A02.19 [Oryza sativa (japonica
  misc_feature (29)..(287): Homolog of NCBI NO: 15242099 NR Description: aldose 1-epimerase family [Arabidopsis thaliana]
  misc_feature (45)..(279): Homolog of NCBI NO: 2501555 NR Description: POSSIBLE APOSPORY-ASSOCIATED PROTEIN C
  misc_feature (36)..(287): Homolog of NCBI NO: 19387263 NR Description: putative apospory-associated protein C
  misc_feature (40)..(307): Homolog of NCBI NO: 18395868 NR Description: aldose 1-epimerase family [Arabidopsis thaliana]
  misc_feature (45)..(279): Homolog of NCBI NO: 2501555 NR Description: POSSIBLE APOSPORY-ASSOCIATED PROTEIN C
  misc_feature (29)..(287): Homolog of NCBI NO: 15242099 NR Description: aldose 1-epimerase family [Arabidopsis thaliana]
  misc_feature (36)..(279): Homolog of NCBI NO: 38344152 NR Description: OSJNBa0041A02.19 [Oryza sativa (japonica
  misc_feature (36)..(306): Homolog of NCBI NO: 6970044 NR Description: apospory-associated protein C; APOC
  misc_feature (1)..(307): Homolog of NCBI NO: 15240009 NR Description: aldose 1-epimerase family [Arabidopsis thaliana]

SEQ ID NO: 44595 - protein, 279 aa, Arabidopsis thaliana; identical to SEQ ID NO: 23064
  peptide (1)..(279): Ceres Seq. ID no. 13509196
  misc_feature (18)..(277): Pfam Name: Aldose 1-epimerase Pfam Description: Aldose 1-epimerase
  misc_feature (18)..(277): Pfam Name: Aldose 1-epimerase Pfam Description: Aldose 1-epimerase
  misc_feature (12)..(278): Homolog of NCBI NO: 21593295 NR Description: possible apospory-associated like protein
  misc_feature (12)..(279): Homolog of NCBI NO: 18395868 NR Description: aldose 1-epimerase family [Arabidopsis thaliana]
  misc_feature (12)..(279): Homolog of NCBI NO: 16612258 NR Description: AT3g01590/F4P13_13 [Arabidopsis thaliana]
  misc_feature (8)..(259): Homolog of NCBI NO: 19387263 NR Description: putative apospory-associated protein C
  misc_feature (10)..(251): Homolog of NCBI NO: 40253263 NR Description: putative Aldose 1-epimerase
  misc_feature (12)..(279): Homolog of NCBI NO: 18395868 NR Description: aldose 1-epimerase family [Arabidopsis thaliana]
  misc_feature (8)..(259): Homolog of NCBI NO: 19387263 NR Description: putative apospory-associated protein C
  misc_feature (1)..(279): Homolog of NCBI NO: 15240009 NR Description: aldose 1-epimerase family [Arabidopsis thaliana]
  misc_feature (8)..(278): Homolog of NCBI NO: 6970044 NR Description: apospory-associated protein C; APOC
  misc_feature (8)..(251): Homolog of NCBI NO: 38344152 NR Description: OSJNBa0041A02.19 [Oryza sativa (japonica
  misc_feature (1)..(259): Homolog of NCBI NO: 15242099 NR Description: aldose 1-epimerase family [Arabidopsis thaliana]
  misc_feature (17)..(251): Homolog of NCBI NO: 2501555 NR Description: POSSIBLE APOSPORY-ASSOCIATED PROTEIN C
  misc_feature (10)..(251): Homolog of NCBI NO: 40253263 NR Description: putative Aldose 1-epimerase
  misc_feature (12)..(279): Homolog of NCBI NO: 16612258 NR Description: AT3g01590/F4P13_13 [Arabidopsis thaliana]
  misc_feature (12)..(278): Homolog of NCBI NO: 21593295 NR Description: possible apospory-associated like protein
  misc_feature (17)..(251): Homolog of NCBI NO: 2501555 NR Description: POSSIBLE APOSPORY-ASSOCIATED PROTEIN C
  misc_feature (1)..(259): Homolog of NCBI NO: 15242099 NR Description: aldose 1-epimerase family [Arabidopsis thaliana]
  misc_feature (8)..(251): Homolog of NCBI NO: 38344152 NR Description: OSJNBa0041A02.19 [Oryza sativa (japonica
  misc_feature (8)..(278): Homolog of NCBI NO: 6970044 NR Description: apospory-associated protein C; APOC
  misc_feature (1)..(279): Homolog of NCBI NO: 15240009 NR Description: aldose 1-epimerase family [Arabidopsis thaliana]

SEQ ID NO: 44596 - protein, 190 aa, Arabidopsis thaliana; identical to SEQ ID NO: 23065
  peptide (1)..(190): Ceres Seq. ID no. 13509197
  misc_feature (1)..(188): Pfam Name: Aldose 1-epimerase Pfam Description: Aldose 1-epimerase
  misc_feature (1)..(188): Pfam Name: Aldose 1-epimerase Pfam Description: Aldose 1-epimerase
  misc_feature (1)..(189): Homolog of NCBI NO: 21593295 NR Description: possible apospory-associated like protein
  misc_feature (1)..(190): Homolog of NCBI NO: 18395868 NR Description: aldose 1-epimerase family [Arabidopsis thaliana]
  misc_feature (1)..(190): Homolog of NCBI NO: 16612258 NR Description: AT3g01590/F4P13_13 [Arabidopsis thaliana]
  misc_feature (1)..(170): Homolog of NCBI NO: 19387263 NR Description: putative apospory-associated protein C
  misc_feature (1)..(162): Homolog of NCBI NO: 40253263 NR Description: putative Aldose 1-epimerase
  misc_feature (1)..(189): Homolog of NCBI NO: 21593295 NR Description: possible apospory-associated like protein
  misc_feature (1)..(190): Homolog of NCBI NO: 16612258 NR Description: AT3g01590/F4P13_13 [Arabidopsis thaliana]
  misc_feature (1)..(162): Homolog of NCBI NO: 40253263 NR Description: putative Aldose 1-epimerase
  misc_feature (1)..(190): Homolog of NCBI NO: 15240009 NR Description: aldose 1-epimerase family [Arabidopsis thaliana]
  misc_feature (1)..(189): Homolog of NCBI NO: 6970044 NR Description: apospory-associated protein C; APOC
  misc_feature (1)..(162): Homolog of NCBI NO: 38344152 NR Description: OSJNBa0041A02.19 [Oryza sativa (japonica
  misc_feature (1)..(170): Homolog of NCBI NO: 15242099 NR Description: aldose 1-epimerase family [Arabidopsis thaliana]
  misc_feature (1)..(162): Homolog of NCBI NO: 2501555 NR Description: POSSIBLE APOSPORY-ASSOCIATED PROTEIN C
  misc_feature (1)..(170): Homolog of NCBI NO: 19387263 NR Description: putative apospory-associated protein C
  misc_feature (1)..(190): Homolog of NCBI NO: 18395868 NR Description: aldose 1-epimerase family [Arabidopsis thaliana]
  misc_feature (1)..(162): Homolog of NCBI NO: 2501555 NR Description: POSSIBLE APOSPORY-ASSOCIATED PROTEIN C
  misc_feature (1)..(170): Homolog of NCBI NO: 15242099 NR Description: aldose 1-epimerase family [Arabidopsis thaliana]
  misc_feature (1)..(162): Homolog of NCBI NO: 38344152 NR Description: OSJNBa0041A02.19 [Oryza sativa (japonica
  misc_feature (1)..(189): Homolog of NCBI NO: 6970044 NR Description: apospory-associated protein C; APOC
  misc_feature (1)..(190): Homolog of NCBI NO: 15240009 NR Description: aldose 1-epimerase family [Arabidopsis thaliana]

SEQ ID NO: 44597 - DNA, 732 bp, Arabidopsis thaliana; identical to SEQ ID NO: 36879
  misc_feature (1)..(732): Ceres Seq. ID no. 13580657
  misc_feature: MA Experiment ID: 20000169 Result: Up-regulated in Transcription
  misc_feature: MA Experiment 20000169 PARAMETER Experiment Name: At_100uM_ABA_P Parameter: Age (day) Value: 14
  misc_feature: MA Experiment 20000169 PARAMETER Experiment Name: At_100uM_ABA_P Parameter: Organism Value: A. thaliana
  misc_feature: MA Experiment 20000169 PARAMETER Experiment Name: At_100uM_ABA_P Parameter: Plant Line Value: WS
  misc_feature: MA Experiment 20000169 PARAMETER Experiment Name: At_100uM_ABA_P Parameter: Timepoint (hr) Value: 6
  misc_feature: MA Experiment 20000169 PARAMETER Experiment Name: At_100uM_ABA_P Parameter: Tissue Value: Aerial
  misc_feature: MA Experiment 20000169 PARAMETER Experiment Name: At_100uM_ABA_P Parameter: Treatment Value: 100uM ABA vs. No Treatment
  misc_feature: MA Experiment ID: 20000171 Result: Up-regulated in Transcription
  misc_feature: MA Experiment 20000171 PARAMETER Experiment Name: At_42deg_Heat_P Parameter: Age (day) Value: 14
  misc_feature: MA Experiment 20000171 PARAMETER Experiment Name: At_42deg_Heat_P Parameter: Organism Value: A. thaliana
  misc_feature: MA Experiment 20000171 PARAMETER Experiment Name: At_42deg_Heat_P Parameter: Plant Line Value: WS
  misc_feature: MA Experiment 20000171 PARAMETER Experiment Name: At_42deg_Heat_P Parameter: Temperature (deg C) Value: 42 vs. 22
  misc_feature: MA Experiment 20000171 PARAMETER Experiment Name: At_42deg_Heat_P Parameter: Timepoint (hr) Value: 1
  misc_feature: MA Experiment 20000171 PARAMETER Experiment Name: At_42deg_Heat_P Parameter: Tissue Value: Aerial
  misc_feature: MA Experiment ID: 20000179 Result: Up-regulated in Transcription
  misc_feature: MA Experiment 20000179 PARAMETER Experiment Name: At_Germinating_Seeds_P Parameter: Age (hr) Value: 6 vs. 0
  misc_feature: MA Experiment 20000179 PARAMETER Experiment Name: At_Germinating_Seeds_P Parameter: Tissue Value: Germinating Seeds
  misc_feature: MA Experiment ID: 20000180 Result: Up-regulated in Transcription
  misc_feature: MA Experiment 20000180 PARAMETER Experiment Name: At_Germinating_Seeds_P Parameter: Age (hr) Value: 24 vs. 0
  misc_feature: MA Experiment 20000180 PARAMETER Experiment Name: At_Germinating_Seeds_P Parameter: Tissue Value: Germinating Seeds
  misc_feature: MA Experiment ID: 20000460 Result: Down-regulated in Transcription
  misc_feature: MA Experiment 20000460 PARAMETER Experiment Name: At_10percent_PEG_P Parameter: Age (day) Value: 12
  misc_feature: MA Experiment 20000460 PARAMETER Experiment Name: At_10percent_PEG_P Parameter: Organism Value: A. thaliana
  misc_feature: MA Experiment 20000460 PARAMETER Experiment Name: At_10percent_PEG_P Parameter: Plant Line Value: WS
  misc_feature: MA Experiment 20000460 PARAMETER Experiment Name: At_10percent_PEG_P Parameter: Timepoint (day) Value: 12
  misc_feature: MA Experiment 20000460 PARAMETER Experiment Name: At_10percent_PEG_P Parameter: Tissue Value: Whole Plant
  misc_feature: MA Experiment 20000460 PARAMETER Experiment Name: At_10percent_PEG_P Parameter: Treatment Value: 10percent PEG vs. No Treatment
  misc_feature: MA Experiment ID: 20000527 Result: Down-regulated in Transcription
  misc_feature: MA Experiment 20000527 PARAMETER Experiment Name: At_10percent_PEG_P Parameter: Age (day) Value: 20
  misc_feature: MA Experiment 20000527 PARAMETER Experiment Name: At_10percent_PEG_P Parameter: Organism Value: A. thaliana
  misc_feature: MA Experiment 20000527 PARAMETER Experiment Name: At_10percent_PEG_P Parameter: Plant Line Value: WS
  misc_feature: MA Experiment 20000527 PARAMETER Experiment Name: At_10percent_PEG_P Parameter: Timepoint (day) Value: 20
  misc_feature: MA Experiment 20000527 PARAMETER Experiment Name: At_10percent_PEG_P Parameter: Tissue Value: Whole Plant
  misc_feature: MA Experiment 20000527 PARAMETER Experiment Name: At_10percent_PEG_P Parameter: Treatment Value: 10percent PEG vs. No Treatment
  misc_feature: MA Experiment ID: 20000573 Result: Down-regulated in Transcription
  misc_feature: MA Experiment 20000573 PARAMETER Experiment Name: At_100uM_ABA_Mutants__P Parameter: Organism Value: A. thaliana
  misc_feature: MA Experiment 20000573 PARAMETER Experiment Name: At_100uM_ABA_Mutants__P Parameter: Plant Line Value: CS22 vs. Ler wt
  misc_feature: MA Experiment 20000573 PARAMETER Experiment Name: At_100uM_ABA_Mutants__P Parameter: Timepoint (hr) Value: N/A
  misc_feature: MA Experiment 20000573 PARAMETER Experiment Name: At_100uM_ABA_Mutants__P Parameter: Tissue Value: Whole Plant
  misc_feature: MA Experiment 20000573 PARAMETER Experiment Name: At_100uM_ABA_Mutants__P Parameter: Treatment Value: None
  misc_feature: MA Experiment ID: 20000574 Result: Down-regulated in Transcription
  misc_feature: MA Experiment 20000574 PARAMETER Experiment Name: At_100uM_ABA_Mutants__P Parameter: Organism Value: A. thaliana
  misc_feature: MA Experiment 20000574 PARAMETER Experiment Name: At_100uM_ABA_Mutants__P Parameter: Plant Line Value: CS23 vs. Ler wt
  misc_feature: MA Experiment 20000574 PARAMETER Experiment Name: At_100uM_ABA_Mutants__P Parameter: Timepoint (hr) Value: N/A
  misc_feature: MA Experiment 20000574 PARAMETER Experiment Name: At_100uM_ABA_Mutants__P Parameter: Tissue Value: Whole Plant
  misc_feature: MA Experiment 20000574 PARAMETER Experiment Name: At_100uM_ABA_Mutants__P Parameter: Treatment Value: None
  misc_feature: MA Experiment ID: 20001248 Result: Down-regulated in Transcription
  misc_feature: MA Experiment 20001248 PARAMETER Experiment Name: At_Far-red-induction_P Parameter: Age (day) Value: 7
  misc_feature: MA Experiment 20001248 PARAMETER Experiment Name: At_Far-red-induction_P Parameter: Light Value: Far-red vs. White
  misc_feature: MA Experiment 20001248 PARAMETER Experiment Name: At_Far-red-induction_P Parameter: Organism Value: A. thaliana
  misc_feature: MA Experiment 20001248 PARAMETER Experiment Name: At_Far-red-induction_P Parameter: Plant Line Value: Columbia
  misc_feature: MA Experiment 20001248 PARAMETER Experiment Name: At_Far-red-induction_P Parameter: Timepoint (hr) Value: 4
  misc_feature: MA Experiment 20001248 PARAMETER Experiment Name: At_Far-red-induction_P Parameter: Tissue Value: Whole Plant
  misc_feature: MA Experiment ID: 20001450 Result: Down-regulated in Transcription
  misc_feature: MA Experiment 20001450 PARAMETER Experiment Name: At_Far-red-induction_P Parameter: Age (day) Value: 7
  misc_feature: MA Experiment 20001450 PARAMETER Experiment Name: At_Far-red-induction_P Parameter: Light Value: Far-red vs. White
  misc_feature: MA Experiment 20001450 PARAMETER Experiment Name: At_Far-red-induction_P Parameter: Organism Value: A. thaliana
  misc_feature: MA Experiment 20001450 PARAMETER Experiment Name: At_Far-red-induction_P Parameter: Plant Line Value: Columbia
  misc_feature: MA Experiment 20001450 PARAMETER Experiment Name: At_Far-red-induction_P Parameter: Timepoint (hr) Value: 8
  misc_feature: MA Experiment 20001450 PARAMETER Experiment Name: At_Far-red-induction_P Parameter: Tissue Value: Whole Plant
  misc_feature: MA Experiment ID: 20001560 Result: Up-regulated in Transcription
  misc_feature: MA Experiment 20001560 PARAMETER Experiment Name: At_Drought_Soil_Dry_P Parameter: Age (day) Value: 28
  misc_feature: MA Experiment 20001560 PARAMETER Experiment Name: At_Drought_Soil_Dry_P Parameter: Organism Value: A. thaliana
  misc_feature: MA Experiment 20001560 PARAMETER Experiment Name: At_Drought_Soil_Dry_P Parameter: Plant Line Value: WS
  misc_feature: MA Experiment 20001560 PARAMETER Experiment Name: At_Drought_Soil_Dry_P Parameter: Post Timepoint (hr) Value: None
  misc_feature: MA Experiment 20001560 PARAMETER Experiment Name: At_Drought_Soil_Dry_P Parameter: Post-Treatment Value: None
  misc_feature: MA Experiment 20001560 PARAMETER Experiment Name: At_Drought_Soil_Dry_P Parameter: Timepoint (day) Value: 14
  misc_feature: MA Experiment 20001560 PARAMETER Experiment Name: At_Drought_Soil_Dry_P Parameter: Treatment Value: Drought vs. No Drought

SEQ ID NO: 44598 - protein, 170 aa, Arabidopsis thaliana; identical to SEQ ID NO: 36880
  peptide (1)..(170): Ceres Seq. ID no. 13580658
  misc_feature (55)..(170): Pfam Name: Peroxidase Pfam Description: Peroxidase
  misc_feature (55)..(170): Pfam Name: Peroxidase Pfam Description: Peroxidase
  misc_feature (37)..(170): Homolog of NCBI NO: 24636598 NR Description: ascorbate peroxidase [Solanum tuberosum]
  misc_feature (37)..(170): Homolog of NCBI NO: 541927 NR Description: L-ascorbate peroxidase (EC 1.11.1.11) - radish
  misc_feature (37)..(170): Homolog of NCBI NO: 1890354 NR Description: L-ascorbate peroxidase [Brassica napus]
  misc_feature (37)..(170): Homolog of NCBI NO: 7488439 NR Description: L-ascorbate peroxidase (EC 1.11.1.11) - leaf
  misc_feature (37)..(170): Homolog of NCBI NO: 18265379 NR Description: ascorbate peroxidase [Brassica oleracea]
  misc_feature (37)..(170): Homolog of NCBI NO: 24636598 NR Description: ascorbate peroxidase [Solanum tuberosum]
  misc_feature (37)..(170): Homolog of NCBI NO: 1890354 NR Description: L-ascorbate peroxidase [Brassica napus]
  misc_feature (37)..(170): Homolog of NCBI NO: 18265379 NR Description: ascorbate peroxidase [Brassica oleracea]
  misc_feature (24)..(170): Homolog of NCBI NO: 99735 NR Description: L-ascorbate peroxidase (EC 1.11.1.11) precursor -
  misc_feature (37)..(170): Homolog of NCBI NO: 15223049 NR Description: ascorbate peroxidase, putative (APX) [Arabidopsis
  misc_feature (37)..(170): Homolog of NCBI NO: 24421233 NR Description: ascorbate peroxidase [Brassica juncea]
  misc_feature (37)..(170): Homolog of NCBI NO: 24421231 NR Description: ascorbate peroxidase [Brassica juncea]
  misc_feature (37)..(170): Homolog of NCBI NO: 18265381 NR Description: ascorbate peroxidase [Brassica oleracea]
  misc_feature (37)..(170): Homolog of NCBI NO: 7488439 NR Description: L-ascorbate peroxidase (EC 1.11.1.11) - leaf
  misc_feature (37)..(170): Homolog of NCBI NO: 541927 NR Description: L-ascorbate peroxidase (EC 1.11.1.11) - radish
  misc_feature (37)..(170): Homolog of NCBI NO: 18265381 NR Description: ascorbate peroxidase [Brassica oleracea]
  misc_feature (37)..(170): Homolog of NCBI NO: 24421231 NR Description: ascorbate peroxidase [Brassica juncea]
  misc_feature (37)..(170): Homolog of NCBI NO: 24421233 NR Description: ascorbate peroxidase [Brassica juncea]
  misc_feature (37)..(170): Homolog of NCBI NO: 15223049 NR Description: ascorbate peroxidase, putative (APX) [Arabidopsis
  misc_feature (24)..(170): Homolog of NCBI NO: 99735 NR Description: L-ascorbate peroxidase (EC 1.11.1.11) precursor -

SEQ ID NO: 44599 - protein, 134 aa, Arabidopsis thaliana; identical to SEQ ID NO: 36881
  peptide (1)..(134): Ceres Seq. ID no. 13580659
  misc_feature (19)..(134): Pfam Name: Peroxidase Pfam Description: Peroxidase
  misc_feature (19)..(134): Pfam Name: Peroxidase Pfam Description: Peroxidase
  misc_feature (1)..(134): Homolog of NCBI NO: 24636598 NR Description: ascorbate peroxidase [Solanum tuberosum]
  misc_feature (1)..(134): Homolog of NCBI NO: 541927 NR Description: L-ascorbate peroxidase (EC 1.11.1.11) - radish
  misc_feature (1)..(134): Homolog of NCBI NO: 1890354 NR Description: L-ascorbate peroxidase [Brassica napus]
  misc_feature (1)..(134): Homolog of NCBI NO: 7488439 NR Description: L-ascorbate peroxidase (EC 1.11.1.11) - leaf
  misc_feature (1)..(134): Homolog of NCBI NO: 18265379 NR Description: ascorbate peroxidase [Brassica oleracea]
  misc_feature (1)..(134): Homolog of NCBI NO: 24636598 NR Description: ascorbate peroxidase [Solanum tuberosum]
  misc_feature (1)..(134): Homolog of NCBI NO: 1890354 NR Description: L-ascorbate peroxidase [Brassica napus]
  misc_feature (1)..(134): Homolog of NCBI NO: 18265379 NR Description: ascorbate peroxidase [Brassica oleracea]
  misc_feature (1)..(134): Homolog of NCBI NO: 99735 NR Description: L-ascorbate peroxidase (EC 1.11.1.11) precursor -
  misc_feature (1)..(134): Homolog of NCBI NO: 15223049 NR Description: ascorbate peroxidase, putative (APX) [Arabidopsis
  misc_feature (1)..(134): Homolog of NCBI NO: 24421233 NR Description: ascorbate peroxidase [Brassica juncea]
  misc_feature (1)..(134): Homolog of NCBI NO: 24421231 NR Description: ascorbate peroxidase [Brassica juncea]
  misc_feature (1)..(134): Homolog of NCBI NO: 18265381 NR Description: ascorbate peroxidase [Brassica oleracea]
  misc_feature (1)..(134): Homolog of NCBI NO: 7488439 NR Description: L-ascorbate peroxidase (EC 1.11.1.11) - leaf
  misc_feature (1)..(134): Homolog of NCBI NO: 541927 NR Description: L-ascorbate peroxidase (EC 1.11.1.11) - radish
  misc_feature (1)..(134): Homolog of NCBI NO: 18265381 NR Description: ascorbate peroxidase [Brassica oleracea]
  misc_feature (1)..(134): Homolog of NCBI NO: 24421231 NR Description: ascorbate peroxidase [Brassica juncea]
  misc_feature (1)..(134): Homolog of NCBI NO: 24421233 NR Description: ascorbate peroxidase [Brassica juncea]
  misc_feature (1)..(134): Homolog of NCBI NO: 15223049 NR Description: ascorbate peroxidase, putative (APX) [Arabidopsis
  misc_feature (1)..(134): Homolog of NCBI NO: 99735 NR Description: L-ascorbate peroxidase (EC 1.11.1.11) precursor -

SEQ ID NO: 44600 - protein, 99 aa, Arabidopsis thaliana; identical to SEQ ID NO: 36882
  peptide (1)..(99): Ceres Seq. ID no. 13580660
  misc_feature (1)..(99): Pfam Name: Peroxidase Pfam Description: Peroxidase
  misc_feature (1)..(99): Pfam Name: Peroxidase Pfam Description: Peroxidase
  misc_feature (1)..(99): Homolog of NCBI NO: 24636598 NR Description: ascorbate peroxidase [Solanum tuberosum]
  misc_feature (1)..(99): Homolog of NCBI NO: 541927 NR Description: L-ascorbate peroxidase (EC 1.11.1.11) - radish
  misc_feature (1)..(99): Homolog of NCBI NO: 1890354 NR Description: L-ascorbate peroxidase [Brassica napus]
  misc_feature (1)..(99): Homolog of NCBI NO: 7488439 NR Description: L-ascorbate peroxidase (EC 1.11.1.11) - leaf
  misc_feature (1)..(99): Homolog of NCBI NO: 18265379 NR Description: ascorbate peroxidase [Brassica oleracea]
  misc_feature (1)..(99): Homolog of NCBI NO: 24636598 NR Description: ascorbate peroxidase [Solanum tuberosum]
  misc_feature (1)..(99): Homolog of NCBI NO: 1890354 NR Description: L-ascorbate peroxidase [Brassica napus]
  misc_feature (1)..(99): Homolog of NCBI NO: 18265379 NR Description: ascorbate peroxidase [Brassica oleracea]
  misc_feature (1)..(99): Homolog of NCBI NO: 99735 NR Description: L-ascorbate peroxidase (EC 1.11.1.11) precursor -
  misc_feature (1)..(99): Homolog of NCBI NO: 15223049 NR Description: ascorbate peroxidase, putative (APX) [Arabidopsis
  misc_feature (1)..(99): Homolog of NCBI NO: 24421233 NR Description: ascorbate peroxidase [Brassica juncea]
  misc_feature (1)..(99): Homolog of NCBI NO: 24421231 NR Description: ascorbate peroxidase [Brassica juncea]
  misc_feature (1)..(99): Homolog of NCBI NO: 18265381 NR Description: ascorbate peroxidase [Brassica oleracea]
  misc_feature (1)..(99): Homolog of NCBI NO: 7488439 NR Description: L-ascorbate peroxidase (EC 1.11.1.11) - leaf
  misc_feature (1)..(99): Homolog of NCBI NO: 541927 NR Description: L-ascorbate peroxidase (EC 1.11.1.11) - radish
  misc_feature (1)..(99): Homolog of NCBI NO: 18265381 NR Description: ascorbate peroxidase [Brassica oleracea]
  misc_feature (1)..(99): Homolog of NCBI NO: 24421231 NR Description: ascorbate peroxidase [Brassica juncea]
  misc_feature (1)..(99): Homolog of NCBI NO: 24421233 NR Description: ascorbate peroxidase [Brassica juncea]
  misc_feature (1)..(99): Homolog of NCBI NO: 15223049 NR Description: ascorbate peroxidase, putative (APX) [Arabidopsis
  misc_feature (1)..(99): Homolog of NCBI NO: 99735 NR Description: L-ascorbate peroxidase (EC 1.11.1.11) precursor -

SEQ ID NO: 44601 - DNA, 1338 bp, Arabidopsis thaliana; identical to SEQ ID NO: 43868
  misc_feature (1)..(1338): Ceres Seq. ID no. 12462175
  misc_feature: MA Experiment ID: 108433 Result: Up-regulated in Transcription
  misc_feature: MA Experiment 108433 PARAMETER Experiment Name: At_rhl_Mutant2_cDNA_P Parameter: Age (day) Value: 7
  misc_feature: MA Experiment 108433 PARAMETER Experiment Name: At_rhl_Mutant2_cDNA_P Parameter: Organism Value: A. thaliana
  misc_feature: MA Experiment 108433 PARAMETER Experiment Name: At_rhl_Mutant2_cDNA_P Parameter: Plant Line Value: rhl Mutant vs. wt landsburg
  misc_feature: MA Experiment 108433 PARAMETER Experiment Name: At_rhl_Mutant2_cDNA_P Parameter: Tissue Value: Roots
  misc_feature: MA Experiment ID: 108434 Result: Down-regulated in Transcription
  misc_feature: MA Experiment 108434 PARAMETER Experiment Name: At_Root_Tips_cDNA_P Parameter: Tissue Value: Root Tips
  misc_feature: MA Experiment ID: 108573 Result: Up-regulated in Transcription
  misc_feature: MA Experiment 108573 PARAMETER Experiment Name: At_Drought_cDNA_P Parameter: Timepoint (hr) Value: 6
  misc_feature: MA Experiment 108573 PARAMETER Experiment Name: At_Drought_cDNA_P Parameter: Tissue Value: Aerial
  misc_feature: MA Experiment 108573 PARAMETER Experiment Name: At_Drought_cDNA_P Parameter: Treatment Value: Drought vs. No Drought
  misc_feature: MA Experiment ID: 108594 Result: Down-regulated in Transcription
  misc_feature: MA Experiment 108594 PARAMETER Experiment Name: At_Ler-rhl_Root_cDNA_P Parameter: Plant Line Value: null
  misc_feature: MA Experiment ID: 108595 Result: Down-regulated in Transcription
  misc_feature: MA Experiment 108595 PARAMETER Experiment Name: At_Ler-pi_Ovule_cDNA_P Parameter: Plant Line Value: null
  misc_feature: MA Experiment ID: 108605 Result: Up-regulated in Transcription
  misc_feature: MA Experiment 108605 PARAMETER Experiment Name: At_100uM_ABA_cDNA_P Parameter: Timepoint (hr) Value: 6
  misc_feature: MA Experiment 108605 PARAMETER Experiment Name: At_100uM_ABA_cDNA_P Parameter: Tissue Value: Aerial
  misc_feature: MA Experiment 108605 PARAMETER Experiment Name: At_100uM_ABA_cDNA_P Parameter: Treatment Value: 100uM ABA vs. No Treatment
  misc_feature: MA Experiment ID: 20000185 Result: Down-regulated in Transcription
  misc_feature: MA Experiment 20000185 PARAMETER Experiment Name: At_Roots__P Parameter: Age (day) Value: 7 vs. 21
  misc_feature: MA Experiment 20000185 PARAMETER Experiment Name: At_Roots__P Parameter: Organism Value: A. thaliana
  misc_feature: MA Experiment 20000185 PARAMETER Experiment Name: At_Roots__P Parameter: Tissue Value: Roots vs. Whole Plant
  misc_feature: MA Experiment ID: 20000437 Result: Down-regulated in Transcription
  misc_feature: MA Experiment 20000437 PARAMETER Experiment Name: At_Drought_P Parameter: Age (day) Value: 8
  misc_feature: MA Experiment 20000437 PARAMETER Experiment Name: At_Drought_P Parameter: Organism Value: A. thaliana
  misc_feature: MA Experiment 20000437 PARAMETER Experiment Name: At_Drought_P Parameter: Plant Line Value: WS
  misc_feature: MA Experiment 20000437 PARAMETER Experiment Name: At_Drought_P Parameter: Timepoint (hr) Value: 24
  misc_feature: MA Experiment 20000437 PARAMETER Experiment Name: At_Drought_P Parameter: Tissue Value: Whole Plant
  misc_feature: MA Experiment 20000437 PARAMETER Experiment Name: At_Drought_P Parameter: Treatment Value: Drought vs. No Drought
  misc_feature: MA Experiment ID: 20000439 Result: Down-regulated in Transcription
  misc_feature: MA Experiment 20000439 PARAMETER Experiment Name: At_Roots__P Parameter: Age (day) Value: 14 vs. 21
  misc_feature: MA Experiment 20000439 PARAMETER Experiment Name: At_Roots__P Parameter: Organism Value: A. thaliana
  misc_feature: MA Experiment 20000439 PARAMETER Experiment Name: At_Roots__P Parameter: Tissue Value: Roots vs. Whole Plant
  misc_feature: MA Experiment ID: 20000573 Result: Down-regulated in Transcription
  misc_feature: MA Experiment 20000573 PARAMETER Experiment Name: At_100uM_ABA_Mutants__P Parameter: Organism Value: A. thaliana
  misc_feature: MA Experiment 20000573 PARAMETER Experiment Name: At_100uM_ABA_Mutants__P Parameter: Plant Line Value: CS22 vs. Ler wt
  misc_feature: MA Experiment 20000573 PARAMETER Experiment Name: At_100uM_ABA_Mutants__P Parameter: Timepoint (hr) Value: N/A
  misc_feature: MA Experiment 20000573 PARAMETER Experiment Name: At_100uM_ABA_Mutants__P Parameter: Tissue Value: Whole Plant
  misc_feature: MA Experiment 20000573 PARAMETER Experiment Name: At_100uM_ABA_Mutants__P Parameter: Treatment Value: None
  misc_feature: MA Experiment ID: 20000574 Result: Down-regulated in Transcription
  misc_feature: MA Experiment 20000574 PARAMETER Experiment Name: At_100uM_ABA_Mutants__P Parameter: Organism Value: A. thaliana
  misc_feature: MA Experiment 20000574 PARAMETER Experiment Name: At_100uM_ABA_Mutants__P Parameter: Plant Line Value: CS23 vs. Ler wt
  misc_feature: MA Experiment 20000574 PARAMETER Experiment Name: At_100uM_ABA_Mutants__P Parameter: Timepoint (hr) Value: N/A
  misc_feature: MA Experiment 20000574 PARAMETER Experiment Name: At_100uM_ABA_Mutants__P Parameter: Tissue Value: Whole Plant
  misc_feature: MA Experiment 20000574 PARAMETER Experiment Name: At_100uM_ABA_Mutants__P Parameter: Treatment Value: None
  misc_feature: MA Experiment ID: 20000794 Result: Up-regulated in Transcription
  misc_feature: MA Experiment 20000794 PARAMETER Experiment Name: At_Petals_P Parameter: Age (day) Value: 23-25 days
  misc_feature: MA Experiment 20000794 PARAMETER Experiment Name: At_Petals_P Parameter: Plant Line Value: WS
  misc_feature: MA Experiment 20000794 PARAMETER Experiment Name: At_Petals_P Parameter: Tissue Value: Petals vs. Whole plant
  misc_feature: MA Experiment ID: 20001248 Result: Down-regulated in Transcription
  misc_feature: MA Experiment 20001248 PARAMETER Experiment Name: At_Far-red-induction_P Parameter: Age (day) Value: 7
  misc_feature: MA Experiment 20001248 PARAMETER Experiment Name: At_Far-red-induction_P Parameter: Light Value: Far-red vs. White
  misc_feature: MA Experiment 20001248 PARAMETER Experiment Name: At_Far-red-induction_P Parameter: Organism Value: A. thaliana
  misc_feature: MA Experiment 20001248 PARAMETER Experiment Name: At_Far-red-induction_P Parameter: Plant Line Value: Columbia
  misc_feature: MA Experiment 20001248 PARAMETER Experiment Name: At_Far-red-induction_P Parameter: Timepoint (hr) Value: 4
  misc_feature: MA Experiment 20001248 PARAMETER Experiment Name: At_Far-red-induction_P Parameter: Tissue Value: Whole Plant

SEQ ID NO: 44602 - protein, 346 aa, Arabidopsis thaliana; identical to SEQ ID NO: 43869
  peptide (1)..(346): Ceres Seq. ID no. 12462176
  misc_feature (123)..(346): Homolog of NCBI NO: 30692072 NR Description: nitrilase 1 [Arabidopsis thaliana]
  misc_feature (1)..(344): Homolog of NCBI NO: 14211396 NR Description: nitrilase-like protein [Brassica napus]
  misc_feature (1)..(346): Homolog of NCBI NO: 21593107 NR Description: nitrilase 3 [Arabidopsis thaliana]
  misc_feature (1)..(346): Homolog of NCBI NO: 15229936 NR Description: nitrilase 3
  misc_feature (7)..(346): Homolog of NCBI NO: 25290267 NR Description: nitrilase (EC 3.5.5.1) 2 [imported] - Arabidopsis
  misc_feature (7)..(346): Homolog of NCBI NO: 25290266 NR Description: nitrilase (EC 3.5.5.1) 2 [imported] - Arabidopsis
  misc_feature (7)..(346): Homolog of NCBI NO: 15229932 NR Description: nitrilase 2
  misc_feature (1)..(346): Homolog of NCBI NO: 16226740 NR Description: AT3g44310/T10D17_100 [Arabidopsis thaliana]
  misc_feature (1)..(346): Homolog of NCBI NO: 417381 NR Description: Nitrilase 1
  misc_feature (1)..(346): Homolog of NCBI NO: 30692067 NR Description: nitrilase 1 [Arabidopsis thaliana]
  misc_feature (123)..(346): Homolog of NCBI NO: 30692072 NR Description: nitrilase 1 [Arabidopsis thaliana]
  misc_feature (1)..(344): Homolog of NCBI NO: 14211396 NR Description: nitrilase-like protein [Brassica napus]
  misc_feature (1)..(346): Homolog of NCBI NO: 21593107 NR Description: nitrilase 3 [Arabidopsis thaliana]
  misc_feature (1)..(346): Homolog of NCBI NO: 15229936 NR Description: nitrilase 3
  misc_feature (7)..(346): Homolog of NCBI NO: 25290267 NR Description: nitrilase (EC 3.5.5.1) 2 [imported] - Arabidopsis
  misc_feature (7)..(346): Homolog of NCBI NO: 25290266 NR Description: nitrilase (EC 3.5.5.1) 2 [imported] - Arabidopsis
  misc_feature (7)..(346): Homolog of NCBI NO: 15229932 NR Description: nitrilase 2
  misc_feature (1)..(346): Homolog of NCBI NO: 16226740 NR Description: AT3g44310/T10D17_100 [Arabidopsis thaliana]
  misc_feature (1)..(346): Homolog of NCBI NO: 417381 NR Description: Nitrilase 1
  misc_feature (1)..(346): Homolog of NCBI NO: 30692067 NR Description: nitrilase 1 [Arabidopsis thaliana]

SEQ ID NO: 44603 - protein, 340 aa, Arabidopsis thaliana; identical to SEQ ID NO: 43870
  peptide (1)..(340): Ceres Seq. ID no. 12462177
  misc_feature (117)..(340): Homolog of NCBI NO: 30692072 NR Description: nitrilase 1 [Arabidopsis thaliana]
  misc_feature (1)..(338): Homolog of NCBI NO: 14211396 NR Description: nitrilase-like protein [Brassica napus]
  misc_feature (1)..(340): Homolog of NCBI NO: 21593107 NR Description: nitrilase 3 [Arabidopsis thaliana]
  misc_feature (1)..(340): Homolog of NCBI NO: 15229936 NR Description: nitrilase 3
  misc_feature (1)..(340): Homolog of NCBI NO: 25290267 NR Description: nitrilase (EC 3.5.5.1) 2 [imported] - Arabidopsis
  misc_feature (1)..(340): Homolog of NCBI NO: 25290266 NR Description: nitrilase (EC 3.5.5.1) 2 [imported] - Arabidopsis
  misc_feature (1)..(340): Homolog of NCBI NO: 15229932 NR Description: nitrilase 2
  misc_feature (1)..(340): Homolog of NCBI NO: 16226740 NR Description: AT3g44310/T10D17_100 [Arabidopsis thaliana]
  misc_feature (1)..(340): Homolog of NCBI NO: 417381 NR Description: Nitrilase 1
  misc_feature (1)..(340): Homolog of NCBI NO: 30692067 NR Description: nitrilase 1 [Arabidopsis thaliana]
  misc_feature (117)..(340): Homolog of NCBI NO: 30692072 NR Description: nitrilase 1 [Arabidopsis thaliana]
  misc_feature (1)..(338): Homolog of NCBI NO: 14211396 NR Description: nitrilase-like protein [Brassica napus]
  misc_feature (1)..(340): Homolog of NCBI NO: 21593107 NR Description: nitrilase 3 [Arabidopsis thaliana]
  misc_feature (1)..(340): Homolog of NCBI NO: 15229936 NR Description: nitrilase 3
  misc_feature (1)..(340): Homolog of NCBI NO: 25290267 NR Description: nitrilase (EC 3.5.5.1) 2 [imported] - Arabidopsis
  misc_feature (1)..(340): Homolog of NCBI NO: 25290266 NR Description: nitrilase (EC 3.5.5.1) 2 [imported] - Arabidopsis
  misc_feature (1)..(340): Homolog of NCBI NO: 15229932 NR Description: nitrilase 2
  misc_feature (1)..(340): Homolog of NCBI NO: 16226740 NR Description: AT3g44310/T10D17_100 [Arabidopsis thaliana]
  misc_feature (1)..(340): Homolog of NCBI NO: 417381 NR Description: Nitrilase 1
  misc_feature (1)..(340): Homolog of NCBI NO: 30692067 NR Description: nitrilase 1 [Arabidopsis thaliana]

SEQ ID NO: 44604 - protein, 224 aa, Arabidopsis thaliana; identical to SEQ ID NO: 43871
  peptide (1)..(224): Ceres Seq. ID no. 12462178
  misc_feature (1)..(224): Homolog of NCBI NO: 30692072 NR Description: nitrilase 1 [Arabidopsis thaliana]
  misc_feature (1)..(222): Homolog of NCBI NO: 14211396 NR Description: nitrilase-like protein [Brassica napus]
  misc_feature (1)..(224): Homolog of NCBI NO: 21593107 NR Description: nitrilase 3 [Arabidopsis thaliana]
  misc_feature (1)..(224): Homolog of NCBI NO: 15229936 NR Description: nitrilase 3
  misc_feature (1)..(224): Homolog of NCBI NO: 25290267 NR Description: nitrilase (EC 3.5.5.1) 2 [imported] - Arabidopsis
  misc_feature (1)..(224): Homolog of NCBI NO: 25290266 NR Description: nitrilase (EC 3.5.5.1) 2 [imported] - Arabidopsis
  misc_feature (1)..(224): Homolog of NCBI NO: 15229932 NR Description: nitrilase 2
  misc_feature (1)..(224): Homolog of NCBI NO: 16226740 NR Description: AT3g44310/T10D17_100 [Arabidopsis thaliana]
  misc_feature (1)..(224): Homolog of NCBI NO: 417381 NR Description: Nitrilase 1
  misc_feature (1)..(224): Homolog of NCBI NO: 30692067 NR Description: nitrilase 1 [Arabidopsis thaliana]
  misc_feature (1)..(224): Homolog of NCBI NO: 30692072 NR Description: nitrilase 1 [Arabidopsis thaliana]
  misc_feature (1)..(222): Homolog of NCBI NO: 14211396 NR Description: nitrilase-like protein [Brassica napus]
  misc_feature (1)..(224): Homolog of NCBI NO: 21593107 NR Description: nitrilase 3 [Arabidopsis thaliana]
  misc_feature (1)..(224): Homolog of NCBI NO: 15229936 NR Description: nitrilase 3
  misc_feature (1)..(224): Homolog of NCBI NO: 25290267 NR Description: nitrilase (EC 3.5.5.1) 2 [imported] - Arabidopsis
  misc_feature (1)..(224): Homolog of NCBI NO: 25290266 NR Description: nitrilase (EC 3.5.5.1) 2 [imported] - Arabidopsis
  misc_feature (1)..(224): Homolog of NCBI NO: 15229932 NR Description: nitrilase 2
  misc_feature (1)..(224): Homolog of NCBI NO: 16226740 NR Description: AT3g44310/T10D17_100 [Arabidopsis thaliana]
  misc_feature (1)..(224): Homolog of NCBI NO: 417381 NR Description: Nitrilase 1
  misc_feature (1)..(224): Homolog of NCBI NO: 30692067 NR Description: nitrilase 1 [Arabidopsis thaliana]

SEQ ID NO: 44605 - DNA, 799 bp, Arabidopsis thaliana
  misc_feature (1)..(799): Ceres Seq. ID no. 12466246
  misc_feature: MA Experiment ID: 20000185 Result: Up-regulated in Transcription
  misc_feature: MA Experiment 20000185 PARAMETER Experiment Name: At_Roots__P Parameter: Age (day) Value: 7 vs. 21
  misc_feature: MA Experiment 20000185 PARAMETER Experiment Name: At_Roots__P Parameter: Organism Value: A. thaliana
  misc_feature: MA Experiment 20000185 PARAMETER Experiment Name: At_Roots__P Parameter: Tissue Value: Roots vs. Whole Plant
  misc_feature: MA Experiment ID: 20000439 Result: Up-regulated in Transcription
  misc_feature: MA Experiment 20000439 PARAMETER Experiment Name: At_Roots__P Parameter: Age (day) Value: 14 vs. 21
  misc_feature: MA Experiment 20000439 PARAMETER Experiment Name: At_Roots__P Parameter: Organism Value: A. thaliana
  misc_feature: MA Experiment 20000439 PARAMETER Experiment Name: At_Roots__P Parameter: Tissue Value: Roots vs. Whole Plant
  misc_feature: MA Experiment ID: 20000495 Result: Up-regulated in Transcription
  misc_feature: MA Experiment 20000495 PARAMETER Experiment Name: At_Guard_Cells_P Parameter: Harvest Date Value: 8/2/2002
  misc_feature: MA Experiment 20000495 PARAMETER Experiment Name: At_Guard_Cells_P Parameter: Organism Value: A. thaliana
  misc_feature: MA Experiment 20000495 PARAMETER Experiment Name: At_Guard_Cells_P Parameter: Tissue Value: Guard Cells vs. Leaves
  misc_feature: MA Experiment ID: 20001560 Result: Up-regulated in Transcription
  misc_feature: MA Experiment 20001560 PARAMETER Experiment Name: At_Drought_Soil_Dry_P Parameter: Age (day) Value: 28
  misc_feature: MA Experiment 20001560 PARAMETER Experiment Name: At_Drought_Soil_Dry_P Parameter: Organism Value: A. thaliana
  misc_feature: MA Experiment 20001560 PARAMETER Experiment Name: At_Drought_Soil_Dry_P Parameter: Plant Line Value: WS
  misc_feature: MA Experiment 20001560 PARAMETER Experiment Name: At_Drought_Soil_Dry_P Parameter: Post Timepoint (hr) Value: None
  misc_feature: MA Experiment 20001560 PARAMETER Experiment Name: At_Drought_Soil_Dry_P Parameter: Post-Treatment Value: None
  misc_feature: MA Experiment 20001560 PARAMETER Experiment Name: At_Drought_Soil_Dry_P Parameter: Timepoint (day) Value: 14
  misc_feature: MA Experiment 20001560 PARAMETER Experiment Name: At_Drought_Soil_Dry_P Parameter: Treatment Value: Drought vs. No Drought
  misc_feature: MA Experiment ID: 20001911 Result: Down-regulated in Transcription
  misc_feature: MA Experiment 20001911 PARAMETER Experiment Name: At_Drought_Reproduction_P Parameter: Age (day) Value: 40
  misc_feature: MA Experiment 20001911 PARAMETER Experiment Name: At_Drought_Reproduction_P Parameter: Organism Value: A. thaliana
  misc_feature: MA Experiment 20001911 PARAMETER Experiment Name: At_Drought_Reproduction_P Parameter: Plant Line Value: WS
  misc_feature: MA Experiment 20001911 PARAMETER Experiment Name: At_Drought_Reproduction_P Parameter: Timepoint (day) Value: 10
  misc_feature: MA Experiment 20001911 PARAMETER Experiment Name: At_Drought_Reproduction_P Parameter: Tissue Value: Flowers
  misc_feature: MA Experiment 20001911 PARAMETER Experiment Name: At_Drought_Reproduction_P Parameter: Treatment Value: Drought vs. No Drought
gtcgtaagaatataataataagccgttcggtgagtgcactctttctctctcactgttgttgttgtgtatctgtgcgagatctctccaacgaaaaaatggcttgtagactcttttgggcttctagggttgcttctcatctaaggatctccgttgctcaacgagggttttcttccgtggttttgaaggatttgaaatatgctgattcacatgaatgggtgaagattgacgggaataaagcaacctttggtataacggatcacgcgcaggaccatttaggagatgtggtctatgtggagttacctgatgtaggacattcggtgtcacaagggaagagttttggagcagttgaaagtgtgaaagcaactagcgatatcaattctccagtctcgggtaaggtggttgaagtcaatgaggagctgaccgagtcccctggattggtgaactctagcccgtatgaacaaggatggatcataaaagttgagctgagtgatgcaggcgaggcagagaagctgatggattcagacaagtactctaagttctgcgaagaagaagacgccaagcactgagctttttctattttttccagcatccttctccaagcttccaccgcaacacagattgttgttttctcaatcgaggatcaaaacgagatttctccatctttgtcccttggactgaaaattcccatctctcgttctccttttttcttttcatgtttttcttttaatgaaatgaaattgtttgaataatggtagagaataatgagctttggcgttgaaattgattggatctttcatgg

SEQ ID NO: 44606 - protein, 187 aa, Arabidopsis thaliana
  peptide (1)..(187): Ceres Seq. ID no. 12466247
  misc_feature (63)..(183): Pfam Name: Glycine cleavage H-protein Pfam Description: Glycine cleavage H-protein
  misc_feature (32)..(185): Homolog of NCBI NO: 1362140 NR Description: H-protein precursor - Flaveria trinervia
  misc_feature (32)..(187): Homolog of NCBI NO: 15223217 NR Description: glycine cleavage system H protein precursor,
  misc_feature (33)..(187): Homolog of NCBI NO: 2119600 NR Description: glycine cleavage system protein H precursor
  misc_feature (32)..(187): Homolog of NCBI NO: 1346118 NR Description: Glycine cleavage system H protein, mitochondrial
  misc_feature (32)..(187): Homolog of NCBI NO: 2887286 NR Description: H protein [Flaveria anomala]
  misc_feature (32)..(187): Homolog of NCBI NO: 2499417 NR Description: Glycine cleavage system H protein, mitochondrial
  misc_feature (32)..(187): Homolog of NCBI NO: 2147453 NR Description: glycine cleavage system protein H precursor
  misc_feature (32)..(187): Homolog of NCBI NO: 3688309 NR Description: H-Protein precursor [Flaveria pringlei]
  misc_feature (32)..(187): Homolog of NCBI NO: 29124971 NR Description: glycine decarboxylase complex H-protein [Populus
  misc_feature (32)..(187): Homolog of NCBI NO: 15226906 NR Description: glycine decarboxylase complex H-protein
RKNIIISRSVSALFLSHCCCCVSVRDLSNEKMACRLFWASRVASHLRISVAQRGFSSVVLKDLKYADSHEWVKIDGNKATFGITDHAQDHLGDVVYVELPDVGHSVSQGKSFGAVESVKATSDINSPVSGKVVEVNEELTESPGLVNSSPYEQGWIIKVELSDAGEAEKLMDSDKYSKFCEEEDAKH

SEQ ID NO: 44607 - protein, 156 aa, Arabidopsis thaliana
  peptide (1)..(156): Ceres Seq. ID no. 12466248
  misc_feature (32)..(152): Pfam Name: Glycine cleavage H-protein Pfam Description: Glycine cleavage H-protein
  misc_feature (1)..(154): Homolog of NCBI NO: 1362140 NR Description: H-protein precursor - Flaveria trinervia
  misc_feature (1)..(156): Homolog of NCBI NO: 15223217 NR Description: glycine cleavage system H protein precursor,
  misc_feature (2)..(156): Homolog of NCBI NO: 2119600 NR Description: glycine cleavage system protein H precursor
  misc_feature (1)..(156): Homolog of NCBI NO: 1346118 NR Description: Glycine cleavage system H protein, mitochondrial
  misc_feature (1)..(156): Homolog of NCBI NO: 2499417 NR Description: Glycine cleavage system H protein, mitochondrial
  misc_feature (1)..(156): Homolog of NCBI NO: 2887286 NR Description: H protein [Flaveria anomala]
  misc_feature (1)..(156): Homolog of NCBI NO: 2147453 NR Description: glycine cleavage system protein H precursor
  misc_feature (1)..(156): Homolog of NCBI NO: 3688309 NR Description: H-Protein precursor [Flaveria pringlei]
  misc_feature (1)..(156): Homolog of NCBI NO: 29124971 NR Description: glycine decarboxylase complex H-protein [Populus
  misc_feature (1)..(156): Homolog of NCBI NO: 15226906 NR Description: glycine decarboxylase complex H-protein
MACRLFWASRVASHLRISVAQRGFSSVVLKDLKYADSHEWVKIDGNKATFGITDHAQDHLGDVVYVELPDVGHSVSQGKSFGAVESVKATSDINSPVSGKVVEVNEELTESPGLVNSSPYEQGWIIKVELSDAGEAEKLMDSDKYSKFCEEEDAKH

SEQ ID NO: 44608 - DNA, 1571 bp, Arabidopsis thaliana
  misc_feature (1)..(1571): Ceres Seq. ID no. 12488514
  misc_feature: MA Experiment ID: 20000180 Result: Down-regulated in Transcription
  misc_feature: MA Experiment 20000180 PARAMETER Experiment Name: At_Germinating_Seeds_P Parameter: Age (hr) Value: 24 vs. 0
  misc_feature: MA Experiment 20000180 PARAMETER Experiment Name: At_Germinating_Seeds_P Parameter: Tissue Value: Germinating Seeds
  misc_feature: MA Experiment ID: 20000460 Result: Up-regulated in Transcription
  misc_feature: MA Experiment 20000460 PARAMETER Experiment Name: At_10percent_PEG_P Parameter: Age (day) Value: 12
  misc_feature: MA Experiment 20000460 PARAMETER Experiment Name: At_10percent_PEG_P Parameter: Organism Value: A. thaliana
  misc_feature: MA Experiment 20000460 PARAMETER Experiment Name: At_10percent_PEG_P Parameter: Plant Line Value: WS
  misc_feature: MA Experiment 20000460 PARAMETER Experiment Name: At_10percent_PEG_P Parameter: Timepoint (day) Value: 12
  misc_feature: MA Experiment 20000460 PARAMETER Experiment Name: At_10percent_PEG_P Parameter: Tissue Value: Whole Plant
  misc_feature: MA Experiment 20000460 PARAMETER Experiment Name: At_10percent_PEG_P Parameter: Treatment Value: 10percent PEG vs. No Treatment
  misc_feature: MA Experiment ID: 20000527 Result: Up-regulated in Transcription
  misc_feature: MA Experiment 20000527 PARAMETER Experiment Name: At_10percent_PEG_P Parameter: Age (day) Value: 20
  misc_feature: MA Experiment 20000527 PARAMETER Experiment Name: At_10percent_PEG_P Parameter: Organism Value: A. thaliana
  misc_feature: MA Experiment 20000527 PARAMETER Experiment Name: At_10percent_PEG_P Parameter: Plant Line Value: WS
  misc_feature: MA Experiment 20000527 PARAMETER Experiment Name: At_10percent_PEG_P Parameter: Timepoint (day) Value: 20
  misc_feature: MA Experiment 20000527 PARAMETER Experiment Name: At_10percent_PEG_P Parameter: Tissue Value: Whole Plant
  misc_feature: MA Experiment 20000527 PARAMETER Experiment Name: At_10percent_PEG_P Parameter: Treatment Value: 10percent PEG vs. No Treatment
  misc_feature: MA Experiment ID: 20001248 Result: Up-regulated in Transcription
  misc_feature: MA Experiment 20001248 PARAMETER Experiment Name: At_Far-red-induction_P Parameter: Age (day) Value: 7
  misc_feature: MA Experiment 20001248 PARAMETER Experiment Name: At_Far-red-induction_P Parameter: Light Value: Far-red vs. White
  misc_feature: MA Experiment 20001248 PARAMETER Experiment Name: At_Far-red-induction_P Parameter: Organism Value: A. thaliana
  misc_feature: MA Experiment 20001248 PARAMETER Experiment Name: At_Far-red-induction_P Parameter: Plant Line Value: Columbia
  misc_feature: MA Experiment 20001248 PARAMETER Experiment Name: At_Far-red-induction_P Parameter: Timepoint (hr) Value: 4
  misc_feature: MA Experiment 20001248 PARAMETER Experiment Name: At_Far-red-induction_P Parameter: Tissue Value: Whole Plant
  misc_feature: MA Experiment ID: 20001451 Result: Down-regulated in Transcription
  misc_feature: MA Experiment 20001451 PARAMETER Experiment Name: At_Far-red-induction_P Parameter: Age (day) Value: 7
  misc_feature: MA Experiment 20001451 PARAMETER Experiment Name: At_Far-red-induction_P Parameter: Light Value: Far-red vs. White
  misc_feature: MA Experiment 20001451 PARAMETER Experiment Name: At_Far-red-induction_P Parameter: Organism Value: A. thaliana
  misc_feature: MA Experiment 20001451 PARAMETER Experiment Name: At_Far-red-induction_P Parameter: Plant Line Value: Columbia
  misc_feature: MA Experiment 20001451 PARAMETER Experiment Name: At_Far-red-induction_P Parameter: Timepoint (hr) Value: 24
  misc_feature: MA Experiment 20001451 PARAMETER Experiment Name: At_Far-red-induction_P Parameter: Tissue Value: Whole Plant
  misc_feature: MA Experiment ID: 20001554 Result: Down-regulated in Transcription
  misc_feature: MA Experiment 20001554 PARAMETER Experiment Name: At_Drought_Soil_Dry_P Parameter: Age (day) Value: 21
  misc_feature: MA Experiment 20001554 PARAMETER Experiment Name: At_Drought_Soil_Dry_P Parameter: Organism Value: A. thaliana
  misc_feature: MA Experiment 20001554 PARAMETER Experiment Name: At_Drought_Soil_Dry_P Parameter: Plant Line Value: WS
  misc_feature: MA Experiment 20001554 PARAMETER Experiment Name: At_Drought_Soil_Dry_P Parameter: Post Timepoint (hr) Value: None
  misc_feature: MA Experiment 20001554 PARAMETER Experiment Name: At_Drought_Soil_Dry_P Parameter: Post-Treatment Value: None
  misc_feature: MA Experiment 20001554 PARAMETER Experiment Name: At_Drought_Soil_Dry_P Parameter: Timepoint (day) Value: 7
  misc_feature: MA Experiment 20001554 PARAMETER Experiment Name: At_Drought_Soil_Dry_P Parameter: Treatment Value: Drought vs. No Drought
  misc_feature: MA Experiment ID: 20001555 Result: Down-regulated in Transcription
  misc_feature: MA Experiment 20001555 PARAMETER Experiment Name: At_Drought_Soil_Dry_P Parameter: Age (day) Value: 24
  misc_feature: MA Experiment 20001555 PARAMETER Experiment Name: At_Drought_Soil_Dry_P Parameter: Organism Value: A. thaliana
  misc_feature: MA Experiment 20001555 PARAMETER Experiment Name: At_Drought_Soil_Dry_P Parameter: Plant Line Value: WS
  misc_feature: MA Experiment 20001555 PARAMETER Experiment Name: At_Drought_Soil_Dry_P Parameter: Post Timepoint (hr) Value: None
  misc_feature: MA Experiment 20001555 PARAMETER Experiment Name: At_Drought_Soil_Dry_P Parameter: Post-Treatment Value: None
  misc_feature: MA Experiment 20001555 PARAMETER Experiment Name: At_Drought_Soil_Dry_P Parameter: Timepoint (day) Value: 10
  misc_feature: MA Experiment 20001555 PARAMETER Experiment Name: At_Drought_Soil_Dry_P Parameter: Treatment Value: Drought vs. No Drought
  misc_feature: MA Experiment ID: 20001556 Result: Down-regulated in Transcription
  misc_feature: MA Experiment 20001556 PARAMETER Experiment Name: At_Drought_Soil_Dry_P Parameter: Age (day) Value: 26
  misc_feature: MA Experiment 20001556 PARAMETER Experiment Name: At_Drought_Soil_Dry_P Parameter: Organism Value: A. thaliana
  misc_feature: MA Experiment 20001556 PARAMETER Experiment Name: At_Drought_Soil_Dry_P Parameter: Plant Line Value: WS
  misc_feature: MA Experiment 20001556 PARAMETER Experiment Name: At_Drought_Soil_Dry_P Parameter: Post Timepoint (hr) Value: None
  misc_feature: MA Experiment 20001556 PARAMETER Experiment Name: At_Drought_Soil_Dry_P Parameter: Post-Treatment Value: None
  misc_feature: MA Experiment 20001556 PARAMETER Experiment Name: At_Drought_Soil_Dry_P Parameter: Timepoint (day) Value: 12
  misc_feature: MA Experiment 20001556 PARAMETER Experiment Name: At_Drought_Soil_Dry_P Parameter: Treatment Value: Drought vs. No Drought
  misc_feature: MA Experiment ID: 20001557 Result: Up-regulated in Transcription
  misc_feature: MA Experiment 20001557 PARAMETER Experiment Name: At_Drought_Soil_Dry_P Parameter: Age (day) Value: 27
  misc_feature: MA Experiment 20001557 PARAMETER Experiment Name: At_Drought_Soil_Dry_P Parameter: Organism Value: A. thaliana
  misc_feature: MA Experiment 20001557 PARAMETER Experiment Name: At_Drought_Soil_Dry_P Parameter: Plant Line Value: WS
  misc_feature: MA Experiment 20001557 PARAMETER Experiment Name: At_Drought_Soil_Dry_P Parameter: Post Timepoint (hr) Value: 3
  misc_feature: MA Experiment 20001557 PARAMETER Experiment Name: At_Drought_Soil_Dry_P Parameter: Post-Treatment Value: Re-Water vs. No Drought
  misc_feature: MA Experiment 20001557 PARAMETER Experiment Name: At_Drought_Soil_Dry_P Parameter: Timepoint (day) Value: 13
  misc_feature: MA Experiment 20001557 PARAMETER Experiment Name: At_Drought_Soil_Dry_P Parameter: Treatment Value: Drought vs. No Drought
  misc_feature: MA Experiment ID: 20001911 Result: Down-regulated in Transcription
  misc_feature: MA Experiment 20001911 PARAMETER Experiment Name: At_Drought_Reproduction_P Parameter: Age (day) Value: 40
  misc_feature: MA Experiment 20001911 PARAMETER Experiment Name: At_Drought_Reproduction_P Parameter: Organism Value: A. thaliana
  misc_feature: MA Experiment 20001911 PARAMETER Experiment Name: At_Drought_Reproduction_P Parameter: Plant Line Value: WS
  misc_feature: MA Experiment 20001911 PARAMETER Experiment Name: At_Drought_Reproduction_P Parameter: Timepoint (day) Value: 10
  misc_feature: MA Experiment 20001911 PARAMETER Experiment Name: At_Drought_Reproduction_P Parameter: Tissue Value: Flowers
  misc_feature: MA Experiment 20001911 PARAMETER Experiment Name: At_Drought_Reproduction_P Parameter: Treatment Value: Drought vs. No Drought
agaagtgatattaaagtgcttttgagctgtctcgtagaaaccatgaaaccttaataaaagcaaccttgtcttcaacattctccatcttcctcctcacttaatccccaagttcacacttcaaatccactctttctatttctctccttcttcttctatgtctcgcctcctccctcctcatctctccgtcaaccttcctaccatggagaaaactacttcttccgagttaaccccaactcgactcggttttcctaacgagttcccttacgagttcgactctccttccttctcccctggtttcacttctcccggtgactccactgagacggaagacgaaagcagtgatgacgaggaagacttcctcgctgggttaactcgccgactcgctccttcgactcagcgtcttccttcccctctcttcaagtctgaggagaaacgtcaagttgcagctacttcaccacagtcaacactgagtggactcggaagcttttcaaactcaggaagtagaagccctatccttccatctccaccggctcctacgtcatcatttcgtagagacaacgcgtgggatgtgatttctgcggctgctggagaagtcgctagacttaagctcggaagctacgagcctcatcaccttccccttcaaacccctgagtctcttctccgccgtcaaaacgctgccatacatgctgaactccaacaccagcgtctcatcgaacagatgtggctctgctctgctcagtcaagattcaagctctcagagaatcgtatcccaaggagagtagttaatgaagaaggcttatttgagaatccgagatacgtgagacgcaacaatcctacgtggttgcctccgcaacaagccgcagctcctttgaaacgtccttctgctggaaccggtgtttttcttccccggcgatacccatcggccgccccttccgattccctgaaaacaccagtcaacactccagctatgttgcagcctaaagtgaaacctcaaaatctcaactttgatgagttcaccaatattgttgggccaaggcgtagccaattcgattacgagtgcatgttggcgagaagtacagtacttgctcgtcagggaaatttcagagcagttagtggtggtggtcttccacaggattggatgtactgatgttgttggagttttagctgttgtttttgtcttacaagttcgaaattcggaaggagcgtcttagtttagaaggtggttcggtttaggttatagttgaactagtgaagtttgcgttctggttagtaataaggatttgaattataagaataaatttagggggatattcaagtttgtattaataaatatatatatatatatatatatttatgtatttttagttactaagaccaagctctctgtaatttttttgttgaccttgggagggtttttaaggagtggagtggggaaattgaaaatttgttgggtgggatttgttatttgtgatacataaatagtgttttctgctatttttggtaaaatctaatgggtctgtagtaaaaacatcggaattattttgtttgtttattaataattaattattgat

SEQ ID NO: 44609 - protein, 330 aa, Arabidopsis thaliana
  peptide (1)..(330): Ceres Seq. ID no. 12488515
  misc_feature (229)..(264): Homolog of NCBI NO: 15228172 NR Description: putative protein; protein id: At3g55690.1
  misc_feature (28)..(177): Homolog of NCBI NO: 15228172 NR Description: putative protein; protein id: At3g55690.1
  misc_feature (1)..(330): Homolog of NCBI NO: 18405186 NR Description: expressed protein
  misc_feature (229)..(264): Homolog of NCBI NO: 15228172 NR Description: putative protein; protein id: At3g55690.1
  misc_feature (28)..(177): Homolog of NCBI NO: 15228172 NR Description: putative protein; protein id: At3g55690.1
  misc_feature (1)..(330): Homolog of NCBI NO: 18405186 NR Description: expressed protein
MSRLLPPHLSVNLPTMEKTTSSELTPTRLGFPNEFPYEFDSPSFSPGFTSPGDSTETEDESSDDEEDFLAGLTRRLAPSTQRLPSPLFKSEEKRQVAATSPQSTLSGLGSFSNSGSRSPILPSPPAPTSSFRRDNAWDVISAAAGEVARLKLGSYEPHHLPLQTPESLLRRQNAAIHAELQHQRLIEQMWLCSAQSRFKLSENRIPRRVVNEEGLFENPRYVRRNNPTWLPPQQAAAPLKRPSAGTGVFLPRRYPSAAPSDSLKTPVNTPAMLQPKVKPQNLNFDEFTNIVGPRRSQFDYECMLARSTVLARQGNFRAVSGGGLPQDWMY

SEQ ID NO: 44610 - protein, 315 aa, Arabidopsis thaliana
  peptide (1)..(315): Ceres Seq. ID no. 12488516
  misc_feature (214)..(249): Homolog of NCBI NO: 15228172 NR Description: putative protein; protein id: At3g55690.1
  misc_feature (13)..(162): Homolog of NCBI NO: 15228172 NR Description: putative protein; protein id: At3g55690.1
  misc_feature (1)..(315): Homolog of NCBI NO: 18405186 NR Description: expressed protein
  misc_feature (214)..(249): Homolog of NCBI NO: 15228172 NR Description: putative protein; protein id: At3g55690.1
  misc_feature (13)..(162): Homolog of NCBI NO: 15228172 NR Description: putative protein; protein id: At3g55690.1
  misc_feature (1)..(315): Homolog of NCBI NO: 18405186 NR Description: expressed protein
MEKTTSSELTPTRLGFPNEFPYEFDSPSFSPGFTSPGDSTETEDESSDDEEDFLAGLTRRLAPSTQRLPSPLFKSEEKRQVAATSPQSTLSGLGSFSNSGSRSPILPSPPAPTSSFRRDNAWDVISAAAGEVARLKLGSYEPHHLPLQTPESLLRRQNAAIHAELQHQRLIEQMWLCSAQSRFKLSENRIPRRVVNEEGLFENPRYVRRNNPTWLPPQQAAAPLKRPSAGTGVFLPRRYPSAAPSDSLKTPVNTPAMLQPKVKPQNLNFDEFTNIVGPRRSQFDYECMLARSTVLARQGNFRAVSGGGLPQDWMY

SEQ ID NO: 44611 - DNA, 955 bp, Arabidopsis thaliana
  misc_feature (1)..(955): Ceres Seq. ID no. 13503845
  misc_feature: MA Experiment ID: 20000184 Result: Down-regulated in Transcription
  misc_feature: MA Experiment 20000184 PARAMETER Experiment Name: At_Shoots__P Parameter: Age (day) Value: 7
  misc_feature: MA Experiment 20000184 PARAMETER Experiment Name: At_Shoots__P Parameter: Tissue Value: Shoots vs. Whole Plant
  misc_feature: MA Experiment ID: 20000264 Result: Down-regulated in Transcription
  misc_feature: MA Experiment 20000264 PARAMETER Experiment Name: At_Open_Flower_P Parameter: Age (day) Value: 21
  misc_feature: MA Experiment 20000264 PARAMETER Experiment Name: At_Open_Flower_P Parameter: Plant Line Value: WS
  misc_feature: MA Experiment 20000264 PARAMETER Experiment Name: At_Open_Flower_P Parameter: Tissue Value: Open Flower vs. Whole Plant
  misc_feature: MA Experiment ID: 20000495 Result: Down-regulated in Transcription
  misc_feature: MA Experiment 20000495 PARAMETER Experiment Name: At_Guard_Cells_P Parameter: Harvest Date Value: 8/2/2002
  misc_feature: MA Experiment 20000495 PARAMETER Experiment Name: At_Guard_Cells_P Parameter: Organism Value: A. thaliana
  misc_feature: MA Experiment 20000495 PARAMETER Experiment Name: At_Guard_Cells_P Parameter: Tissue Value: Guard Cells vs. Leaves
  misc_feature: MA Experiment ID: 20001451 Result: Down-regulated in Transcription
  misc_feature: MA Experiment 20001451 PARAMETER Experiment Name: At_Far-red-induction_P Parameter: Age (day) Value: 7
  misc_feature: MA Experiment 20001451 PARAMETER Experiment Name: At_Far-red-induction_P Parameter: Light Value: Far-red vs. White
  misc_feature: MA Experiment 20001451 PARAMETER Experiment Name: At_Far-red-induction_P Parameter: Organism Value: A. thaliana
  misc_feature: MA Experiment 20001451 PARAMETER Experiment Name: At_Far-red-induction_P Parameter: Plant Line Value: Columbia
  misc_feature: MA Experiment 20001451 PARAMETER Experiment Name: At_Far-red-induction_P Parameter: Timepoint (hr) Value: 24
  misc_feature: MA Experiment 20001451 PARAMETER Experiment Name: At_Far-red-induction_P Parameter: Tissue Value: Whole Plant
agaaattttactttttctttttgggaacccgtgatcaaatgataggaggaacaaatcaggagagacacaattctttattgacagagaaattgataatcgaagaaccctattaccaccgattctcctcttttctctctgtttcgtcgtcatctagggtttcctaatgcatgagttctctactgttgatggttttgcggagataaacgagagcttagcggagatgataaagtacattgcaaatgaaccctcagtggggctttactacattcaacagcacatccgaaacgcagcaccgaatgttattaatctcaacaacaacgttttggagaagtcccgtgaaacaggcttgcataccgaagacttggaagattctatagccatggtgaaatctatgaaagactgtggttcacctattgctgatgagatgataggagacattaagaactctttagcgataatgtcttcgaaacaaccgaggagaggggtcatcctcaactccacaagtccttggagcagatccagcagtataacaacaagaacgcgtggttctgataacagccaggataatagtgaaagcagcaactatttcacatcagtcttcatgacggctaaggagaaggcaagcaacatcaaatggccacaacttgatttcaaagaacaaaagtcagaggctgaccccaatgtgcaaagcaatgagttaaaagaagaagaagaagaggactcagggaaaggtgaacatattgtggagacaacaaagtttgaggagttcaaggcaggtaaagaagcgagtctcaaggcatggcttggagatatggatgggaatgtggatgttggtggtcgtgttgccgagagaatttagatgttttttcattaatgtcgctgtggttacgggagactgcttatttatgtaaatcattcacttacacagagaaaaaagagttaaaattttgacttt

SEQ ID NO: 44612 - protein, 231 aa, Arabidopsis thaliana
  peptide (1)..(231): Ceres Seq. ID no. 13503846
  misc_feature (1)..(231): Homolog of NCBI NO: 15225042 NR Description: expressed protein [Arabidopsis thaliana]
MHEFSTVDGFAEINESLAEMIKYIANEPSVGLYYIQQHIRNAAPNVINLNNNVLEKSRETGLHTEDLEDSIAMVKSMKDCGSPIADEMIGDIKNSLAIMSSKQPRRGVILNSTSPWSRSSSITTRTRGSDNSQDNSESSNYFTSVFMTAKEKASNIKWPQLDFKEQKSEADPNVQSNELKEEEEEDSGKGEHIVETTKFEEFKAGKEASLKAWLGDMDGNVDVGGRVAERI

SEQ ID NO: 44613 - protein, 212 aa, Arabidopsis thaliana
  peptide (1)..(212): Ceres Seq. ID no. 13503847
  misc_feature (1)..(212): Homolog of NCBI NO: 15225042 NR Description: expressed protein [Arabidopsis thaliana]
MIKYIANEPSVGLYYIQQHIRNAAPNVINLNNNVLEKSRETGLHTEDLEDSIAMVKSMKDCGSPIADEMIGDIKNSLAIMSSKQPRRGVILNSTSPWSRSSSITTRTRGSDNSQDNSESSNYFTSVFMTAKEKASNIKWPQLDFKEQKSEADPNVQSNELKEEEEEDSGKGEHIVETTKFEEFKAGKEASLKAWLGDMDGNVDVGGRVAERI

SEQ ID NO: 44614 - protein, 159 aa, Arabidopsis thaliana
  peptide (1)..(159): Ceres Seq. ID no. 13503848
  misc_feature (1)..(159): Homolog of NCBI NO: 15225042 NR Description: expressed protein [Arabidopsis thaliana]
MVKSMKDCGSPIADEMIGDIKNSLAIMSSKQPRRGVILNSTSPWSRSSSITTRTRGSDNSQDNSESSNYFTSVFMTAKEKASNIKWPQLDFKEQKSEADPNVQSNELKEEEEEDSGKGEHIVETTKFEEFKAGKEASLKAWLGDMDGNVDVGGRVAERI

SEQ ID NO: 44615 - DNA, 1260 bp, Arabidopsis thaliana
  misc_feature (1)..(1260): Ceres Seq. ID no. 13503078
  misc_feature: MA Experiment ID: 108434 Result: Up-regulated in Transcription
  misc_feature: MA Experiment 108434 PARAMETER Experiment Name: At_Root_Tips_cDNA_P Parameter: Tissue Value: Root Tips
  misc_feature: MA Experiment ID: 108473 Result: Down-regulated in Transcription
  misc_feature: MA Experiment 108473 PARAMETER Experiment Name: At_Drought_Flowers_cDNA_P Parameter: Timepoint (hr) Value: 7 d
  misc_feature: MA Experiment 108473 PARAMETER Experiment Name: At_Drought_Flowers_cDNA_P Parameter: Tissue Value: Flower
  misc_feature: MA Experiment 108473 PARAMETER Experiment Name: At_Drought_Flowers_cDNA_P Parameter: Treatment Value: Drought vs. No Drought
  misc_feature: MA Experiment ID: 108501 Result: Down-regulated in Transcription
  misc_feature: MA Experiment 108501 PARAMETER Experiment Name: At_ap2_floral_buds_cDNA_P Parameter: Plant Line Value: ap2 (Ler.)
  misc_feature: MA Experiment 108501 PARAMETER Experiment Name: At_ap2_floral_buds_cDNA_P Parameter: Tissue Value: Closed Flower
  misc_feature: MA Experiment ID: 108595 Result: Up-regulated in Transcription
  misc_feature: MA Experiment 108595 PARAMETER Experiment Name: At_Ler-pi_Ovule_cDNA_P Parameter: Plant Line Value: null
  misc_feature: MA Experiment ID: 20000171 Result: Up-regulated in Transcription
  misc_feature: MA Experiment 20000171 PARAMETER Experiment Name: At_42deg_Heat_P Parameter: Age (day) Value: 14
  misc_feature: MA Experiment 20000171 PARAMETER Experiment Name: At_42deg_Heat_P Parameter: Organism Value: A. thaliana
  misc_feature: MA Experiment 20000171 PARAMETER Experiment Name: At_42deg_Heat_P Parameter: Plant Line Value: WS
  misc_feature: MA Experiment 20000171 PARAMETER Experiment Name: At_42deg_Heat_P Parameter: Temperature (deg C) Value: 42 vs. 22
  misc_feature: MA Experiment 20000171 PARAMETER Experiment Name: At_42deg_Heat_P Parameter: Timepoint (hr) Value: 1
  misc_feature: MA Experiment 20000171 PARAMETER Experiment Name: At_42deg_Heat_P Parameter: Tissue Value: Aerial
  misc_feature: MA Experiment ID: 20000184 Result: Down-regulated in Transcription
  misc_feature: MA Experiment 20000184 PARAMETER Experiment Name: At_Shoots__P Parameter: Age (day) Value: 7
  misc_feature: MA Experiment 20000184 PARAMETER Experiment Name: At_Shoots__P Parameter: Tissue Value: Shoots vs. Whole Plant
  misc_feature: MA Experiment ID: 20000185 Result: Down-regulated in Transcription
  misc_feature: MA Experiment 20000185 PARAMETER Experiment Name: At_Roots__P Parameter: Age (day) Value: 7 vs. 21
  misc_feature: MA Experiment 20000185 PARAMETER Experiment Name: At_Roots__P Parameter: Organism Value: A. thaliana
  misc_feature: MA Experiment 20000185 PARAMETER Experiment Name: At_Roots__P Parameter: Tissue Value: Roots vs. Whole Plant
  misc_feature: MA Experiment ID: 20000265 Result: Up-regulated in Transcription
  misc_feature: MA Experiment 20000265 PARAMETER Experiment Name: At_Open_Flower_P Parameter: Age (day) Value: 21
  misc_feature: MA Experiment 20000265 PARAMETER Experiment Name: At_Open_Flower_P Parameter: Plant Line Value: WS
  misc_feature: MA Experiment 20000265 PARAMETER Experiment Name: At_Open_Flower_P Parameter: Tissue Value: Closed Flower vs. Whole Plant
  misc_feature: MA Experiment ID: 20000286 Result: Up-regulated in Transcription
  misc_feature: MA Experiment 20000286 PARAMETER Experiment Name: At_Open_Flower_P Parameter: Age (day) Value: 21
  misc_feature: MA Experiment 20000286 PARAMETER Experiment Name: At_Open_Flower_P Parameter: Plant Line Value: WS
  misc_feature: MA Experiment 20000286 PARAMETER Experiment Name: At_Open_Flower_P Parameter: Tissue Value: Half Open vs. Whole Plant
  misc_feature: MA Experiment ID: 20000438 Result: Down-regulated in Transcription
  misc_feature: MA Experiment 20000438 PARAMETER Experiment Name: At_Shoots__P Parameter: Age (day) Value: 14
  misc_feature: MA Experiment 20000438 PARAMETER Experiment Name: At_Shoots__P Parameter: Tissue Value: Shoots vs. Whole Plant
  misc_feature: MA Experiment ID: 20000439 Result: Down-regulated in Transcription
  misc_feature: MA Experiment 20000439 PARAMETER Experiment Name: At_Roots__P Parameter: Age (day) Value: 14 vs. 21
  misc_feature: MA Experiment 20000439 PARAMETER Experiment Name: At_Roots__P Parameter: Organism Value: A. thaliana
  misc_feature: MA Experiment 20000439 PARAMETER Experiment Name: At_Roots__P Parameter: Tissue Value: Roots vs. Whole Plant
  misc_feature: MA Experiment ID: 20000495 Result: Down-regulated in Transcription
  misc_feature: MA Experiment 20000495 PARAMETER Experiment Name: At_Guard_Cells_P Parameter: Harvest Date Value: 8/2/2002
  misc_feature: MA Experiment 20000495 PARAMETER Experiment Name: At_Guard_Cells_P Parameter: Organism Value: A. thaliana
  misc_feature: MA Experiment 20000495 PARAMETER Experiment Name: At_Guard_Cells_P Parameter: Tissue Value: Guard Cells vs. Leaves
  misc_feature: MA Experiment ID: 20001248 Result: Down-regulated in Transcription
  misc_feature: MA Experiment 20001248 PARAMETER Experiment Name: At_Far-red-induction_P Parameter: Age (day) Value: 7
  misc_feature: MA Experiment 20001248 PARAMETER Experiment Name: At_Far-red-induction_P Parameter: Light Value: Far-red vs. White
  misc_feature: MA Experiment 20001248 PARAMETER Experiment Name: At_Far-red-induction_P Parameter: Organism Value: A. thaliana
  misc_feature: MA Experiment 20001248 PARAMETER Experiment Name: At_Far-red-induction_P Parameter: Plant Line Value: Columbia
  misc_feature: MA Experiment 20001248 PARAMETER Experiment Name: At_Far-red-induction_P Parameter: Timepoint (hr) Value: 4
  misc_feature: MA Experiment 20001248 PARAMETER Experiment Name: At_Far-red-induction_P Parameter: Tissue Value: Whole Plant
  misc_feature: MA Experiment ID: 20001910 Result: Down-regulated in Transcription
  misc_feature: MA Experiment 20001910 PARAMETER Experiment Name: At_Drought_Reproduction_P Parameter: Age (day) Value: 37
  misc_feature: MA Experiment 20001910 PARAMETER Experiment Name: At_Drought_Reproduction_P Parameter: Organism Value: A. thaliana
  misc_feature: MA Experiment 20001910 PARAMETER Experiment Name: At_Drought_Reproduction_P Parameter: Plant Line Value: WS
  misc_feature: MA Experiment 20001910 PARAMETER Experiment Name: At_Drought_Reproduction_P Parameter: Timepoint (day) Value: 7
  misc_feature: MA Experiment 20001910 PARAMETER Experiment Name: At_Drought_Reproduction_P Parameter: Tissue Value: Flowers
  misc_feature: MA Experiment 20001910 PARAMETER Experiment Name: At_Drought_Reproduction_P Parameter: Treatment Value: Drought vs. No Drought
aatctcaaaattcagtccttttggtgtctcatatgcgcttatagagagatttagcactaaggaggcgcggagatgagggcgaaagctgcttcggggaaagccataatagtgctttgtctagccagctttcttgcaggctcactgttcatgagtcgaactttgagtcgctcttacatacctgaagaagaagatcaccatctcacaaagcatttgtccaaacatttagagattcaaaaggactgcgatgaacataaacgcaaattgatagaaagcaaatccagagacataataggagaagtatcgagaactcaccaagcagtaaaatcattggagagaacaatgtcaacattggagatggagttagcagcagcacgtaccagcgatagaagcagtgagttctggagcgaacggtcggcgaaaaaccagagccgtctgcagaaagtgtttgcagtgataggcattaacacagcattcagcagcaagaaaagacgtgactcggtgagacaaacgtggatgccaacaggagaaaagctaaagaaaatcgagaaagagaaagggattgttgtaaggtttgtgataggacacagtgcaacaccaggaggagtattagataaagccatagatgaagaagattcagagcataaagatttcttaagactaaaacacattgaaggatatcaccaactctcgacaaagacaagactgtacttctcaacagcaactgcaatgtatgacgcagagttctacgtgaaagtggatgatgatgttcatgtcaatttaggtatgcttgttacaacacttgcgagatatcaatcaagaccaaggatttacattggatgcatgaagtctggtcctgttctttcacaaaaaggagtgaagtaccacgagccagagttttggaaatttggagaagaaggtaacaaatactttaggcatgcaacaggtcaaatttacgcaatctctaaagacttagctacatatatctccactaaccaaggaatactacaccggtacgcgaacgaggatgtgtcgttaggagcatggatgttagggttagaagtggagcatgtggacgagaggtcaatgtgttgtggaactccacctgattgtcaatggaaagcacaagctggtaacgtatgtgctgcgtcgttcgattggtcttgcagcgggatttgtaagtccgttgaccggatggctcgtgtgcatcgagcttgtgctgaaggagacactcctctagctaattttcgcttcttcgtctga

SEQ ID NO: 44616 - protein, 395 aa, Arabidopsis thaliana
  peptide (1)..(395): Ceres Seq. ID no. 13503079
  misc_feature (138)..(336): Pfam Name: Galactosyltransferase Pfam Description: Galactosyltransferase
  misc_feature (7)..(393): Homolog of NCBI NO: 15225684 NR Description: galactosyltransferase family [Arabidopsis
  misc_feature (1)..(388): Homolog of NCBI NO: 18416895 NR Description: galactosyltransferase family [Arabidopsis
  misc_feature (4)..(390): Homolog of NCBI NO: 34365705 NR Description: At1g77810 [Arabidopsis thaliana]
  misc_feature (7)..(393): Homolog of NCBI NO: 15220440 NR Description: galactosyltransferase family [Arabidopsis
  misc_feature (4)..(390): Homolog of NCBI NO: 30699558 NR Description: Avr9 elicitor response protein -related
  misc_feature (4)..(390): Homolog of NCBI NO: 12323294 NR Description: putative (Avr9) elicitor response protein;
  misc_feature (7)..(385): Homolog of NCBI NO: 15223337 NR Description: galactosyltransferase family [Arabidopsis
  misc_feature (8)..(384): Homolog of NCBI NO: 34907342 NR Description: putative elicitor response protein
  misc_feature (7)..(393): Homolog of NCBI NO: 4138265 NR Description: Avr9 elicitor response protein [Nicotiana tabacum]
  misc_feature (1)..(395): Homolog of NCBI NO: 15217544 NR Description: galactosyltransferase family [Arabidopsis
MRAKAASGKAIIVLCLASFLAGSLFMSRTLSRSYIPEEEDHHLTKHLSKHLEIQKDCDEHKRKLIESKSRDIIGEVSRTHQAVKSLERTMSTLEMELAAARTSDRSSEFWSERSAKNQSRLQKVFAVIGINTAFSSKKRRDSVRQTWMPTGEKLKKIEKEKGIVVRFVIGHSATPGGVLDKAIDEEDSEHKDFLRLKHIEGYHQLSTKTRLYFSTATAMYDAEFYVKVDDDVHVNLGMLVTTLARYQSRPRIYIGCMKSGPVLSQKGVKYHEPEFWKFGEEGNKYFRHATGQIYAISKDLATYISTNQGILHRYANEDVSLGAWMLGLEVEHVDERSMCCGTPPDCQWKAQAGNVCAASFDWSCSGICKSVDRMARVHRACAEGDTPLANFRFFV

SEQ ID NO: 44617 - protein, 370 aa, Arabidopsis thaliana
  peptide (1)..(370): Ceres Seq. ID no. 13503080
  misc_feature (113)..(311): Pfam Name: Galactosyltransferase Pfam Description: Galactosyltransferase
  misc_feature (1)..(368): Homolog of NCBI NO: 15225684 NR Description: galactosyltransferase family [Arabidopsis
  misc_feature (1)..(363): Homolog of NCBI NO: 18416895 NR Description: galactosyltransferase family [Arabidopsis
  misc_feature (1)..(365): Homolog of NCBI NO: 34365705 NR Description: At1g77810 [Arabidopsis thaliana]
  misc_feature (1)..(368): Homolog of NCBI NO: 15220440 NR Description: galactosyltransferase family [Arabidopsis
  misc_feature (1)..(365): Homolog of NCBI NO: 30699558 NR Description: Avr9 elicitor response protein -related
  misc_feature (1)..(365): Homolog of NCBI NO: 12323294 NR Description: putative (Avr9) elicitor response protein;
  misc_feature (1)..(360): Homolog of NCBI NO: 15223337 NR Description: galactosyltransferase family [Arabidopsis
  misc_feature (1)..(359): Homolog of NCBI NO: 34907342 NR Description: putative elicitor response protein
  misc_feature (1)..(368): Homolog of NCBI NO: 4138265 NR Description: Avr9 elicitor response protein [Nicotiana tabacum]
  misc_feature (1)..(370): Homolog of NCBI NO: 15217544 NR Description: galactosyltransferase family [Arabidopsis
MSRTLSRSYIPEEEDHHLTKHLSKHLEIQKDCDEHKRKLIESKSRDIIGEVSRTHQAVKSLERTMSTLEMELAAARTSDRSSEFWSERSAKNQSRLQKVFAVIGINTAFSSKKRRDSVRQTWMPTGEKLKKIEKEKGIVVRFVIGHSATPGGVLDKAIDEEDSEHKDFLRLKHIEGYHQLSTKTRLYFSTATAMYDAEFYVKVDDDVHVNLGMLVTTLARYQSRPRIYIGCMKSGPVLSQKGVKYHEPEFWKFGEEGNKYFRHATGQIYAISKDLATYISTNQGILHRYANEDVSLGAWMLGLEVEHVDERSMCCGTPPDCQWKAQAGNVCAASFDWSCSGICKSVDRMARVHRACAEGDTPLANFRFFV

SEQ ID NO: 44618 - protein, 306 aa, Arabidopsis thaliana
  peptide (1)..(306): Ceres Seq. ID no. 13503081
  misc_feature (49)..(247): Pfam Name: Galactosyltransferase Pfam Description: Galactosyltransferase
  misc_feature (1)..(304): Homolog of NCBI NO: 15225684 NR Description: galactosyltransferase family [Arabidopsis
  misc_feature (1)..(299): Homolog of NCBI NO: 18416895 NR Description: galactosyltransferase family [Arabidopsis
  misc_feature (1)..(301): Homolog of NCBI NO: 34365705 NR Description: At1g77810 [Arabidopsis thaliana]
  misc_feature (1)..(304): Homolog of NCBI NO: 15220440 NR Description: galactosyltransferase family [Arabidopsis
  misc_feature (1)..(301): Homolog of NCBI NO: 30699558 NR Description: Avr9 elicitor response protein -related
  misc_feature (1)..(301): Homolog of NCBI NO: 12323294 NR Description: putative (Avr9) elicitor response protein;
  misc_feature (1)..(296): Homolog of NCBI NO: 15223337 NR Description: galactosyltransferase family [Arabidopsis
  misc_feature (1)..(295): Homolog of NCBI NO: 34907342 NR Description: putative elicitor response protein
  misc_feature (1)..(304): Homolog of NCBI NO: 4138265 NR Description: Avr9 elicitor response protein [Nicotiana tabacum]
  misc_feature (1)..(306): Homolog of NCBI NO: 15217544 NR Description: galactosyltransferase family [Arabidopsis
MSTLEMELAAARTSDRSSEFWSERSAKNQSRLQKVFAVIGINTAFSSKKRRDSVRQTWMPTGEKLKKIEKEKGIVVRFVIGHSATPGGVLDKAIDEEDSEHKDFLRLKHIEGYHQLSTKTRLYFSTATAMYDAEFYVKVDDDVHVNLGMLVTTLARYQSRPRIYIGCMKSGPVLSQKGVKYHEPEFWKFGEEGNKYFRHATGQIYAISKDLATYISTNQGILHRYANEDVSLGAWMLGLEVEHVDERSMCCGTPPDCQWKAQAGNVCAASFDWSCSGICKSVDRMARVHRACAEGDTPLANFRFFV

SEQ ID NO: 44619 - DNA, 887 bp, Arabidopsis thaliana
  misc_feature (1)..(887): Ceres Seq. ID no. 12466239
  misc_feature: MA Experiment ID: 20000179 Result: Up-regulated in Transcription
  misc_feature: MA Experiment 20000179 PARAMETER Experiment Name: At_Germinating_Seeds_P Parameter: Age (hr) Value: 6 vs. 0
  misc_feature: MA Experiment 20000179 PARAMETER Experiment Name: At_Germinating_Seeds_P Parameter: Tissue Value: Germinating Seeds
  misc_feature: MA Experiment ID: 20000180 Result: Up-regulated in Transcription
  misc_feature: MA Experiment 20000180 PARAMETER Experiment Name: At_Germinating_Seeds_P Parameter: Age (hr) Value: 24 vs. 0
  misc_feature: MA Experiment 20000180 PARAMETER Experiment Name: At_Germinating_Seeds_P Parameter: Tissue Value: Germinating Seeds
  misc_feature: MA Experiment ID: 20000185 Result: Up-regulated in Transcription
  misc_feature: MA Experiment 20000185 PARAMETER Experiment Name: At_Roots__P Parameter: Age (day) Value: 7 vs. 21
  misc_feature: MA Experiment 20000185 PARAMETER Experiment Name: At_Roots__P Parameter: Organism Value: A. thaliana
  misc_feature: MA Experiment 20000185 PARAMETER Experiment Name: At_Roots__P Parameter: Tissue Value: Roots vs. Whole Plant
  misc_feature: MA Experiment ID: 20000227 Result: Up-regulated in Transcription
  misc_feature: MA Experiment 20000227 PARAMETER Experiment Name: At_Root-Tips-vs-Tops_P Parameter: Tissue Value: Root Tips vs. Root Tops
  misc_feature: MA Experiment ID: 20000438 Result: Up-regulated in Transcription
  misc_feature: MA Experiment 20000438 PARAMETER Experiment Name: At_Shoots__P Parameter: Age (day) Value: 14
  misc_feature: MA Experiment 20000438 PARAMETER Experiment Name: At_Shoots__P Parameter: Tissue Value: Shoots vs. Whole Plant
  misc_feature: MA Experiment ID: 20001248 Result: Down-regulated in Transcription
  misc_feature: MA Experiment 20001248 PARAMETER Experiment Name: At_Far-red-induction_P Parameter: Age (day) Value: 7
  misc_feature: MA Experiment 20001248 PARAMETER Experiment Name: At_Far-red-induction_P Parameter: Light Value: Far-red vs. White
  misc_feature: MA Experiment 20001248 PARAMETER Experiment Name: At_Far-red-induction_P Parameter: Organism Value: A. thaliana
  misc_feature: MA Experiment 20001248 PARAMETER Experiment Name: At_Far-red-induction_P Parameter: Plant Line Value: Columbia
  misc_feature: MA Experiment 20001248 PARAMETER Experiment Name: At_Far-red-induction_P Parameter: Timepoint (hr) Value: 4
  misc_feature: MA Experiment 20001248 PARAMETER Experiment Name: At_Far-red-induction_P Parameter: Tissue Value: Whole Plant
  misc_feature: MA Experiment ID: 20001451 Result: Up-regulated in Transcription
  misc_feature: MA Experiment 20001451 PARAMETER Experiment Name: At_Far-red-induction_P Parameter: Age (day) Value: 7
  misc_feature: MA Experiment 20001451 PARAMETER Experiment Name: At_Far-red-induction_P Parameter: Light Value: Far-red vs. White
  misc_feature: MA Experiment 20001451 PARAMETER Experiment Name: At_Far-red-induction_P Parameter: Organism Value: A. thaliana
  misc_feature: MA Experiment 20001451 PARAMETER Experiment Name: At_Far-red-induction_P Parameter: Plant Line Value: Columbia
  misc_feature: MA Experiment 20001451 PARAMETER Experiment Name: At_Far-red-induction_P Parameter: Timepoint (hr) Value: 24
  misc_feature: MA Experiment 20001451 PARAMETER Experiment Name: At_Far-red-induction_P Parameter: Tissue Value: Whole Plant
  misc_feature: MA Experiment ID: 20001560 Result: Up-regulated in Transcription
  misc_feature: MA Experiment 20001560 PARAMETER Experiment Name: At_Drought_Soil_Dry_P Parameter: Age (day) Value: 28
  misc_feature: MA Experiment 20001560 PARAMETER Experiment Name: At_Drought_Soil_Dry_P Parameter: Organism Value: A. thaliana
  misc_feature: MA Experiment 20001560 PARAMETER Experiment Name: At_Drought_Soil_Dry_P Parameter: Plant Line Value: WS
  misc_feature: MA Experiment 20001560 PARAMETER Experiment Name: At_Drought_Soil_Dry_P Parameter: Post Timepoint (hr) Value: None
  misc_feature: MA Experiment 20001560 PARAMETER Experiment Name: At_Drought_Soil_Dry_P Parameter: Post-Treatment Value: None
  misc_feature: MA Experiment 20001560 PARAMETER Experiment Name: At_Drought_Soil_Dry_P Parameter: Timepoint (day) Value: 14
  misc_feature: MA Experiment 20001560 PARAMETER Experiment Name: At_Drought_Soil_Dry_P Parameter: Treatment Value: Drought vs. No Drought
  misc_feature: MA Experiment ID: 20001905 Result: Up-regulated in Transcription
  misc_feature: MA Experiment 20001905 PARAMETER Experiment Name: At_Drought_Reproduction_P Parameter: Age (day) Value: 40
  misc_feature: MA Experiment 20001905 PARAMETER Experiment Name: At_Drought_Reproduction_P Parameter: Organism Value: A. thaliana
  misc_feature: MA Experiment 20001905 PARAMETER Experiment Name: At_Drought_Reproduction_P Parameter: Plant Line Value: WS
  misc_feature: MA Experiment 20001905 PARAMETER Experiment Name: At_Drought_Reproduction_P Parameter: Timepoint (day) Value: 10
  misc_feature: MA Experiment 20001905 PARAMETER Experiment Name: At_Drought_Reproduction_P Parameter: Tissue Value: Rosettes
  misc_feature: MA Experiment 20001905 PARAMETER Experiment Name: At_Drought_Reproduction_P Parameter: Treatment Value: Drought vs. No Drought
actttctctctttttaacctttttctaattaccactttcttctccatatacaaaaaaaacagagaactcacaatgtgcgattcagattttctctctcgttgctcttcctacgaagcagacgttgattccgacagcgagatctcgacctccagtttcagttcttgttcgtacagtgaatctgaggaagaagagatcaacaatggttttggtgttgttcagtcgaagaagcaaacgaagaaactggagaagaagaagagtaatgtgttgttagaaggttacgttgtagattcagctgtgaatgatgatttgaagagaaccaagagtttaacggacgatgatctcgaggagcttaagggatgtgtagatctagggtttgggtttaattacgaggagattcctgaactttgtaatactttaccagctcttgagctctgttactcgatgagtcagaagtttattgatcaagatcatcatcaccattcttcttcttcgccagagaagaaatcatcggttcttgattctcctgttagtcctattgctagctggaagatctctagtcctggtgataatcctgatgatgttaaagcaaggttgaaattttgggcacaagctgtggcatgtactgtgaggttatgtacttgaagatgagatttggatttgatcaaccaaaagctgaggaatcaatggaggaggaagaagatggtgaaaccagacaatttgcaggagtgaaatctcttatgagactgacctgcttgaaaacaaccattgttgtagagctctttgctcacactgtatgtataaaaagattaatgatctaagaagattttgctaggacattgttgtaatggatgattaataagagagaaataaataaaactttgttcttt

SEQ ID NO: 44620 - protein, 213 aa, Arabidopsis thaliana
  peptide (1)..(213): Ceres Seq. ID no. 12466240
  misc_feature (58)..(209): Homolog of NCBI NO: 15229330 NR Description: hypothetical protein; protein id: At3g04700.1
  misc_feature (47)..(209): Homolog of NCBI NO: 15223913 NR Description: hypothetical protein; protein id: At1g08790.1
  misc_feature (74)..(188): Homolog of NCBI NO: 34907664 NR Description: P0506A10.18 [Oryza sativa (japonica
  misc_feature (109)..(209): Homolog of NCBI NO: 15228829 NR Description: hypothetical protein; protein id: At3g22690.1
  misc_feature (79)..(189): Homolog of NCBI NO: 25408168 NR Description: hypothetical protein At2g31560 [imported] -
  misc_feature (46)..(206): Homolog of NCBI NO: 15221309 NR Description: unknown protein; protein id: At1g05870.1
  misc_feature (46)..(213): Homolog of NCBI NO: 25406874 NR Description: hypothetical protein [imported] - Arabidopsis
  misc_feature (79)..(213): Homolog of NCBI NO: 30684991 NR Description: expressed protein [Arabidopsis thaliana]
  misc_feature (25)..(213): Homolog of NCBI NO: 30689349 NR Description: expressed protein [Arabidopsis thaliana]
  misc_feature (25)..(210): Homolog of NCBI NO: 25408860 NR Description: hypothetical protein At2g43340 [imported] -
TFSLFNLFLITTFFSIYKKNRELTMCDSDFLSRCSSYEADVDSDSEISTSSFSSCSYSESEEEEINNGFGVVQSKKQTKKLEKKKSNVLLEGYVVDSAVNDDLKRTKSLTDDDLEELKGCVDLGFGFNYEEIPELCNTLPALELCYSMSQKFIDQDHHHHSSSSPEKKSSVLDSPVSPIASWKISSPGDNPDDVKARLKFWAQAVACTVRLCT

SEQ ID NO: 44621 - protein, 189 aa, Arabidopsis thaliana
  peptide (1)..(189): Ceres Seq. ID no. 12466241
  misc_feature (34)..(185): Homolog of NCBI NO: 15229330 NR Description: hypothetical protein; protein id: At3g04700.1
  misc_feature (23)..(185): Homolog of NCBI NO: 15223913 NR Description: hypothetical protein; protein id: At1g08790.1
  misc_feature (50)..(164): Homolog of NCBI NO: 34907664 NR Description: P0506A10.18 [Oryza sativa (japonica
  misc_feature (85)..(185): Homolog of NCBI NO: 15228829 NR Description: hypothetical protein; protein id: At3g22690.1
  misc_feature (55)..(165): Homolog of NCBI NO: 25408168 NR Description: hypothetical protein At2g31560 [imported] -
  misc_feature (22)..(182): Homolog of NCBI NO: 15221309 NR Description: unknown protein; protein id: At1g05870.1
  misc_feature (22)..(189): Homolog of NCBI NO: 25406874 NR Description: hypothetical protein [imported] - Arabidopsis
  misc_feature (55)..(189): Homolog of NCBI NO: 30684991 NR Description: expressed protein [Arabidopsis thaliana]
  misc_feature (1)..(189): Homolog of NCBI NO: 30689349 NR Description: expressed protein [Arabidopsis thaliana]
  misc_feature (1)..(186): Homolog of NCBI NO: 25408860 NR Description: hypothetical protein At2g43340 [imported] -
MCDSDFLSRCSSYEADVDSDSEISTSSFSSCSYSESEEEEINNGFGVVQSKKQTKKLEKKKSNVLLEGYVVDSAVNDDLKRTKSLTDDDLEELKGCVDLGFGFNYEEIPELCNTLPALELCYSMSQKFIDQDHHHHSSSSPEKKSSVLDSPVSPIASWKISSPGDNPDDVKARLKFWAQAVACTVRLCT

SEQ ID NO: 44622 - DNA, 937 bp, Arabidopsis thaliana
  misc_feature (1)..(937): Ceres Seq. ID no. 13503841
  misc_feature: MA Experiment ID: 108577 Result: Down-regulated in Transcription
  misc_feature: MA Experiment 108577 PARAMETER Experiment Name: At_42deg_Heat_cDNA_P Parameter: Temperature (deg C) Value: 42 vs. 22
  misc_feature: MA Experiment 108577 PARAMETER Experiment Name: At_42deg_Heat_cDNA_P Parameter: Timepoint (hr) Value: 6
  misc_feature: MA Experiment 108577 PARAMETER Experiment Name: At_42deg_Heat_cDNA_P Parameter: Tissue Value: Aerial
  misc_feature: MA Experiment ID: 108595 Result: Down-regulated in Transcription
  misc_feature: MA Experiment 108595 PARAMETER Experiment Name: At_Ler-pi_Ovule_cDNA_P Parameter: Plant Line Value: null
  misc_feature: MA Experiment ID: 20000173 Result: Down-regulated in Transcription
  misc_feature: MA Experiment 20000173 PARAMETER Experiment Name: At_42deg_Heat_P Parameter: Age (day) Value: 14
  misc_feature: MA Experiment 20000173 PARAMETER Experiment Name: At_42deg_Heat_P Parameter: Organism Value: A. thaliana
  misc_feature: MA Experiment 20000173 PARAMETER Experiment Name: At_42deg_Heat_P Parameter: Plant Line Value: WS
  misc_feature: MA Experiment 20000173 PARAMETER Experiment Name: At_42deg_Heat_P Parameter: Temperature (deg C) Value: 42 vs. 22
  misc_feature: MA Experiment 20000173 PARAMETER Experiment Name: At_42deg_Heat_P Parameter: Timepoint (hr) Value: 6
  misc_feature: MA Experiment 20000173 PARAMETER Experiment Name: At_42deg_Heat_P Parameter: Tissue Value: Aerial
  misc_feature: MA Experiment ID: 20000179 Result: Up-regulated in Transcription
  misc_feature: MA Experiment 20000179 PARAMETER Experiment Name: At_Germinating_Seeds_P Parameter: Age (hr) Value: 6 vs. 0
  misc_feature: MA Experiment 20000179 PARAMETER Experiment Name: At_Germinating_Seeds_P Parameter: Tissue Value: Germinating Seeds
  misc_feature: MA Experiment ID: 20000180 Result: Up-regulated in Transcription
  misc_feature: MA Experiment 20000180 PARAMETER Experiment Name: At_Germinating_Seeds_P Parameter: Age (hr) Value: 24 vs. 0
  misc_feature: MA Experiment 20000180 PARAMETER Experiment Name: At_Germinating_Seeds_P Parameter: Tissue Value: Germinating Seeds
  misc_feature: MA Experiment ID: 20001451 Result: Down-regulated in Transcription
  misc_feature: MA Experiment 20001451 PARAMETER Experiment Name: At_Far-red-induction_P Parameter: Age (day) Value: 7
  misc_feature: MA Experiment 20001451 PARAMETER Experiment Name: At_Far-red-induction_P Parameter: Light Value: Far-red vs. White
  misc_feature: MA Experiment 20001451 PARAMETER Experiment Name: At_Far-red-induction_P Parameter: Organism Value: A. thaliana
  misc_feature: MA Experiment 20001451 PARAMETER Experiment Name: At_Far-red-induction_P Parameter: Plant Line Value: Columbia
  misc_feature: MA Experiment 20001451 PARAMETER Experiment Name: At_Far-red-induction_P Parameter: Timepoint (hr) Value: 24
  misc_feature: MA Experiment 20001451 PARAMETER Experiment Name: At_Far-red-induction_P Parameter: Tissue Value: Whole Plant
tctccgacagagagagagagaagcagatcgtatcatcacgagacgaccatcggaataacagagaaagagagaaaaagagagagagagagagagagagagagagagagaggatgtctggtgtggttgctcttggtcatgcgagctcgtggggcgcagcgctggtaaggatctcgccgtatactttctccgcaatcggaatcgccatctcgatcggtgtctcagtcctcggtgccgcctggggaatttacattacgggaagtagtttgatcggtgcggctatagaagctcctcgtattacttcgaagaatctcatcagtgtcatcttttgcgaagctgttgctatatatggagttattgttgcaatcatactgcaaacaaagttggagagtgtcccatcttcaaagatgtatgatgctgagtctcttagagctggatatgcaatctttgcatctggaattatagttggattcgccaaccttgtatgcgggttatgtgtaggaatcattggaagcagttgtgcattgtccgatgctcagaactccacactttttgtaaagattcttgtgatcgagatattcgggagtgctctcgggttgtttggagttattgtgggaattattatgtctgcacaagcgacatggccaacgaaatagatatatatatatccggtctgtatatgttgtggtctacttgcaaatctggaaaaacatggcttcttgattatcttcattgttatatcgttccaatgtctagacgaaaatcttgtgtgaaaactgagaaccacttttggatccccaattttttgtatttgtttaaaacttttgaataagtccttttggagaacatcttcatgtttgtattctcttataatcaaagacaaagagtttgtatatgatttgttaaaactgaactagtcattttatcaagtctgtttcct

SEQ ID NO: 44623 - protein, 216 aa, Arabidopsis thaliana
  peptide (1)..(216): Ceres Seq. ID no. 13503842
  misc_feature (145)..(210): Pfam Name: ATP synthase subunit C Pfam Description: ATP synthase subunit C
  misc_feature (53)..(210): Homolog of NCBI NO: 15991795 NR Description: ATPase, H+ transporting, V0 subunit B
  misc_feature (53)..(210): Homolog of NCBI NO: 30585227 NR Description: Homo sapiens ATPase, H+ transporting, lysosomal
  misc_feature (53)..(210): Homolog of NCBI NO: 4757816 NR Description: ATPase, H+ transporting, lysosomal 21kD, V0
  misc_feature (44)..(206): Homolog of NCBI NO: 29840984 NR Description: similar to NM_033617 ATPase, H+ transporting,
  misc_feature (44)..(212): Homolog of NCBI NO: 6321815 NR Description: vacuolar ATPase V0 domain subunit c''; Ppa1p
  misc_feature (46)..(216): Homolog of NCBI NO: 34912550 NR Description: putative H+-transporting ATPase
  misc_feature (43)..(216): Homolog of NCBI NO: 38640797 NR Description: V-ATPase subunit c'' proteolipid [Xerophyta
  misc_feature (37)..(216): Homolog of NCBI NO: 29423617 NR Description: vacuolar membrane ATPase subunit c'' [Citrus
  misc_feature (37)..(216): Homolog of NCBI NO: 15224764 NR Description: H+-transporting two-sector ATPase, C subunit
  misc_feature (37)..(216): Homolog of NCBI NO: 15236838 NR Description: H+-pumping ATPase proteolipid, vacuolar, putative
SDREREKQIVSSRDDHRNNREREKKRERERERERERMSGVVALGHASSWGAALVRISPYTFSAIGIAISIGVSVLGAAWGIYITGSSLIGAAIEAPRITSKNLISVIFCEAVAIYGVIVAIILQTKLESVPSSKMYDAESLRAGYAIFASGIIVGFANLVCGLCVGIIGSSCALSDAQNSTLFVKILVIEIFGSALGLFGVIVGIIMSAQATWPTK

SEQ ID NO: 44624 - protein, 180 aa, Arabidopsis thaliana; identical to SEQ ID NO: 38413
  peptide (1)..(180): Ceres Seq. ID no. 13503843
  misc_feature (109)..(174): Pfam Name: ATP synthase subunit C Pfam Description: ATP synthase subunit C
  misc_feature (17)..(174): Homolog of NCBI NO: 15991795 NR Description: ATPase, H+ transporting, V0 subunit B
  misc_feature (17)..(174): Homolog of NCBI NO: 30585227 NR Description: Homo sapiens ATPase, H+ transporting, lysosomal
  misc_feature (17)..(174): Homolog of NCBI NO: 4757816 NR Description: ATPase, H+ transporting, lysosomal 21kD, V0
  misc_feature (8)..(170): Homolog of NCBI NO: 29840984 NR Description: similar to NM_033617 ATPase, H+ transporting,
  misc_feature (8)..(176): Homolog of NCBI NO: 6321815 NR Description: vacuolar ATPase V0 domain subunit c''; Ppa1p
  misc_feature (10)..(180): Homolog of NCBI NO: 34912550 NR Description: putative H+-transporting ATPase
  misc_feature (7)..(180): Homolog of NCBI NO: 38640797 NR Description: V-ATPase subunit c'' proteolipid [Xerophyta
  misc_feature (1)..(180): Homolog of NCBI NO: 29423617 NR Description: vacuolar membrane ATPase subunit c'' [Citrus
  misc_feature (1)..(180): Homolog of NCBI NO: 15224764 NR Description: H+-transporting two-sector ATPase, C subunit
  misc_feature (1)..(180): Homolog of NCBI NO: 15236838 NR Description: H+-pumping ATPase proteolipid, vacuolar, putative

SEQ ID NO: 44625 - protein, 115 aa, Arabidopsis thaliana; identical to SEQ ID NO: 38414
  peptide (1)..(115): Ceres Seq. ID no. 13503844

SEQ ID NO: 44626 - DNA, 1838 bp, Arabidopsis thaliana; identical to SEQ ID NO: 44454
  misc_feature (1)..(1838): Ceres Seq. ID no. 12488934
  misc_feature: MA Experiment ID: 20000184 Result: Down-regulated in Transcription
  misc_feature: MA Experiment 20000184 PARAMETER Experiment Name: At_Shoots__P Parameter: Age (day) Value: 7
  misc_feature: MA Experiment 20000184 PARAMETER Experiment Name: At_Shoots__P Parameter: Tissue Value: Shoots vs. Whole Plant
  misc_feature: MA Experiment ID: 20001451 Result: Up-regulated in Transcription
  misc_feature: MA Experiment 20001451 PARAMETER Experiment Name: At_Far-red-induction_P Parameter: Age (day) Value: 7
  misc_feature: MA Experiment 20001451 PARAMETER Experiment Name: At_Far-red-induction_P Parameter: Light Value: Far-red vs. White
  misc_feature: MA Experiment 20001451 PARAMETER Experiment Name: At_Far-red-induction_P Parameter: Organism Value: A. thaliana
  misc_feature: MA Experiment 20001451 PARAMETER Experiment Name: At_Far-red-induction_P Parameter: Plant Line Value: Columbia
  misc_feature: MA Experiment 20001451 PARAMETER Experiment Name: At_Far-red-induction_P Parameter: Timepoint (hr) Value: 24
  misc_feature: MA Experiment 20001451 PARAMETER Experiment Name: At_Far-red-induction_P Parameter: Tissue Value: Whole Plant

SEQ ID NO: 44627 - protein, 495 aa, Arabidopsis thaliana; identical to SEQ ID NO: 44455
  peptide (1)..(495): Ceres Seq. ID no. 12488935
  misc_feature (118)..(189): Pfam Name: RNA recognition motif. (a.k.a. RRM, RBD, or RNP domain) Pfam Description: RNA recognition motif. (a.k.a. RRM, RBD, or RNP
  misc_feature (118)..(189): Pfam Name: RNA recognition motif. (a.k.a. RRM, RBD, or RNP domain) Pfam Description: RNA recognition motif. (a.k.a. RRM, RBD, or RNP
  misc_feature (62)..(423): Homolog of NCBI NO: 5031755 NR Description: heterogeneous nuclear ribonucleoprotein R [Homo
  misc_feature (62)..(422): Homolog of NCBI NO: 13435603 NR Description: Similar to heterogeneous nuclear
  misc_feature (62)..(422): Homolog of NCBI NO: 28212266 NR Description: heterogeneous nuclear ribonucleoprotein R [Rattus
  misc_feature (17)..(422): Homolog of NCBI NO: 28422490 NR Description: Similar to NS1-associated protein 1 [Danio rerio]
  misc_feature (1)..(192): Homolog of NCBI NO: 7485284 NR Description: hypothetical protein A_TM018A10.14 - Arabidopsis
  misc_feature (62)..(423): Homolog of NCBI NO: 5031755 NR Description: heterogeneous nuclear ribonucleoprotein R [Homo
  misc_feature (62)..(422): Homolog of NCBI NO: 28212266 NR Description: heterogeneous nuclear ribonucleoprotein R [Rattus
  misc_feature (1)..(192): Homolog of NCBI NO: 7485284 NR Description: hypothetical protein A_TM018A10.14 - Arabidopsis
  misc_feature (1)..(495): Homolog of NCBI NO: 18411454 NR Description: RRM-containing protein
  misc_feature (1)..(495): Homolog of NCBI NO: 7485284 NR Description: hypothetical protein A_TM018A10.14 - Arabidopsis
  misc_feature (21)..(495): Homolog of NCBI NO: 37531112 NR Description: putative RNA-binding protein
  misc_feature (28)..(495): Homolog of NCBI NO: 15231284 NR Description: RRM-containing RNA-binding protein, putative
  misc_feature (10)..(475): Homolog of NCBI NO: 29371361 NR Description: putative RNA-binding protein
  misc_feature (17)..(422): Homolog of NCBI NO: 28422490 NR Description: Similar to NS1-associated protein 1 [Danio rerio]
  misc_feature (62)..(422): Homolog of NCBI NO: 13435603 NR Description: Similar to heterogeneous nuclear
  misc_feature (10)..(475): Homolog of NCBI NO: 29371361 NR Description: putative RNA-binding protein
  misc_feature (28)..(495): Homolog of NCBI NO: 15231284 NR Description: RRM-containing RNA-binding protein, putative
  misc_feature (21)..(495): Homolog of NCBI NO: 37531112 NR Description: putative RNA-binding protein
  misc_feature (1)..(495): Homolog of NCBI NO: 7485284 NR Description: hypothetical protein A_TM018A10.14 - Arabidopsis
  misc_feature (1)..(495): Homolog of NCBI NO: 18411454 NR Description: RRM-containing protein

SEQ ID NO: 44628 - protein, 475 aa, Arabidopsis thaliana; identical to SEQ ID NO: 44456
  peptide (1)..(475): Ceres Seq. ID no. 12488936
  misc_feature (98)..(169): Pfam Name: RNA recognition motif. (a.k.a. RRM, RBD, or RNP domain) Pfam Description: RNA recognition motif. (a.k.a. RRM, RBD, or RNP
  misc_feature (98)..(169): Pfam Name: RNA recognition motif. (a.k.a. RRM, RBD, or RNP domain) Pfam Description: RNA recognition motif. (a.k.a. RRM, RBD, or RNP
  misc_feature (42)..(403): Homolog of NCBI NO: 5031755 NR Description: heterogeneous nuclear ribonucleoprotein R [Homo
  misc_feature (42)..(402): Homolog of NCBI NO: 13435603 NR Description: Similar to heterogeneous nuclear
  misc_feature (42)..(402): Homolog of NCBI NO: 28212266 NR Description: heterogeneous nuclear ribonucleoprotein R [Rattus
  misc_feature (1)..(402): Homolog of NCBI NO: 28422490 NR Description: Similar to NS1-associated protein 1 [Danio rerio]
  misc_feature (1)..(172): Homolog of NCBI NO: 7485284 NR Description: hypothetical protein A_TM018A10.14 - Arabidopsis
  misc_feature (42)..(403): Homolog of NCBI NO: 5031755 NR Description: heterogeneous nuclear ribonucleoprotein R [Homo
  misc_feature (42)..(402): Homolog of NCBI NO: 28212266 NR Description: heterogeneous nuclear ribonucleoprotein R [Rattus
  misc_feature (1)..(172): Homolog of NCBI NO: 7485284 NR Description: hypothetical protein A_TM018A10.14 - Arabidopsis
  misc_feature (1)..(475): Homolog of NCBI NO: 18411454 NR Description: RRM-containing protein
  misc_feature (1)..(475): Homolog of NCBI NO: 7485284 NR Description: hypothetical protein A_TM018A10.14 - Arabidopsis
  misc_feature (1)..(475): Homolog of NCBI NO: 37531112 NR Description: putative RNA-binding protein
  misc_feature (8)..(475): Homolog of NCBI NO: 15231284 NR Description: RRM-containing RNA-binding protein, putative
  misc_feature (1)..(455): Homolog of NCBI NO: 29371361 NR Description: putative RNA-binding protein
  misc_feature (1)..(402): Homolog of NCBI NO: 28422490 NR Description: Similar to NS1-associated protein 1 [Danio rerio]
  misc_feature (42)..(402): Homolog of NCBI NO: 13435603 NR Description: Similar to heterogeneous nuclear
  misc_feature (1)..(455): Homolog of NCBI NO: 29371361 NR Description: putative RNA-binding protein
  misc_feature (8)..(475): Homolog of NCBI NO: 15231284 NR Description: RRM-containing RNA-binding protein, putative
  misc_feature (1)..(475): Homolog of NCBI NO: 37531112 NR Description: putative RNA-binding protein
  misc_feature (1)..(475): Homolog of NCBI NO: 7485284 NR Description: hypothetical protein A_TM018A10.14 - Arabidopsis
  misc_feature (1)..(475): Homolog of NCBI NO: 18411454 NR Description: RRM-containing protein

SEQ ID NO: 44629 - protein, 429 aa, Arabidopsis thaliana; identical to SEQ ID NO: 44457
  peptide (1)..(429): Ceres Seq. ID no. 12488937
  misc_feature (52)..(123): Pfam Name: RNA recognition motif. (a.k.a. RRM, RBD, or RNP domain) Pfam Description: RNA recognition motif. (a.k.a. RRM, RBD, or RNP
  misc_feature (52)..(123): Pfam Name: RNA recognition motif. (a.k.a. RRM, RBD, or RNP domain) Pfam Description: RNA recognition motif. (a.k.a. RRM, RBD, or RNP
  misc_feature (1)..(357): Homolog of NCBI NO: 5031755 NR Description: heterogeneous nuclear ribonucleoprotein R [Homo
  misc_feature (1)..(356): Homolog of NCBI NO: 13435603 NR Description: Similar to heterogeneous nuclear
  misc_feature (1)..(356): Homolog of NCBI NO: 28212266 NR Description: heterogeneous nuclear ribonucleoprotein R [Rattus
  misc_feature (1)..(356): Homolog of NCBI NO: 28422490 NR Description: Similar to NS1-associated protein 1 [Danio rerio]
  misc_feature (1)..(126): Homolog of NCBI NO: 7485284 NR Description: hypothetical protein A_TM018A10.14 - Arabidopsis
  misc_feature (1)..(357): Homolog of NCBI NO: 5031755 NR Description: heterogeneous nuclear ribonucleoprotein R [Homo
  misc_feature (1)..(356): Homolog of NCBI NO: 28212266 NR Description: heterogeneous nuclear ribonucleoprotein R [Rattus
  misc_feature (1)..(126): Homolog of NCBI NO: 7485284 NR Description: hypothetical protein A_TM018A10.14 - Arabidopsis
  misc_feature (1)..(429): Homolog of NCBI NO: 18411454 NR Description: RRM-containing protein
  misc_feature (1)..(429): Homolog of NCBI NO: 7485284 NR Description: hypothetical protein A_TM018A10.14 - Arabidopsis
  misc_feature (1)..(429): Homolog of NCBI NO: 37531112 NR Description: putative RNA-binding protein
  misc_feature (1)..(429): Homolog of NCBI NO: 15231284 NR Description: RRM-containing RNA-binding protein, putative
  misc_feature (1)..(409): Homolog of NCBI NO: 29371361 NR Description: putative RNA-binding protein
  misc_feature (1)..(356): Homolog of NCBI NO: 28422490 NR Description: Similar to NS1-associated protein 1 [Danio rerio]
  misc_feature (1)..(356): Homolog of NCBI NO: 13435603 NR Description: Similar to heterogeneous nuclear
  misc_feature (1)..(409): Homolog of NCBI NO: 29371361 NR Description: putative RNA-binding protein
  misc_feature (1)..(429): Homolog of NCBI NO: 15231284 NR Description: RRM-containing RNA-binding protein, putative
  misc_feature (1)..(429): Homolog of NCBI NO: 37531112 NR Description: putative RNA-binding protein
  misc_feature (1)..(429): Homolog of NCBI NO: 7485284 NR Description: hypothetical protein A_TM018A10.14 - Arabidopsis
  misc_feature (1)..(429): Homolog of NCBI NO: 18411454 NR Description: RRM-containing protein

SEQ ID NO: 44630 - DNA, 1855 bp, Arabidopsis thaliana
  misc_feature (1)..(1855): Ceres Seq. ID no. 13509584
  misc_feature: MA Experiment ID: 20000438 Result: Up-regulated in Transcription
  misc_feature: MA Experiment 20000438 PARAMETER Experiment Name: At_Shoots__P Parameter: Age (day) Value: 14
  misc_feature: MA Experiment 20000438 PARAMETER Experiment Name: At_Shoots__P Parameter: Tissue Value: Shoots vs. Whole Plant
  misc_feature: MA Experiment ID: 20000496 Result: Down-regulated in Transcription
  misc_feature: MA Experiment 20000496 PARAMETER Experiment Name: At_Guard_Cells_P Parameter: Harvest Date Value: 7/19/2002
  misc_feature: MA Experiment 20000496 PARAMETER Experiment Name: At_Guard_Cells_P Parameter: Organism Value: Canola
  misc_feature: MA Experiment 20000496 PARAMETER Experiment Name: At_Guard_Cells_P Parameter: Tissue Value: Guard Cells vs. Leaves
  misc_feature: MA Experiment ID: 20001557 Result: Down-regulated in Transcription
  misc_feature: MA Experiment 20001557 PARAMETER Experiment Name: At_Drought_Soil_Dry_P Parameter: Age (day) Value: 27
  misc_feature: MA Experiment 20001557 PARAMETER Experiment Name: At_Drought_Soil_Dry_P Parameter: Organism Value: A. thaliana
  misc_feature: MA Experiment 20001557 PARAMETER Experiment Name: At_Drought_Soil_Dry_P Parameter: Plant Line Value: WS
  misc_feature: MA Experiment 20001557 PARAMETER Experiment Name: At_Drought_Soil_Dry_P Parameter: Post Timepoint (hr) Value: 3
  misc_feature: MA Experiment 20001557 PARAMETER Experiment Name: At_Drought_Soil_Dry_P Parameter: Post-Treatment Value: Re-Water vs. No Drought
  misc_feature: MA Experiment 20001557 PARAMETER Experiment Name: At_Drought_Soil_Dry_P Parameter: Timepoint (day) Value: 13
  misc_feature: MA Experiment 20001557 PARAMETER Experiment Name: At_Drought_Soil_Dry_P Parameter: Treatment Value: Drought vs. No Drought
  misc_feature: MA Experiment ID: 20001558 Result: Down-regulated in Transcription
  misc_feature: MA Experiment 20001558 PARAMETER Experiment Name: At_Drought_Soil_Dry_P Parameter: Age (day) Value: 27
  misc_feature: MA Experiment 20001558 PARAMETER Experiment Name: At_Drought_Soil_Dry_P Parameter: Organism Value: A. thaliana
  misc_feature: MA Experiment 20001558 PARAMETER Experiment Name: At_Drought_Soil_Dry_P Parameter: Plant Line Value: WS
  misc_feature: MA Experiment 20001558 PARAMETER Experiment Name: At_Drought_Soil_Dry_P Parameter: Post Timepoint (hr) Value: 6
  misc_feature: MA Experiment 20001558 PARAMETER Experiment Name: At_Drought_Soil_Dry_P Parameter: Post-Treatment Value: Re-Water vs. No Drought
  misc_feature: MA Experiment 20001558 PARAMETER Experiment Name: At_Drought_Soil_Dry_P Parameter: Timepoint (day) Value: 13
  misc_feature: MA Experiment 20001558 PARAMETER Experiment Name: At_Drought_Soil_Dry_P Parameter: Treatment Value: Drought vs. No Drought
  misc_feature: MA Experiment ID: 20001560 Result: Down-regulated in Transcription
  misc_feature: MA Experiment 20001560 PARAMETER Experiment Name: At_Drought_Soil_Dry_P Parameter: Age (day) Value: 28
  misc_feature: MA Experiment 20001560 PARAMETER Experiment Name: At_Drought_Soil_Dry_P Parameter: Organism Value: A. thaliana
  misc_feature: MA Experiment 20001560 PARAMETER Experiment Name: At_Drought_Soil_Dry_P Parameter: Plant Line Value: WS
  misc_feature: MA Experiment 20001560 PARAMETER Experiment Name: At_Drought_Soil_Dry_P Parameter: Post Timepoint (hr) Value: None
  misc_feature: MA Experiment 20001560 PARAMETER Experiment Name: At_Drought_Soil_Dry_P Parameter: Post-Treatment Value: None
  misc_feature: MA Experiment 20001560 PARAMETER Experiment Name: At_Drought_Soil_Dry_P Parameter: Timepoint (day) Value: 14
  misc_feature: MA Experiment 20001560 PARAMETER Experiment Name: At_Drought_Soil_Dry_P Parameter: Treatment Value: Drought vs. No Drought
atcaacatcactggtcgtctctccacgtgtaccggaaaatgaatgaagatccttaaaaacacgccggagtgaaaccgagccaccattgtttttttccaaatctgccagagtccgtaccatgtccaccatgcctccacaatttcccttggagatccgctcagctcttcgccgggcttcctccaccgtctatctccaccgttccatcagcaccgtcactactactccttcgtttcgtcaccgaacgacgttgttacgaccgagagctttctcttcttcctctgttaagctccccacgaaaccttctctttgcaccgccgacgagcttcattacgtctccgttcctaacaccgattggcgtctcgctctctggcgctacttgcctcctcctcaggctccgacgaggaatcatccattgttactgttgtctggagtaggaactaatgccatcggatatgatttatctcctggttgctcttttgcaaggcatatgtctggacagggatttgagacttggattctcgaggttcgtggagctggattgagtacacgagtatctgatcttaaggacgttgaggaatctgctcatgaattgtcgaatcagatagaatctactgctagagctgctgcaggtaaagaaacttgttctgatgaaaagcagactactgatattatggacagtagtgcacctgcaccagcgtcggatgtttcagttgttggcgaagcatcggcttgggacgagtcacagcttgtggcgagattgacatcaactttcatgagtttgtcagaaagactttctggctttctcagtgaaggtcagtctgtgttcatgtctgctaagttgtttgacaaaattgcaatgcttgtagatgatacacagctgtacgagcgctttaatgatataagatcgaagcttttgagtttgatagagtcaaagcaaaactcaggacttgttaaccaagtcagagatttggctcagcgccttgtgaatcttttcgacgatggtcaaaggtctgtctcgcctccgctgattgatttacaagagcgcctcactgcgaccatagaagattttcagaagcaactggatttgatagttaaatatgactgggattttgatcactacctggaagaggatgtccctgctgcgattgagtatgtaagagcacaaagcaagcccaaggacggcaaactattcgcaattgggcactccatggggggtatcctactctatgcaatgctatcacgttgtgcttttgaaggacgagaaccttccgtggcagctgtggcaactctggcatcatcggttgattacacaacctcaaattctgcactcaaattgctcatacctcttgccaatcctgcagaagctctgagtgttccagttgttcctctgggtgctttgttggctgccgcttttcctctttcgacacgtcctccatatgtattatcttggcttaatgatttgatatcatcaacagatatgatgcaccctgaaatgttagaaaagcttgtcttgaataacttctgtaccatacctgcaaaactacttattcagctgacaacggcctttcgagagggaggcttacgtgatcgtagtggtaaattttactataaggatcatcttcccagaaccagtgtccctgtcttagctcttgcaggtgatcgggacttgatctgcccccctgcggctgtggaagacactgttaagctgtttccggagaacttggtcacttataagttacttggagaaccagatggaccacattatgcacactatgatttggttggaggacgactggtggtgtcgaagaagtgtgtttcagaagcgcctgttaaaaaggatgccatttccgtttaa

SEQ ID NO: 44631 - protein, 578 aa, Arabidopsis thaliana
  peptide (1)..(578): Ceres Seq. ID no. 13509585
  misc_feature (53)..(143): Homolog of NCBI NO: 18410446 NR Description: expressed protein [Arabidopsis thaliana]
  misc_feature (275)..(558): Homolog of NCBI NO: 18410446 NR Description: expressed protein [Arabidopsis thaliana]
  misc_feature (53)..(143): Homolog of NCBI NO: 25372838 NR Description: unknown protein F25P22.17 [imported] -
  misc_feature (275)..(558): Homolog of NCBI NO: 25372838 NR Description: unknown protein F25P22.17 [imported] -
  misc_feature (46)..(91): Homolog of NCBI NO: 34911394 NR Description: similar to Arabidopsis thaliana chromosome 1,
  misc_feature (425)..(558): Homolog of NCBI NO: 34911394 NR Description: similar to Arabidopsis thaliana chromosome 1,
  misc_feature (91)..(376): Homolog of NCBI NO: 34911394 NR Description: similar to Arabidopsis thaliana chromosome 1,
  misc_feature (4)..(525): Homolog of NCBI NO: 25372839 NR Description: F9L1.1 protein - Arabidopsis thaliana
  misc_feature (1)..(568): Homolog of NCBI NO: 19699290 NR Description: At1g15070/F9L1_1 [Arabidopsis thaliana]
  misc_feature (1)..(578): Homolog of NCBI NO: 15220945 NR Description: expressed protein [Arabidopsis thaliana]
MSTMPPQFPLEIRSALRRASSTVYLHRSISTVTTTPSFRHRTTLLRPRAFSSSSVKLPTKPSLCTADELHYVSVPNTDWRLALWRYLPPPQAPTRNHPLLLLSGVGTNAIGYDLSPGCSFARHMSGQGFETWILEVRGAGLSTRVSDLKDVEESAHELSNQIESTARAAAGKETCSDEKQTTDIMDSSAPAPASDVSVVGEASAWDESQLVARLTSTFMSLSERLSGFLSEGQSVFMSAKLFDKIAMLVDDTQLYERFNDIRSKLLSLIESKQNSGLVNQVRDLAQRLVNLFDDGQRSVSPPLIDLQERLTATIEDFQKQLDLIVKYDWDFDHYLEEDVPAAIEYVRAQSKPKDGKLFAIGHSMGGILLYAMLSRCAFEGREPSVAAVATLASSVDYTTSNSALKLLIPLANPAEALSVPVVPLGALLAAAFPLSTRPPYVLSWLNDLISSTDMMHPEMLEKLVLNNFCTIPAKLLIQLTTAFREGGLRDRSGKFYYKDHLPRTSVPVLALAGDRDLICPPAAVEDTVKLFPENLVTYKLLGEPDGPHYAHYDLVGGRLVVSKKCVSEAPVKKDAISV

SEQ ID NO: 44632 - protein, 575 aa, Arabidopsis thaliana
  peptide (1)..(575): Ceres Seq. ID no. 13509586
  misc_feature (50)..(140): Homolog of NCBI NO: 18410446 NR Description: expressed protein [Arabidopsis thaliana]
  misc_feature (272)..(555): Homolog of NCBI NO: 18410446 NR Description: expressed protein [Arabidopsis thaliana]
  misc_feature (50)..(140): Homolog of NCBI NO: 25372838 NR Description: unknown protein F25P22.17 [imported] -
  misc_feature (272)..(555): Homolog of NCBI NO: 25372838 NR Description: unknown protein F25P22.17 [imported] -
  misc_feature (43)..(88): Homolog of NCBI NO: 34911394 NR Description: similar to Arabidopsis thaliana chromosome 1,
  misc_feature (422)..(555): Homolog of NCBI NO: 34911394 NR Description: similar to Arabidopsis thaliana chromosome 1,
  misc_feature (88)..(373): Homolog of NCBI NO: 34911394 NR Description: similar to Arabidopsis thaliana chromosome 1,
  misc_feature (1)..(522): Homolog of NCBI NO: 25372839 NR Description: F9L1.1 protein - Arabidopsis thaliana
  misc_feature (1)..(565): Homolog of NCBI NO: 19699290 NR Description: At1g15070/F9L1_1 [Arabidopsis thaliana]
  misc_feature (1)..(575): Homolog of NCBI NO: 15220945 NR Description: expressed protein [Arabidopsis thaliana]
MPPQFPLEIRSALRRASSTVYLHRSISTVTTTPSFRHRTTLLRPRAFSSSSVKLPTKPSLCTADELHYVSVPNTDWRLALWRYLPPPQAPTRNHPLLLLSGVGTNAIGYDLSPGCSFARHMSGQGFETWILEVRGAGLSTRVSDLKDVEESAHELSNQIESTARAAAGKETCSDEKQTTDIMDSSAPAPASDVSVVGEASAWDESQLVARLTSTFMSLSERLSGFLSEGQSVFMSAKLFDKIAMLVDDTQLYERFNDIRSKLLSLIESKQNSGLVNQVRDLAQRLVNLFDDGQRSVSPPLIDLQERLTATIEDFQKQLDLIVKYDWDFDHYLEEDVPAAIEYVRAQSKPKDGKLFAIGHSMGGILLYAMLSRCAFEGREPSVAAVATLASSVDYTTSNSALKLLIPLANPAEALSVPVVPLGALLAAAFPLSTRPPYVLSWLNDLISSTDMMHPEMLEKLVLNNFCTIPAKLLIQLTTAFREGGLRDRSGKFYYKDHLPRTSVPVLALAGDRDLICPPAAVEDTVKLFPENLVTYKLLGEPDGPHYAHYDLVGGRLVVSKKCVSEAPVKKDAISV

SEQ ID NO: 44633 - protein, 455 aa, Arabidopsis thaliana
  peptide (1)..(455): Ceres Seq. ID no. 13509587
  misc_feature (63)..(445): Homolog of NCBI NO: 38637529 NR Description: unknown protein [Oryza sativa (japonica
  misc_feature (1)..(20): Homolog of NCBI NO: 18410446 NR Description: expressed protein [Arabidopsis thaliana]
  misc_feature (152)..(435): Homolog of NCBI NO: 18410446 NR Description: expressed protein [Arabidopsis thaliana]
  misc_feature (1)..(20): Homolog of NCBI NO: 25372838 NR Description: unknown protein F25P22.17 [imported] -
  misc_feature (152)..(435): Homolog of NCBI NO: 25372838 NR Description: unknown protein F25P22.17 [imported] -
  misc_feature (302)..(435): Homolog of NCBI NO: 34911394 NR Description: similar to Arabidopsis thaliana chromosome 1,
  misc_feature (1)..(253): Homolog of NCBI NO: 34911394 NR Description: similar to Arabidopsis thaliana chromosome 1,
  misc_feature (1)..(402): Homolog of NCBI NO: 25372839 NR Description: F9L1.1 protein - Arabidopsis thaliana
  misc_feature (1)..(445): Homolog of NCBI NO: 19699290 NR Description: At1g15070/F9L1_1 [Arabidopsis thaliana]
  misc_feature (1)..(455): Homolog of NCBI NO: 15220945 NR Description: expressed protein [Arabidopsis thaliana]
MSGQGFETWILEVRGAGLSTRVSDLKDVEESAHELSNQIESTARAAAGKETCSDEKQTTDIMDSSAPAPASDVSVVGEASAWDESQLVARLTSTFMSLSERLSGFLSEGQSVFMSAKLFDKIAMLVDDTQLYERFNDIRSKLLSLIESKQNSGLVNQVRDLAQRLVNLFDDGQRSVSPPLIDLQERLTATIEDFQKQLDLIVKYDWDFDHYLEEDVPAAIEYVRAQSKPKDGKLFAIGHSMGGILLYAMLSRCAFEGREPSVAAVATLASSVDYTTSNSALKLLIPLANPAEALSVPVVPLGALLAAAFPLSTRPPYVLSWLNDLISSTDMMHPEMLEKLVLNNFCTIPAKLLIQLTTAFREGGLRDRSGKFYYKDHLPRTSVPVLALAGDRDLICPPAAVEDTVKLFPENLVTYKLLGEPDGPHYAHYDLVGGRLVVSKKCVSEAPVKKDAISV

SEQ ID NO: 44634 - DNA, 2292 bp, Arabidopsis thaliana
  misc_feature (1)..(2292): Ceres Seq. ID no. 13509239
  misc_feature: MA Experiment ID: 20001905 Result: Down-regulated in Transcription
  misc_feature: MA Experiment 20001905 PARAMETER Experiment Name: At_Drought_Reproduction_P Parameter: Age (day) Value: 40
  misc_feature: MA Experiment 20001905 PARAMETER Experiment Name: At_Drought_Reproduction_P Parameter: Organism Value: A. thaliana
  misc_feature: MA Experiment 20001905 PARAMETER Experiment Name: At_Drought_Reproduction_P Parameter: Plant Line Value: WS
  misc_feature: MA Experiment 20001905 PARAMETER Experiment Name: At_Drought_Reproduction_P Parameter: Timepoint (day) Value: 10
  misc_feature: MA Experiment 20001905 PARAMETER Experiment Name: At_Drought_Reproduction_P Parameter: Tissue Value: Rosettes
  misc_feature: MA Experiment 20001905 PARAMETER Experiment Name: At_Drought_Reproduction_P Parameter: Treatment Value: Drought vs. No Drought
aatcacctagtctcattctcactcactcgcttgccttcttcttccgctcacaatctcttcctttctcgttccttctcttcttcgatcagacgattcaatcgcttctcactcaaaccacttcgctccttcgcatccatgtcttcttcttcccccgacgctgctcagactcctctaaccaccgctccttatggctcctggaaatctccaatcaccgccgacatcgtttccggagcttcaaagcgtcttggcggcaccgccgtcgattctcatggccgtctcgtcttgctcgagtctcgccctaacgaatccgggagaggagttttggtgctacaaggagaaacatcaattgatattactccaaaagacttcgctgtgagaactttaacacaagaatacggtggtggtgctttccagatttcatcagatgatacacttgtgttctctaattacaaggatcagcgattgtacaagcaagacattactgataaagattcatctccaaagccaattactccagattatggtacaccagctgttacttatgcagatggagtctttgattcacgctttaaccgttatgttactgttagggaagatggtcgccaggatagatcaaacccaattacaacaatcgtggaggttaatctaagtggagagacacttgaagatccagaaccaaaagtactcgtaagtggcaatgatttctatgcatttccacggttggatcccaagtgtgagcgattggcatggattgaatggagtcaccctaatatgccatgggataaagcagagctgtgggttgggtacatttccgagggcggaaatattgataagcgcgtatgtgttgctggttgtgatcccaaatacgtcgaatcacccactgagccgaagtggtcatcaagaggggaactcttttttgtaactgacagaaagaatggatgttggaatattcataaatggattgagagtaccaatgaggttgtttctgtatatcctctcgacggtgagtttgcgaaaccactatggattttcggtactaactcctacgagataatcgagtgttctgaagagaagaacctaattgcatgcagctataggcagaaagggaagtcatatctaggcattgtagatgattcacagggatcatgttctctgctcgatattcctttaacggattttgacagcattacattgggaaatcagtgcctttatgttgagggagcatcagcagttcttccaccatcagttgccagggtaacactggatcagcataagacgaaagcactcagttctgagattgtttggtcgtcgtcacccgatgttttgaagtacaaggcttacttcagcgtgccagagttgattgaatttccaacagaggttcctggtcagaacgcttatgcatacttttatcctccaaccaatccgctctacaatgctagcatggaagagaaacctccgttgttagtgaagagtcatggaggacctactgctgaatcacgtggatccttaaatctgaatatccaatactggacaagtcgaggttgggcatttgttgatgtcaattatggtggaagcacaggttatggtcgagagtatcgagagcggttgttaaggcagtggggaatagtcgacgttgatgactgttgtggctgtgctaaatacttggtatcttctggcaaggcagatgttaagcggctctgtatatctggcggttctgcaggaggttacacaactcttgcatcattggcgttcagggatgttttcaaagctggagcgtccttatacggagtggctgatttaaaaatgttgaaagaagaaggtcataaatttgaatcccgttatatcgacaatcttgttggagatgaaaaagatttctatgagagatcaccaatcaatttcgtcgataagttctcttgtcccatcatccttttccaaggactagaagacaaggttgtaactccagatcaatcacgtaaaatctatgaagcattaaagaaaaaaggtctgcctgttgctcttgtcgagtacgaaggagaacaacacggttttcgcaaggcggaaaacatcaaatacacacttgagcaacagatggtgttctttgcccgagtggttggagggttcaaagttgctgatgacatcactcctttgaaaattgacaacttcgacacttagaaaacgatgcttaaatagatatgtttggaaaagatttgctttttttttattatttagagaaaatacaggcttggactaacgttttcggataatttgttcatcaaaagtccaaaaccttct

SEQ ID NO: 44635 - protein, 723 aa, Arabidopsis thaliana
  peptide (1)..(723): Ceres Seq. ID no. 13509240
  misc_feature (513)..(577): Pfam Name: Prolyl oligopeptidase family Pfam Description: Prolyl oligopeptidase family
  misc_feature (291)..(705): Homolog of NCBI NO: 22972830 NR Description: hypothetical protein [Chloroflexus aurantiacus]
  misc_feature (69)..(184): Homolog of NCBI NO: 23062020 NR Description: hypothetical protein [Pseudomonas fluorescens
  misc_feature (221)..(345): Homolog of NCBI NO: 23062020 NR Description: hypothetical protein [Pseudomonas fluorescens
  misc_feature (393)..(705): Homolog of NCBI NO: 23062020 NR Description: hypothetical protein [Pseudomonas fluorescens
  misc_feature (291)..(715): Homolog of NCBI NO: 29654820 NR Description: prolyl oligopeptidase family protein [Coxiella
  misc_feature (60)..(700): Homolog of NCBI NO: 23029170 NR Description: hypothetical protein [Microbulbifer degradans
  misc_feature (216)..(705): Homolog of NCBI NO: 16331709 NR Description: hypothetical protein [Synechocystis sp. PCC 6803]
  misc_feature (61)..(221): Homolog of NCBI NO: 37521039 NR Description: probable peptidase [Gloeobacter violaceus]
  misc_feature (291)..(720): Homolog of NCBI NO: 37521039 NR Description: probable peptidase [Gloeobacter violaceus]
  misc_feature (227)..(720): Homolog of NCBI NO: 23043087 NR Description: hypothetical protein [Trichodesmium erythraeum
NHLVSFSLTRLPSSSAHNLFLSRSFSSSIRRFNRFSLKPLRSFASMSSSSPDAAQTPLTTAPYGSWKSPITADIVSGASKRLGGTAVDSHGRLVLLESRPNESGRGVLVLQGETSIDITPKDFAVRTLTQEYGGGAFQISSDDTLVFSNYKDQRLYKQDITDKDSSPKPITPDYGTPAVTYADGVFDSRFNRYVTVREDGRQDRSNPITTIVEVNLSGETLEDPEPKVLVSGNDFYAFPRLDPKCERLAWIEWSHPNMPWDKAELWVGYISEGGNIDKRVCVAGCDPKYVESPTEPKWSSRGELFFVTDRKNGCWNIHKWIESTNEVVSVYPLDGEFAKPLWIFGTNSYEIIECSEEKNLIACSYRQKGKSYLGIVDDSQGSCSLLDIPLTDFDSITLGNQCLYVEGASAVLPPSVARVTLDQHKTKALSSEIVWSSSPDVLKYKAYFSVPELIEFPTEVPGQNAYAYFYPPTNPLYNASMEEKPPLLVKSHGGPTAESRGSLNLNIQYWTSRGWAFVDVNYGGSTGYGREYRERLLRQWGIVDVDDCCGCAKYLVSSGKADVKRLCISGGSAGGYTTLASLAFRDVFKAGASLYGVADLKMLKEEGHKFESRYIDNLVGDEKDFYERSPINFVDKFSCPIILFQGLEDKVVTPDQSRKIYEALKKKGLPVALVEYEGEQHGFRKAENIKYTLEQQMVFFARVVGGFKVADDITPLKIDNFDT

SEQ ID NO: 44636 - protein, 678 aa, Arabidopsis thaliana
  peptide (1)..(678): Ceres Seq. ID no. 13509241
  misc_feature (468)..(532): Pfam Name: Prolyl oligopeptidase family Pfam Description: Prolyl oligopeptidase family
  misc_feature (246)..(660): Homolog of NCBI NO: 22972830 NR Description: hypothetical protein [Chloroflexus aurantiacus]
  misc_feature (24)..(139): Homolog of NCBI NO: 23062020 NR Description: hypothetical protein [Pseudomonas fluorescens
  misc_feature (176)..(300): Homolog of NCBI NO: 23062020 NR Description: hypothetical protein [Pseudomonas fluorescens
  misc_feature (348)..(660): Homolog of NCBI NO: 23062020 NR Description: hypothetical protein [Pseudomonas fluorescens
  misc_feature (246)..(670): Homolog of NCBI NO: 29654820 NR Description: prolyl oligopeptidase family protein [Coxiella
  misc_feature (15)..(655): Homolog of NCBI NO: 23029170 NR Description: hypothetical protein [Microbulbifer degradans
  misc_feature (171)..(660): Homolog of NCBI NO: 16331709 NR Description: hypothetical protein [Synechocystis sp. PCC 6803]
  misc_feature (16)..(176): Homolog of NCBI NO: 37521039 NR Description: probable peptidase [Gloeobacter violaceus]
  misc_feature (246)..(675): Homolog of NCBI NO: 37521039 NR Description: probable peptidase [Gloeobacter violaceus]
  misc_feature (182)..(675): Homolog of NCBI NO: 23043087 NR Description: hypothetical protein [Trichodesmium erythraeum
MSSSSPDAAQTPLTTAPYGSWKSPITADIVSGASKRLGGTAVDSHGRLVLLESRPNESGRGVLVLQGETSIDITPKDFAVRTLTQEYGGGAFQISSDDTLVFSNYKDQRLYKQDITDKDSSPKPITPDYGTPAVTYADGVFDSRFNRYVTVREDGRQDRSNPITTIVEVNLSGETLEDPEPKVLVSGNDFYAFPRLDPKCERLAWIEWSHPNMPWDKAELWVGYISEGGNIDKRVCVAGCDPKYVESPTEPKWSSRGELFFVTDRKNGCWNIHKWIESTNEVVSVYPLDGEFAKPLWIFGTNSYEIIECSEEKNLIACSYRQKGKSYLGIVDDSQGSCSLLDIPLTDFDSITLGNQCLYVEGASAVLPPSVARVTLDQHKTKALSSEIVWSSSPDVLKYKAYFSVPELIEFPTEVPGQNAYAYFYPPTNPLYNASMEEKPPLLVKSHGGPTAESRGSLNLNIQYWTSRGWAFVDVNYGGSTGYGREYRERLLRQWGIVDVDDCCGCAKYLVSSGKADVKRLCISGGSAGGYTTLASLAFRDVFKAGASLYGVADLKMLKEEGHKFESRYIDNLVGDEKDFYERSPINFVDKFSCPIILFQGLEDKVVTPDQSRKIYEALKKKGLPVALVEYEGEQHGFRKAENIKYTLEQQMVFFARVVGGFKVADDITPLKIDNFDT

SEQ ID NO: 44637 - protein, 466 aa, Arabidopsis thaliana
  peptide (1)..(466): Ceres Seq. ID no. 13509242
  misc_feature (256)..(320): Pfam Name: Prolyl oligopeptidase family Pfam Description: Prolyl oligopeptidase family
  misc_feature (75)..(448): Homolog of NCBI NO: 21224792 NR Description: putative acyl-peptide hydrolase [Streptomyces
  misc_feature (1)..(431): Homolog of NCBI NO: 23476937 NR Description: aminopeptidase C [Aspergillus niger]
  misc_feature (34)..(448): Homolog of NCBI NO: 22972830 NR Description: hypothetical protein [Chloroflexus aurantiacus]
  misc_feature (1)..(88): Homolog of NCBI NO: 23062020 NR Description: hypothetical protein [Pseudomonas fluorescens
  misc_feature (136)..(448): Homolog of NCBI NO: 23062020 NR Description: hypothetical protein [Pseudomonas fluorescens
  misc_feature (34)..(458): Homolog of NCBI NO: 29654820 NR Description: prolyl oligopeptidase family protein [Coxiella
  misc_feature (1)..(443): Homolog of NCBI NO: 23029170 NR Description: hypothetical protein [Microbulbifer degradans
  misc_feature (1)..(448): Homolog of NCBI NO: 16331709 NR Description: hypothetical protein [Synechocystis sp. PCC 6803]
  misc_feature (34)..(463): Homolog of NCBI NO: 37521039 NR Description: probable peptidase [Gloeobacter violaceus]
  misc_feature (1)..(463): Homolog of NCBI NO: 23043087 NR Description: hypothetical protein [Trichodesmium erythraeum
MPWDKAELWVGYISEGGNIDKRVCVAGCDPKYVESPTEPKWSSRGELFFVTDRKNGCWNIHKWIESTNEVVSVYPLDGEFAKPLWIFGTNSYEIIECSEEKNLIACSYRQKGKSYLGIVDDSQGSCSLLDIPLTDFDSITLGNQCLYVEGASAVLPPSVARVTLDQHKTKALSSEIVWSSSPDVLKYKAYFSVPELIEFPTEVPGQNAYAYFYPPTNPLYNASMEEKPPLLVKSHGGPTAESRGSLNLNIQYWTSRGWAFVDVNYGGSTGYGREYRERLLRQWGIVDVDDCCGCAKYLVSSGKADVKRLCISGGSAGGYTTLASLAFRDVFKAGASLYGVADLKMLKEEGHKFESRYIDNLVGDEKDFYERSPINFVDKFSCPIILFQGLEDKVVTPDQSRKIYEALKKKGLPVALVEYEGEQHGFRKAENIKYTLEQQMVFFARVVGGFKVADDITPLKIDNFDT

SEQ ID NO: 44638 - DNA, 1044 bp, Arabidopsis thaliana; identical to SEQ ID NO: 23575
  misc_feature (1)..(1044): Ceres Seq. ID no. 12488528
  misc_feature: MA Experiment ID: 108464 Result: Up-regulated in Transcription
  misc_feature: MA Experiment 108464 PARAMETER Experiment Name: At_Germinating_Seeds_cDNA_P Parameter: Age (day) Value: 4 vs. 0
  misc_feature: MA Experiment 108464 PARAMETER Experiment Name: At_Germinating_Seeds_cDNA_P Parameter: Tissue Value: Germinating Seeds
  misc_feature: MA Experiment ID: 20000113 Result: Down-regulated in Transcription
  misc_feature: MA Experiment 20000113 PARAMETER Experiment Name: At_42deg_Heat_cDNA_P Parameter: Temperature (deg C) Value: 42 vs. 22
  misc_feature: MA Experiment 20000113 PARAMETER Experiment Name: At_42deg_Heat_cDNA_P Parameter: Timepoint (hr) Value: 8
  misc_feature: MA Experiment 20000113 PARAMETER Experiment Name: At_42deg_Heat_cDNA_P Parameter: Tissue Value: Aerial
  misc_feature: MA Experiment ID: 20000173 Result: Up-regulated in Transcription
  misc_feature: MA Experiment 20000173 PARAMETER Experiment Name: At_42deg_Heat_P Parameter: Age (day) Value: 14
  misc_feature: MA Experiment 20000173 PARAMETER Experiment Name: At_42deg_Heat_P Parameter: Organism Value: A. thaliana
  misc_feature: MA Experiment 20000173 PARAMETER Experiment Name: At_42deg_Heat_P Parameter: Plant Line Value: WS
  misc_feature: MA Experiment 20000173 PARAMETER Experiment Name: At_42deg_Heat_P Parameter: Temperature (deg C) Value: 42 vs. 22
  misc_feature: MA Experiment 20000173 PARAMETER Experiment Name: At_42deg_Heat_P Parameter: Timepoint (hr) Value: 6
  misc_feature: MA Experiment 20000173 PARAMETER Experiment Name: At_42deg_Heat_P Parameter: Tissue Value: Aerial
  misc_feature: MA Experiment ID: 20000180 Result: Up-regulated in Transcription
  misc_feature: MA Experiment 20000180 PARAMETER Experiment Name: At_Germinating_Seeds_P Parameter: Age (hr) Value: 24 vs. 0
  misc_feature: MA Experiment 20000180 PARAMETER Experiment Name: At_Germinating_Seeds_P Parameter: Tissue Value: Germinating Seeds
  misc_feature: MA Experiment ID: 20000184 Result: Up-regulated in Transcription
  misc_feature: MA Experiment 20000184 PARAMETER Experiment Name: At_Shoots__P Parameter: Age (day) Value: 7
  misc_feature: MA Experiment 20000184 PARAMETER Experiment Name: At_Shoots__P Parameter: Tissue Value: Shoots vs. Whole Plant
  misc_feature: MA Experiment ID: 20000185 Result: Up-regulated in Transcription
  misc_feature: MA Experiment 20000185 PARAMETER Experiment Name: At_Roots__P Parameter: Age (day) Value: 7 vs. 21
  misc_feature: MA Experiment 20000185 PARAMETER Experiment Name: At_Roots__P Parameter: Organism Value: A. thaliana
  misc_feature: MA Experiment 20000185 PARAMETER Experiment Name: At_Roots__P Parameter: Tissue Value: Roots vs. Whole Plant
  misc_feature: MA Experiment ID: 20000437 Result: Down-regulated in Transcription
  misc_feature: MA Experiment 20000437 PARAMETER Experiment Name: At_Drought_P Parameter: Age (day) Value: 8
  misc_feature: MA Experiment 20000437 PARAMETER Experiment Name: At_Drought_P Parameter: Organism Value: A. thaliana
  misc_feature: MA Experiment 20000437 PARAMETER Experiment Name: At_Drought_P Parameter: Plant Line Value: WS
  misc_feature: MA Experiment 20000437 PARAMETER Experiment Name: At_Drought_P Parameter: Timepoint (hr) Value: 24
  misc_feature: MA Experiment 20000437 PARAMETER Experiment Name: At_Drought_P Parameter: Tissue Value: Whole Plant
  misc_feature: MA Experiment 20000437 PARAMETER Experiment Name: At_Drought_P Parameter: Treatment Value: Drought vs. No Drought
  misc_feature: MA Experiment ID: 20000573 Result: Down-regulated in Transcription
  misc_feature: MA Experiment 20000573 PARAMETER Experiment Name: At_100uM_ABA_Mutants__P Parameter: Organism Value: A. thaliana
  misc_feature: MA Experiment 20000573 PARAMETER Experiment Name: At_100uM_ABA_Mutants__P Parameter: Plant Line Value: CS22 vs. Ler wt
  misc_feature: MA Experiment 20000573 PARAMETER Experiment Name: At_100uM_ABA_Mutants__P Parameter: Timepoint (hr) Value: N/A
  misc_feature: MA Experiment 20000573 PARAMETER Experiment Name: At_100uM_ABA_Mutants__P Parameter: Tissue Value: Whole Plant
  misc_feature: MA Experiment 20000573 PARAMETER Experiment Name: At_100uM_ABA_Mutants__P Parameter: Treatment Value: None
  misc_feature: MA Experiment ID: 20000794 Result: Down-regulated in Transcription
  misc_feature: MA Experiment 20000794 PARAMETER Experiment Name: At_Petals_P Parameter: Age (day) Value: 23-25 days
  misc_feature: MA Experiment 20000794 PARAMETER Experiment Name: At_Petals_P Parameter: Plant Line Value: WS
  misc_feature: MA Experiment 20000794 PARAMETER Experiment Name: At_Petals_P Parameter: Tissue Value: Petals vs. Whole plant
  misc_feature: MA Experiment ID: 20001248 Result: Down-regulated in Transcription
  misc_feature: MA Experiment 20001248 PARAMETER Experiment Name: At_Far-red-induction_P Parameter: Age (day) Value: 7
  misc_feature: MA Experiment 20001248 PARAMETER Experiment Name: At_Far-red-induction_P Parameter: Light Value: Far-red vs. White
  misc_feature: MA Experiment 20001248 PARAMETER Experiment Name: At_Far-red-induction_P Parameter: Organism Value: A. thaliana
  misc_feature: MA Experiment 20001248 PARAMETER Experiment Name: At_Far-red-induction_P Parameter: Plant Line Value: Columbia
  misc_feature: MA Experiment 20001248 PARAMETER Experiment Name: At_Far-red-induction_P Parameter: Timepoint (hr) Value: 4
  misc_feature: MA Experiment 20001248 PARAMETER Experiment Name: At_Far-red-induction_P Parameter: Tissue Value: Whole Plant
  misc_feature: MA Experiment ID: 20001450 Result: Down-regulated in Transcription
  misc_feature: MA Experiment 20001450 PARAMETER Experiment Name: At_Far-red-induction_P Parameter: Age (day) Value: 7
  misc_feature: MA Experiment 20001450 PARAMETER Experiment Name: At_Far-red-induction_P Parameter: Light Value: Far-red vs. White
  misc_feature: MA Experiment 20001450 PARAMETER Experiment Name: At_Far-red-induction_P Parameter: Organism Value: A. thaliana
  misc_feature: MA Experiment 20001450 PARAMETER Experiment Name: At_Far-red-induction_P Parameter: Plant Line Value: Columbia
  misc_feature: MA Experiment 20001450 PARAMETER Experiment Name: At_Far-red-induction_P Parameter: Timepoint (hr) Value: 8
  misc_feature: MA Experiment 20001450 PARAMETER Experiment Name: At_Far-red-induction_P Parameter: Tissue Value: Whole Plant
  misc_feature: MA Experiment ID: 20001451 Result: Down-regulated in Transcription
  misc_feature: MA Experiment 20001451 PARAMETER Experiment Name: At_Far-red-induction_P Parameter: Age (day) Value: 7
  misc_feature: MA Experiment 20001451 PARAMETER Experiment Name: At_Far-red-induction_P Parameter: Light Value: Far-red vs. White
  misc_feature: MA Experiment 20001451 PARAMETER Experiment Name: At_Far-red-induction_P Parameter: Organism Value: A. thaliana
  misc_feature: MA Experiment 20001451 PARAMETER Experiment Name: At_Far-red-induction_P Parameter: Plant Line Value: Columbia
  misc_feature: MA Experiment 20001451 PARAMETER Experiment Name: At_Far-red-induction_P Parameter: Timepoint (hr) Value: 24
  misc_feature: MA Experiment 20001451 PARAMETER Experiment Name: At_Far-red-induction_P Parameter: Tissue Value: Whole Plant
  misc_feature: MA Experiment ID: 20001555 Result: Down-regulated in Transcription
  misc_feature: MA Experiment 20001555 PARAMETER Experiment Name: At_Drought_Soil_Dry_P Parameter: Age (day) Value: 24
  misc_feature: MA Experiment 20001555 PARAMETER Experiment Name: At_Drought_Soil_Dry_P Parameter: Organism Value: A. thaliana
  misc_feature: MA Experiment 20001555 PARAMETER Experiment Name: At_Drought_Soil_Dry_P Parameter: Plant Line Value: WS
  misc_feature: MA Experiment 20001555 PARAMETER Experiment Name: At_Drought_Soil_Dry_P Parameter: Post Timepoint (hr) Value: None
  misc_feature: MA Experiment 20001555 PARAMETER Experiment Name: At_Drought_Soil_Dry_P Parameter: Post-Treatment Value: None
  misc_feature: MA Experiment 20001555 PARAMETER Experiment Name: At_Drought_Soil_Dry_P Parameter: Timepoint (day) Value: 10
  misc_feature: MA Experiment 20001555 PARAMETER Experiment Name: At_Drought_Soil_Dry_P Parameter: Treatment Value: Drought vs. No Drought
  misc_feature: MA Experiment ID: 20001556 Result: Down-regulated in Transcription
  misc_feature: MA Experiment 20001556 PARAMETER Experiment Name: At_Drought_Soil_Dry_P Parameter: Age (day) Value: 26
  misc_feature: MA Experiment 20001556 PARAMETER Experiment Name: At_Drought_Soil_Dry_P Parameter: Organism Value: A. thaliana
  misc_feature: MA Experiment 20001556 PARAMETER Experiment Name: At_Drought_Soil_Dry_P Parameter: Plant Line Value: WS
  misc_feature: MA Experiment 20001556 PARAMETER Experiment Name: At_Drought_Soil_Dry_P Parameter: Post Timepoint (hr) Value: None
  misc_feature: MA Experiment 20001556 PARAMETER Experiment Name: At_Drought_Soil_Dry_P Parameter: Post-Treatment Value: None
  misc_feature: MA Experiment 20001556 PARAMETER Experiment Name: At_Drought_Soil_Dry_P Parameter: Timepoint (day) Value: 12
  misc_feature: MA Experiment 20001556 PARAMETER Experiment Name: At_Drought_Soil_Dry_P Parameter: Treatment Value: Drought vs. No Drought
  misc_feature: MA Experiment ID: 20001905 Result: Down-regulated in Transcription
  misc_feature: MA Experiment 20001905 PARAMETER Experiment Name: At_Drought_Reproduction_P Parameter: Age (day) Value: 40
  misc_feature: MA Experiment 20001905 PARAMETER Experiment Name: At_Drought_Reproduction_P Parameter: Organism Value: A. thaliana
  misc_feature: MA Experiment 20001905 PARAMETER Experiment Name: At_Drought_Reproduction_P Parameter: Plant Line Value: WS
  misc_feature: MA Experiment 20001905 PARAMETER Experiment Name: At_Drought_Reproduction_P Parameter: Timepoint (day) Value: 10
  misc_feature: MA Experiment 20001905 PARAMETER Experiment Name: At_Drought_Reproduction_P Parameter: Tissue Value: Rosettes
  misc_feature: MA Experiment 20001905 PARAMETER Experiment Name: At_Drought_Reproduction_P Parameter: Treatment Value: Drought vs. No Drought
  misc_feature: MA Experiment ID: 20001906 Result: Down-regulated in Transcription
  misc_feature: MA Experiment 20001906 PARAMETER Experiment Name: At_Drought_Reproduction_P Parameter: Age (day) Value: 35
  misc_feature: MA Experiment 20001906 PARAMETER Experiment Name: At_Drought_Reproduction_P Parameter: Organism Value: A. thaliana
  misc_feature: MA Experiment 20001906 PARAMETER Experiment Name: At_Drought_Reproduction_P Parameter: Plant Line Value: WS
  misc_feature: MA Experiment 20001906 PARAMETER Experiment Name: At_Drought_Reproduction_P Parameter: Timepoint (day) Value: 5
  misc_feature: MA Experiment 20001906 PARAMETER Experiment Name: At_Drought_Reproduction_P Parameter: Tissue Value: Siliques
  misc_feature: MA Experiment 20001906 PARAMETER Experiment Name: At_Drought_Reproduction_P Parameter: Treatment Value: Drought vs. No Drought
  misc_feature: MA Experiment ID: 20001911 Result: Down-regulated in Transcription
  misc_feature: MA Experiment 20001911 PARAMETER Experiment Name: At_Drought_Reproduction_P Parameter: Age (day) Value: 40
  misc_feature: MA Experiment 20001911 PARAMETER Experiment Name: At_Drought_Reproduction_P Parameter: Organism Value: A. thaliana
  misc_feature: MA Experiment 20001911 PARAMETER Experiment Name: At_Drought_Reproduction_P Parameter: Plant Line Value: WS
  misc_feature: MA Experiment 20001911 PARAMETER Experiment Name: At_Drought_Reproduction_P Parameter: Timepoint (day) Value: 10
  misc_feature: MA Experiment 20001911 PARAMETER Experiment Name: At_Drought_Reproduction_P Parameter: Tissue Value: Flowers
  misc_feature: MA Experiment 20001911 PARAMETER Experiment Name: At_Drought_Reproduction_P Parameter: Treatment Value: Drought vs. No Drought

SEQ ID NO: 44639 - protein, 271 aa, Arabidopsis thaliana; identical to SEQ ID NO: 23576
  peptide (1)..(271): Ceres Seq. ID no. 12488529
  misc_feature (13)..(234): Pfam Name: Major intrinsic protein Pfam Description: Major intrinsic protein
  misc_feature (13)..(234): Pfam Name: Major intrinsic protein Pfam Description: Major intrinsic protein
  misc_feature (1)..(253): Homolog of NCBI NO: 11357300 NR Description: gamma tonoplast intrinsic protein 2
  misc_feature (1)..(253): Homolog of NCBI NO: 15231569 NR Description: gamma tonoplast intrinsic protein
  misc_feature (1)..(253): Homolog of NCBI NO: 5081419 NR Description: tonoplast intrinsic protein [Brassica napus]
  misc_feature (1)..(253): Homolog of NCBI NO: 1514977 NR Description: VM23 [Raphanus sativus]
  misc_feature (1)..(243): Homolog of NCBI NO: 22858917 NR Description: tonoplast intrinsic protein bobTIP26-2
  misc_feature (1)..(253): Homolog of NCBI NO: 11357300 NR Description: gamma tonoplast intrinsic protein 2
  misc_feature (1)..(253): Homolog of NCBI NO: 5081419 NR Description: tonoplast intrinsic protein [Brassica napus]
  misc_feature (1)..(243): Homolog of NCBI NO: 22858917 NR Description: tonoplast intrinsic protein bobTIP26-2
  misc_feature (1)..(247): Homolog of NCBI NO: 99747 NR Description: probable membrane channel protein RB7 -
  misc_feature (1)..(243): Homolog of NCBI NO: 15228041 NR Description: putative aquaporin (tonoplast intrinsic protein
  misc_feature (1)..(243): Homolog of NCBI NO: 21593151 NR Description: putative aquaporin (tonoplast intrinsic protein
  misc_feature (1)..(243): Homolog of NCBI NO: 475048 NR Description: tonoplast intrinsic protein gamma (gamma-TIP)
  misc_feature (1)..(243): Homolog of NCBI NO: 21284370 NR Description: tonoplast intrinsic protein bobTIP26-1
  misc_feature (1)..(253): Homolog of NCBI NO: 1514977 NR Description: VM23 [Raphanus sativus]
  misc_feature (1)..(253): Homolog of NCBI NO: 15231569 NR Description: gamma tonoplast intrinsic protein
  misc_feature (1)..(243): Homolog of NCBI NO: 21284370 NR Description: tonoplast intrinsic protein bobTIP26-1
  misc_feature (1)..(243): Homolog of NCBI NO: 475048 NR Description: tonoplast intrinsic protein gamma (gamma-TIP)
  misc_feature (1)..(243): Homolog of NCBI NO: 21593151 NR Description: putative aquaporin (tonoplast intrinsic protein
  misc_feature (1)..(243): Homolog of NCBI NO: 15228041 NR Description: putative aquaporin (tonoplast intrinsic protein
  misc_feature (1)..(247): Homolog of NCBI NO: 99747 NR Description: probable membrane channel protein RB7 -

SEQ ID NO: 44640 - protein, 230 aa, Arabidopsis thaliana; identical to SEQ ID NO: 23577
  peptide (1)..(230): Ceres Seq. ID no. 12488530
  misc_feature (1)..(193): Pfam Name: Major intrinsic protein Pfam Description: Major intrinsic protein
  misc_feature (1)..(193): Pfam Name: Major intrinsic protein Pfam Description: Major intrinsic protein
  misc_feature (1)..(212): Homolog of NCBI NO: 11357300 NR Description: gamma tonoplast intrinsic protein 2
  misc_feature (1)..(212): Homolog of NCBI NO: 15231569 NR Description: gamma tonoplast intrinsic protein
  misc_feature (1)..(212): Homolog of NCBI NO: 5081419 NR Description: tonoplast intrinsic protein [Brassica napus]
  misc_feature (1)..(212): Homolog of NCBI NO: 1514977 NR Description: VM23 [Raphanus sativus]
  misc_feature (1)..(202): Homolog of NCBI NO: 22858917 NR Description: tonoplast intrinsic protein bobTIP26-2
  misc_feature (1)..(212): Homolog of NCBI NO: 11357300 NR Description: gamma tonoplast intrinsic protein 2
  misc_feature (1)..(212): Homolog of NCBI NO: 5081419 NR Description: tonoplast intrinsic protein [Brassica napus]
  misc_feature (1)..(202): Homolog of NCBI NO: 22858917 NR Description: tonoplast intrinsic protein bobTIP26-2
  misc_feature (1)..(206): Homolog of NCBI NO: 99747 NR Description: probable membrane channel protein RB7 -
  misc_feature (1)..(202): Homolog of NCBI NO: 15228041 NR Description: putative aquaporin (tonoplast intrinsic protein
  misc_feature (1)..(202): Homolog of NCBI NO: 21593151 NR Description: putative aquaporin (tonoplast intrinsic protein
  misc_feature (1)..(202): Homolog of NCBI NO: 475048 NR Description: tonoplast intrinsic protein gamma (gamma-TIP)
  misc_feature (1)..(202): Homolog of NCBI NO: 21284370 NR Description: tonoplast intrinsic protein bobTIP26-1
  misc_feature (1)..(212): Homolog of NCBI NO: 1514977 NR Description: VM23 [Raphanus sativus]
  misc_feature (1)..(212): Homolog of NCBI NO: 15231569 NR Description: gamma tonoplast intrinsic protein
  misc_feature (1)..(202): Homolog of NCBI NO: 21284370 NR Description: tonoplast intrinsic protein bobTIP26-1
  misc_feature (1)..(202): Homolog of NCBI NO: 475048 NR Description: tonoplast intrinsic protein gamma (gamma-TIP)
  misc_feature (1)..(202): Homolog of NCBI NO: 21593151 NR Description: putative aquaporin (tonoplast intrinsic protein
  misc_feature (1)..(202): Homolog of NCBI NO: 15228041 NR Description: putative aquaporin (tonoplast intrinsic protein
  misc_feature (1)..(206): Homolog of NCBI NO: 99747 NR Description: probable membrane channel protein RB7 -

SEQ ID NO: 44641 - DNA, 650 bp, Arabidopsis thaliana
  misc_feature (1)..(650): Ceres Seq. ID no. 13503838
  misc_feature: MA Experiment ID: 108577 Result: Down-regulated in Transcription
  misc_feature: MA Experiment 108577 PARAMETER Experiment Name: At_42deg_Heat_cDNA_P Parameter: Temperature (deg C) Value: 42 vs. 22
  misc_feature: MA Experiment 108577 PARAMETER Experiment Name: At_42deg_Heat_cDNA_P Parameter: Timepoint (hr) Value: 6
  misc_feature: MA Experiment 108577 PARAMETER Experiment Name: At_42deg_Heat_cDNA_P Parameter: Tissue Value: Aerial
  misc_feature: MA Experiment ID: 108605 Result: Up-regulated in Transcription
  misc_feature: MA Experiment 108605 PARAMETER Experiment Name: At_100uM_ABA_cDNA_P Parameter: Timepoint (hr) Value: 6
  misc_feature: MA Experiment 108605 PARAMETER Experiment Name: At_100uM_ABA_cDNA_P Parameter: Tissue Value: Aerial
  misc_feature: MA Experiment 108605 PARAMETER Experiment Name: At_100uM_ABA_cDNA_P Parameter: Treatment Value: 100uM ABA vs. No Treatment
  misc_feature: MA Experiment ID: 108607 Result: Up-regulated in Transcription
  misc_feature: MA Experiment 108607 PARAMETER Experiment Name: At_100uM_ABA_cDNA_P Parameter: Timepoint (hr) Value: 4
  misc_feature: MA Experiment 108607 PARAMETER Experiment Name: At_100uM_ABA_cDNA_P Parameter: Tissue Value: Aerial
  misc_feature: MA Experiment 108607 PARAMETER Experiment Name: At_100uM_ABA_cDNA_P Parameter: Treatment Value: 100uM ABA vs. No Treatment
  misc_feature: MA Experiment ID: 20000111 Result: Down-regulated in Transcription
  misc_feature: MA Experiment 20000111 PARAMETER Experiment Name: At_42deg_Heat_cDNA_P Parameter: Temperature (deg C) Value: 42 vs. 22
  misc_feature: MA Experiment 20000111 PARAMETER Experiment Name: At_42deg_Heat_cDNA_P Parameter: Timepoint (hr) Value: 6
  misc_feature: MA Experiment 20000111 PARAMETER Experiment Name: At_42deg_Heat_cDNA_P Parameter: Tissue Value: Aerial
  misc_feature: MA Experiment ID: 20000166 Result: Up-regulated in Transcription
  misc_feature: MA Experiment 20000166 PARAMETER Experiment Name: At_100uM_ABA_P Parameter: Age (day) Value: 14
  misc_feature: MA Experiment 20000166 PARAMETER Experiment Name: At_100uM_ABA_P Parameter: Organism Value: A. thaliana
  misc_feature: MA Experiment 20000166 PARAMETER Experiment Name: At_100uM_ABA_P Parameter: Plant Line Value: WS
  misc_feature: MA Experiment 20000166 PARAMETER Experiment Name: At_100uM_ABA_P Parameter: Timepoint (hr) Value: 1
  misc_feature: MA Experiment 20000166 PARAMETER Experiment Name: At_100uM_ABA_P Parameter: Tissue Value: Aerial
  misc_feature: MA Experiment 20000166 PARAMETER Experiment Name: At_100uM_ABA_P Parameter: Treatment Value: 100uM ABA vs. No Treatment
  misc_feature: MA Experiment ID: 20000224 Result: Up-regulated in Transcription
  misc_feature: MA Experiment ID: 20000265 Result: Up-regulated in Transcription
  misc_feature: MA Experiment 20000265 PARAMETER Experiment Name: At_Open_Flower_P Parameter: Age (day) Value: 21
  misc_feature: MA Experiment 20000265 PARAMETER Experiment Name: At_Open_Flower_P Parameter: Plant Line Value: WS
  misc_feature: MA Experiment 20000265 PARAMETER Experiment Name: At_Open_Flower_P Parameter: Tissue Value: Closed Flower vs. Whole Plant
  misc_feature: MA Experiment ID: 20000495 Result: Down-regulated in Transcription
  misc_feature: MA Experiment 20000495 PARAMETER Experiment Name: At_Guard_Cells_P Parameter: Harvest Date Value: 8/2/2002
  misc_feature: MA Experiment 20000495 PARAMETER Experiment Name: At_Guard_Cells_P Parameter: Organism Value: A. thaliana
  misc_feature: MA Experiment 20000495 PARAMETER Experiment Name: At_Guard_Cells_P Parameter: Tissue Value: Guard Cells vs. Leaves
  misc_feature: MA Experiment ID: 20000573 Result: Down-regulated in Transcription
  misc_feature: MA Experiment 20000573 PARAMETER Experiment Name: At_100uM_ABA_Mutants__P Parameter: Organism Value: A. thaliana
  misc_feature: MA Experiment 20000573 PARAMETER Experiment Name: At_100uM_ABA_Mutants__P Parameter: Plant Line Value: CS22 vs. Ler wt
  misc_feature: MA Experiment 20000573 PARAMETER Experiment Name: At_100uM_ABA_Mutants__P Parameter: Timepoint (hr) Value: N/A
  misc_feature: MA Experiment 20000573 PARAMETER Experiment Name: At_100uM_ABA_Mutants__P Parameter: Tissue Value: Whole Plant
  misc_feature: MA Experiment 20000573 PARAMETER Experiment Name: At_100uM_ABA_Mutants__P Parameter: Treatment Value: None
  misc_feature: MA Experiment ID: 20000574 Result: Down-regulated in Transcription
  misc_feature: MA Experiment 20000574 PARAMETER Experiment Name: At_100uM_ABA_Mutants__P Parameter: Organism Value: A. thaliana
  misc_feature: MA Experiment 20000574 PARAMETER Experiment Name: At_100uM_ABA_Mutants__P Parameter: Plant Line Value: CS23 vs. Ler wt
  misc_feature: MA Experiment 20000574 PARAMETER Experiment Name: At_100uM_ABA_Mutants__P Parameter: Timepoint (hr) Value: N/A
  misc_feature: MA Experiment 20000574 PARAMETER Experiment Name: At_100uM_ABA_Mutants__P Parameter: Tissue Value: Whole Plant
  misc_feature: MA Experiment 20000574 PARAMETER Experiment Name: At_100uM_ABA_Mutants__P Parameter: Treatment Value: None
  misc_feature: MA Experiment ID: 20000794 Result: Down-regulated in Transcription
  misc_feature: MA Experiment 20000794 PARAMETER Experiment Name: At_Petals_P Parameter: Age (day) Value: 23-25 days
  misc_feature: MA Experiment 20000794 PARAMETER Experiment Name: At_Petals_P Parameter: Plant Line Value: WS
  misc_feature: MA Experiment 20000794 PARAMETER Experiment Name: At_Petals_P Parameter: Tissue Value: Petals vs. Whole plant
  misc_feature: MA Experiment ID: 20001248 Result: Down-regulated in Transcription
  misc_feature: MA Experiment 20001248 PARAMETER Experiment Name: At_Far-red-induction_P Parameter: Age (day) Value: 7
  misc_feature: MA Experiment 20001248 PARAMETER Experiment Name: At_Far-red-induction_P Parameter: Light Value: Far-red vs. White
  misc_feature: MA Experiment 20001248 PARAMETER Experiment Name: At_Far-red-induction_P Parameter: Organism Value: A. thaliana
  misc_feature: MA Experiment 20001248 PARAMETER Experiment Name: At_Far-red-induction_P Parameter: Plant Line Value: Columbia
  misc_feature: MA Experiment 20001248 PARAMETER Experiment Name: At_Far-red-induction_P Parameter: Timepoint (hr) Value: 4
  misc_feature: MA Experiment 20001248 PARAMETER Experiment Name: At_Far-red-induction_P Parameter: Tissue Value: Whole Plant
  misc_feature: MA Experiment ID: 20001450 Result: Down-regulated in Transcription
  misc_feature: MA Experiment 20001450 PARAMETER Experiment Name: At_Far-red-induction_P Parameter: Age (day) Value: 7
  misc_feature: MA Experiment 20001450 PARAMETER Experiment Name: At_Far-red-induction_P Parameter: Light Value: Far-red vs. White
  misc_feature: MA Experiment 20001450 PARAMETER Experiment Name: At_Far-red-induction_P Parameter: Organism Value: A. thaliana
  misc_feature: MA Experiment 20001450 PARAMETER Experiment Name: At_Far-red-induction_P Parameter: Plant Line Value: Columbia
  misc_feature: MA Experiment 20001450 PARAMETER Experiment Name: At_Far-red-induction_P Parameter: Timepoint (hr) Value: 8
  misc_feature: MA Experiment 20001450 PARAMETER Experiment Name: At_Far-red-induction_P Parameter: Tissue Value: Whole Plant
  misc_feature: MA Experiment ID: 20001451 Result: Down-regulated in Transcription
  misc_feature: MA Experiment 20001451 PARAMETER Experiment Name: At_Far-red-induction_P Parameter: Age (day) Value: 7
  misc_feature: MA Experiment 20001451 PARAMETER Experiment Name: At_Far-red-induction_P Parameter: Light Value: Far-red vs. White
  misc_feature: MA Experiment 20001451 PARAMETER Experiment Name: At_Far-red-induction_P Parameter: Organism Value: A. thaliana
  misc_feature: MA Experiment 20001451 PARAMETER Experiment Name: At_Far-red-induction_P Parameter: Plant Line Value: Columbia
  misc_feature: MA Experiment 20001451 PARAMETER Experiment Name: At_Far-red-induction_P Parameter: Timepoint (hr) Value: 24
  misc_feature: MA Experiment 20001451 PARAMETER Experiment Name: At_Far-red-induction_P Parameter: Tissue Value: Whole Plant
  misc_feature: MA Experiment ID: 20001558 Result: Up-regulated in Transcription
  misc_feature: MA Experiment 20001558 PARAMETER Experiment Name: At_Drought_Soil_Dry_P Parameter: Age (day) Value: 27
  misc_feature: MA Experiment 20001558 PARAMETER Experiment Name: At_Drought_Soil_Dry_P Parameter: Organism Value: A. thaliana
  misc_feature: MA Experiment 20001558 PARAMETER Experiment Name: At_Drought_Soil_Dry_P Parameter: Plant Line Value: WS
  misc_feature: MA Experiment 20001558 PARAMETER Experiment Name: At_Drought_Soil_Dry_P Parameter: Post Timepoint (hr) Value: 6
  misc_feature: MA Experiment 20001558 PARAMETER Experiment Name: At_Drought_Soil_Dry_P Parameter: Post-Treatment Value: Re-Water vs. No Drought
  misc_feature: MA Experiment 20001558 PARAMETER Experiment Name: At_Drought_Soil_Dry_P Parameter: Timepoint (day) Value: 13
  misc_feature: MA Experiment 20001558 PARAMETER Experiment Name: At_Drought_Soil_Dry_P Parameter: Treatment Value: Drought vs. No Drought
taagagacagagagatcttaacacaaaacaaagcaaacaccaaaaaaaacagagatgggtttggttacagatgaagtgagagctagggcagagaaatacacaggagatgagatatgccgtgagaagacaaaggagtttctcaaggaagtttctatgcctaatggtttattgccattgaaggacattgaagaagttggttacgacagagagacaggtattgtctggctgaagcagaagaagagcatcacccacaagtttgaagccattggtaaacttgtctcttacgccaccgaggtcattgcacaggtggaggtcggaaagatcaagaagcttaccggtgttaaggccaaggagcttcttatttgggtcactctcaatgagcttgtcttggagcagccgacaagttcagggaagatcaatttcaggacaccaactggtctgtccaggactttcccagtgtctgctttcgttgttcctgaagttgagaagcctgcaacggagaagaacaatggaaccactgaggtcaaagaagctgttgcagtcacagatgcttagtctctctaatcttattaatcttatccttccaatcatgaattactttctgctatttgctgcttaatttccttttatcaataagatgatacaatttc

SEQ ID NO: 44642 - protein, 166 aa, Arabidopsis thaliana; identical to SEQ ID NO: 27010
  peptide (1)..(166): Ceres Seq. ID no. 13503839
  misc_feature (3)..(149): Pfam Name: Protein of unknown function, DUF538 Pfam Description: Protein of unknown function, DUF538
  misc_feature (9)..(142): Homolog of NCBI NO: 34915378 NR Description: hypothetical protein~similar to Oryza sativa
  misc_feature (9)..(143): Homolog of NCBI NO: 34915418 NR Description: hypothetical protein~similar to Arabidopsis
  misc_feature (9)..(142): Homolog of NCBI NO: 34915422 NR Description: hypothetical protein~similar to Arabidopsis
  misc_feature (9)..(142): Homolog of NCBI NO: 33146557 NR Description: unknown protein [Oryza sativa (japonica
  misc_feature (9)..(142): Homolog of NCBI NO: 34915426 NR Description: hypothetical protein~similar to Arabidopsis
  misc_feature (9)..(142): Homolog of NCBI NO: 34915376 NR Description: hypothetical protein~similar to Oryza sativa
  misc_feature (9)..(142): Homolog of NCBI NO: 34915410 NR Description: hypothetical protein~similar to Arabidopsis
  misc_feature (9)..(138): Homolog of NCBI NO: 34903866 NR Description: unnamed protein product [Oryza sativa (japonica
  misc_feature (1)..(166): Homolog of NCBI NO: 18391006 NR Description: expressed protein [Arabidopsis thaliana]
  misc_feature (1)..(166): Homolog of NCBI NO: 18405887 NR Description: expressed protein [Arabidopsis thaliana]

SEQ ID NO: 44643 - protein, 133 aa, Arabidopsis thaliana; identical to SEQ ID NO: 27011
  peptide (1)..(133): Ceres Seq. ID no. 13503840
  misc_feature (1)..(116): Pfam Name: Protein of unknown function, DUF538 Pfam Description: Protein of unknown function, DUF538
  misc_feature (1)..(109): Homolog of NCBI NO: 34915378 NR Description: hypothetical protein~similar to Oryza sativa
  misc_feature (1)..(110): Homolog of NCBI NO: 34915418 NR Description: hypothetical protein~similar to Arabidopsis
  misc_feature (1)..(109): Homolog of NCBI NO: 34915422 NR Description: hypothetical protein~similar to Arabidopsis
  misc_feature (1)..(109): Homolog of NCBI NO: 33146557 NR Description: unknown protein [Oryza sativa (japonica
  misc_feature (1)..(109): Homolog of NCBI NO: 34915426 NR Description: hypothetical protein~similar to Arabidopsis
  misc_feature (1)..(109): Homolog of NCBI NO: 34915376 NR Description: hypothetical protein~similar to Oryza sativa
  misc_feature (1)..(109): Homolog of NCBI NO: 34915410 NR Description: hypothetical protein~similar to Arabidopsis
  misc_feature (1)..(105): Homolog of NCBI NO: 34903866 NR Description: unnamed protein product [Oryza sativa (japonica
  misc_feature (1)..(133): Homolog of NCBI NO: 18391006 NR Description: expressed protein [Arabidopsis thaliana]
  misc_feature (1)..(133): Homolog of NCBI NO: 18405887 NR Description: expressed protein [Arabidopsis thaliana]

SEQ ID NO: 44644 - DNA, 1749 bp, Arabidopsis thaliana; identical to SEQ ID NO: 24981
  misc_feature (1)..(1749): Ceres Seq. ID no. 12326633
  misc_feature: MA Experiment ID: 108434 Result: Up-regulated in Transcription
  misc_feature: MA Experiment 108434 PARAMETER Experiment Name: At_Root_Tips_cDNA_P Parameter: Tissue Value: Root Tips
  misc_feature: MA Experiment ID: 108462 Result: Down-regulated in Transcription
  misc_feature: MA Experiment 108462 PARAMETER Experiment Name: At_Germinating_Seeds_cDNA_P Parameter: Age (day) Value: 2 vs. 0
  misc_feature: MA Experiment 108462 PARAMETER Experiment Name: At_Germinating_Seeds_cDNA_P Parameter: Tissue Value: Germinating Seeds
  misc_feature: MA Experiment ID: 108463 Result: Down-regulated in Transcription
  misc_feature: MA Experiment 108463 PARAMETER Experiment Name: At_Germinating_Seeds_cDNA_P Parameter: Age (day) Value: 3 vs. 0
  misc_feature: MA Experiment 108463 PARAMETER Experiment Name: At_Germinating_Seeds_cDNA_P Parameter: Tissue Value: Germinating Seeds
  misc_feature: MA Experiment ID: 108464 Result: Down-regulated in Transcription
  misc_feature: MA Experiment 108464 PARAMETER Experiment Name: At_Germinating_Seeds_cDNA_P Parameter: Age (day) Value: 4 vs. 0
  misc_feature: MA Experiment 108464 PARAMETER Experiment Name: At_Germinating_Seeds_cDNA_P Parameter: Tissue Value: Germinating Seeds
  misc_feature: MA Experiment ID: 108573 Result: Up-regulated in Transcription
  misc_feature: MA Experiment 108573 PARAMETER Experiment Name: At_Drought_cDNA_P Parameter: Timepoint (hr) Value: 6
  misc_feature: MA Experiment 108573 PARAMETER Experiment Name: At_Drought_cDNA_P Parameter: Tissue Value: Aerial
  misc_feature: MA Experiment 108573 PARAMETER Experiment Name: At_Drought_cDNA_P Parameter: Treatment Value: Drought vs. No Drought
  misc_feature: MA Experiment ID: 20000087 Result: Down-regulated in Transcription
  misc_feature: MA Experiment 20000087 PARAMETER Experiment Name: At_100uM_ABA_Mutants_cDNA_P Parameter: Plant Line Value: WS
  misc_feature: MA Experiment 20000087 PARAMETER Experiment Name: At_100uM_ABA_Mutants_cDNA_P Parameter: Timepoint (hr) Value: 6
  misc_feature: MA Experiment 20000087 PARAMETER Experiment Name: At_100uM_ABA_Mutants_cDNA_P Parameter: Tissue Value: Aerial
  misc_feature: MA Experiment 20000087 PARAMETER Experiment Name: At_100uM_ABA_Mutants_cDNA_P Parameter: Treatment Value: 100uM ABA vs. No Treatment
  misc_feature: MA Experiment ID: 20000224 Result: Down-regulated in Transcription
  misc_feature: MA Experiment ID: 20000794 Result: Down-regulated in Transcription
  misc_feature: MA Experiment 20000794 PARAMETER Experiment Name: At_Petals_P Parameter: Age (day) Value: 23-25 days
  misc_feature: MA Experiment 20000794 PARAMETER Experiment Name: At_Petals_P Parameter: Plant Line Value: WS
  misc_feature: MA Experiment 20000794 PARAMETER Experiment Name: At_Petals_P Parameter: Tissue Value: Petals vs. Whole plant
  misc_feature: MA Experiment ID: 20001557 Result: Up-regulated in Transcription
  misc_feature: MA Experiment 20001557 PARAMETER Experiment Name: At_Drought_Soil_Dry_P Parameter: Age (day) Value: 27
  misc_feature: MA Experiment 20001557 PARAMETER Experiment Name: At_Drought_Soil_Dry_P Parameter: Organism Value: A. thaliana
  misc_feature: MA Experiment 20001557 PARAMETER Experiment Name: At_Drought_Soil_Dry_P Parameter: Plant Line Value: WS
  misc_feature: MA Experiment 20001557 PARAMETER Experiment Name: At_Drought_Soil_Dry_P Parameter: Post Timepoint (hr) Value: 3
  misc_feature: MA Experiment 20001557 PARAMETER Experiment Name: At_Drought_Soil_Dry_P Parameter: Post-Treatment Value: Re-Water vs. No Drought
  misc_feature: MA Experiment 20001557 PARAMETER Experiment Name: At_Drought_Soil_Dry_P Parameter: Timepoint (day) Value: 13
  misc_feature: MA Experiment 20001557 PARAMETER Experiment Name: At_Drought_Soil_Dry_P Parameter: Treatment Value: Drought vs. No Drought
  misc_feature: MA Experiment ID: 20001558 Result: Up-regulated in Transcription
  misc_feature: MA Experiment 20001558 PARAMETER Experiment Name: At_Drought_Soil_Dry_P Parameter: Age (day) Value: 27
  misc_feature: MA Experiment 20001558 PARAMETER Experiment Name: At_Drought_Soil_Dry_P Parameter: Organism Value: A. thaliana
  misc_feature: MA Experiment 20001558 PARAMETER Experiment Name: At_Drought_Soil_Dry_P Parameter: Plant Line Value: WS
  misc_feature: MA Experiment 20001558 PARAMETER Experiment Name: At_Drought_Soil_Dry_P Parameter: Post Timepoint (hr) Value: 6
  misc_feature: MA Experiment 20001558 PARAMETER Experiment Name: At_Drought_Soil_Dry_P Parameter: Post-Treatment Value: Re-Water vs. No Drought
  misc_feature: MA Experiment 20001558 PARAMETER Experiment Name: At_Drought_Soil_Dry_P Parameter: Timepoint (day) Value: 13
  misc_feature: MA Experiment 20001558 PARAMETER Experiment Name: At_Drought_Soil_Dry_P Parameter: Treatment Value: Drought vs. No Drought

SEQ ID NO: 44645 - protein, 379 aa, Arabidopsis thaliana; identical to SEQ ID NO: 24982
  peptide (1)..(379): Ceres Seq. ID no. 12326634
  misc_feature (218)..(326): Pfam Name: Elongation factor 1 gamma, conserved domain Pfam Description: Elongation factor 1 gamma, conserved domain
  misc_feature (218)..(326): Pfam Name: Elongation factor 1 gamma, conserved domain Pfam Description: Elongation factor 1 gamma, conserved domain
  misc_feature (1)..(379): Homolog of NCBI NO: 13626392 NR Description: Elongation factor 1-gamma (EF-1-gamma) (eEF-1B
  misc_feature (1)..(379): Homolog of NCBI NO: 29367403 NR Description: elongation factor 1 gamma-like protein
  misc_feature (1)..(379): Homolog of NCBI NO: 13626515 NR Description: Elongation factor 1-gamma (EF-1-gamma) (eEF-1B
  misc_feature (35)..(379): Homolog of NCBI NO: 19423960 NR Description: unknown protein [Arabidopsis thaliana]
  misc_feature (1)..(379): Homolog of NCBI NO: 29367403 NR Description: elongation factor 1 gamma-like protein
  misc_feature (35)..(379): Homolog of NCBI NO: 19423960 NR Description: unknown protein [Arabidopsis thaliana]
  misc_feature (1)..(379): Homolog of NCBI NO: 15223649 NR Description: elongation factor 1B-gamma, putative (eEF-1B
  misc_feature (1)..(379): Homolog of NCBI NO: 18391048 NR Description: elongation factor 1B-gamma, putative (eEF-1B
  misc_feature (1)..(379): Homolog of NCBI NO: 14334818 NR Description: putative elongation factor 1B gamma [Arabidopsis
  misc_feature (1)..(379): Homolog of NCBI NO: 13626515 NR Description: Elongation factor 1-gamma (EF-1-gamma) (eEF-1B
  misc_feature (1)..(379): Homolog of NCBI NO: 13626392 NR Description: Elongation factor 1-gamma (EF-1-gamma) (eEF-1B
  misc_feature (1)..(379): Homolog of NCBI NO: 14334818 NR Description: putative elongation factor 1B gamma [Arabidopsis
  misc_feature (1)..(379): Homolog of NCBI NO: 15223649 NR Description: elongation factor 1B-gamma, putative (eEF-1B
  misc_feature (1)..(379): Homolog of NCBI NO: 18391048 NR Description: elongation factor 1B-gamma, putative (eEF-1B

SEQ ID NO: 44646 - protein, 367 aa, Arabidopsis thaliana; identical to SEQ ID NO: 24983
  peptide (1)..(367): Ceres Seq. ID no. 12326635
  misc_feature (206)..(314): Pfam Name: Elongation factor 1 gamma, conserved domain Pfam Description: Elongation factor 1 gamma, conserved domain
  misc_feature (206)..(314): Pfam Name: Elongation factor 1 gamma, conserved domain Pfam Description: Elongation factor 1 gamma, conserved domain
  misc_feature (1)..(367): Homolog of NCBI NO: 13626392 NR Description: Elongation factor 1-gamma (EF-1-gamma) (eEF-1B
  misc_feature (1)..(367): Homolog of NCBI NO: 29367403 NR Description: elongation factor 1 gamma-like protein
  misc_feature (1)..(367): Homolog of NCBI NO: 13626515 NR Description: Elongation factor 1-gamma (EF-1-gamma) (eEF-1B
  misc_feature (23)..(367): Homolog of NCBI NO: 19423960 NR Description: unknown protein [Arabidopsis thaliana]
  misc_feature (1)..(367): Homolog of NCBI NO: 29367403 NR Description: elongation factor 1 gamma-like protein
  misc_feature (23)..(367): Homolog of NCBI NO: 19423960 NR Description: unknown protein [Arabidopsis thaliana]
  misc_feature (1)..(367): Homolog of NCBI NO: 15223649 NR Description: elongation factor 1B-gamma, putative (eEF-1B
  misc_feature (1)..(367): Homolog of NCBI NO: 18391048 NR Description: elongation factor 1B-gamma, putative (eEF-1B
  misc_feature (1)..(367): Homolog of NCBI NO: 14334818 NR Description: putative elongation factor 1B gamma [Arabidopsis
  misc_feature (1)..(367): Homolog of NCBI NO: 13626515 NR Description: Elongation factor 1-gamma (EF-1-gamma) (eEF-1B
  misc_feature (1)..(367): Homolog of NCBI NO: 13626392 NR Description: Elongation factor 1-gamma (EF-1-gamma) (eEF-1B
  misc_feature (1)..(367): Homolog of NCBI NO: 14334818 NR Description: putative elongation factor 1B gamma [Arabidopsis
  misc_feature (1)..(367): Homolog of NCBI NO: 15223649 NR Description: elongation factor 1B-gamma, putative (eEF-1B
  misc_feature (1)..(367): Homolog of NCBI NO: 18391048 NR Description: elongation factor 1B-gamma, putative (eEF-1B

SEQ ID NO: 44647 - protein, 298 aa, Arabidopsis thaliana; identical to SEQ ID NO: 24984
  peptide (1)..(298): Ceres Seq. ID no. 12326636
  misc_feature (137)..(245): Pfam Name: Elongation factor 1 gamma, conserved domain Pfam Description: Elongation factor 1 gamma, conserved domain
  misc_feature (137)..(245): Pfam Name: Elongation factor 1 gamma, conserved domain Pfam Description: Elongation factor 1 gamma, conserved domain
  misc_feature (1)..(298): Homolog of NCBI NO: 13626392 NR Description: Elongation factor 1-gamma (EF-1-gamma) (eEF-1B
  misc_feature (1)..(298): Homolog of NCBI NO: 29367403 NR Description: elongation factor 1 gamma-like protein
  misc_feature (1)..(298): Homolog of NCBI NO: 13626515 NR Description: Elongation factor 1-gamma (EF-1-gamma) (eEF-1B
  misc_feature (1)..(298): Homolog of NCBI NO: 19423960 NR Description: unknown protein [Arabidopsis thaliana]
  misc_feature (1)..(298): Homolog of NCBI NO: 29367403 NR Description: elongation factor 1 gamma-like protein
  misc_feature (1)..(298): Homolog of NCBI NO: 19423960 NR Description: unknown protein [Arabidopsis thaliana]
  misc_feature (1)..(298): Homolog of NCBI NO: 15223649 NR Description: elongation factor 1B-gamma, putative (eEF-1B
  misc_feature (1)..(298): Homolog of NCBI NO: 18391048 NR Description: elongation factor 1B-gamma, putative (eEF-1B
  misc_feature (1)..(298): Homolog of NCBI NO: 14334818 NR Description: putative elongation factor 1B gamma [Arabidopsis
  misc_feature (1)..(298): Homolog of NCBI NO: 13626515 NR Description: Elongation factor 1-gamma (EF-1-gamma) (eEF-1B
  misc_feature (1)..(298): Homolog of NCBI NO: 13626392 NR Description: Elongation factor 1-gamma (EF-1-gamma) (eEF-1B
  misc_feature (1)..(298): Homolog of NCBI NO: 14334818 NR Description: putative elongation factor 1B gamma [Arabidopsis
  misc_feature (1)..(298): Homolog of NCBI NO: 15223649 NR Description: elongation factor 1B-gamma, putative (eEF-1B
  misc_feature (1)..(298): Homolog of NCBI NO: 18391048 NR Description: elongation factor 1B-gamma, putative (eEF-1B

SEQ ID NO: 44648 - DNA, 2070 bp, Arabidopsis thaliana
  misc_feature (1)..(2070): Ceres Seq. ID no. 12455389
  misc_feature: MA Experiment ID: 20000794 Result: Down-regulated in Transcription
  misc_feature: MA Experiment 20000794 PARAMETER Experiment Name: At_Petals_P Parameter: Age (day) Value: 23-25 days
  misc_feature: MA Experiment 20000794 PARAMETER Experiment Name: At_Petals_P Parameter: Plant Line Value: WS
  misc_feature: MA Experiment 20000794 PARAMETER Experiment Name: At_Petals_P Parameter: Tissue Value: Petals vs. Whole plant
ctcttcaaccatttcccggcttccgcgtttttgctttgtagcgccggaccggagaagataaaacccttgctccgccccactcacaggaagttctacatcgacctgagttctcgtacttcgtcgtatcactcgttcttcctacgatgaactgtgcaatttcaggagaagttcccgtggagccagtggtttcgacgaagtcaggattactcttcgagagacgactaatcgaaagacatatatcggattatgggaagtgcccggttactggcgaaccacttaccattgatgacattgttcccatcaaaactggggagatcataaagccgaaaacattgcatacagctagtatccctggattgctcggaacgttccagaatgaatgggacggtttgatgctatcaaattttgcactggagcaacaactacatactgcaaggcaagagctaagtcatgccttgtatcagcatgattctgcttgtcgtgtgattgctagacttaaaaaagaaagagacgaagcacgccaattactggccgaggttgagagacatatacctgcggcccctgaagctgtgacagctaatgctgctctgagtaatggtaaacgagctgccgttgacgaggaactgggtcctgatgcaaagaaattgtgtcctggaatttcagctgaaattattacggaattgactgattgtaatgctgctctttcccagaagcgaaaaaagcgacagattcctcaaacattggcgtcaatagatactttggagaggttcactcagctatcaagccacccacttcacaagaccaacaaaccaggcatttgttcgatggacattctacattctaaggatgtcattgctactggaggagttgatgcaactgctgttctctttgatcgcccttctggacaaatcttgtcaacactgactggtcactcgaagaaggttacaagcgtaaaatttgtaggcgactctgatcttgttttgactgcttctgctgacaagacagtccgtatctggcggaatcctggggatgggaattatgcttgtgggtatacattgaatgatcattctgcggaggtgcgagctgtaactgtgcatcccacaaataaatactttgtctcggcatctcttgatggtacatggtgcttctacgatctgtcctctggctcatgccttgcacaggtatcagatgattcaaagaatgtagattacacggctgctgcttttcatcccgatggtctcattctcggaaccggtacttctcaatctgttgttaagatttgggacgttaaaagtcaggcaaatgtggctaagtttgatggacacactggggaagttacagctatatctttctctgaaaatggttacttcctcgcgacagctgcagaggatggtgttaggttgtgggatctgcgcaagttaaggaacttcaaatcatttttatctgcagatgcgaactctgtggagtttgatcctagcggatcttatctcggtattgctgcatcagatatcaaagtataccagacggcaagtgtgaaagctgaatggaaccttatcaagacactcccagatctctccggcactggtaaagctacgtgtgtgaagtttggttcagatgcacagtacgttgcagtcggttcgatggaccgtaacctacggatatttggtcttcctggtgatgaaaaagccaacgtcgatgatgactctgcgcaagactcgtgaacaatccgtaaaaaactcagacagaacattccaaatgtccatctccagtgttatctcgctcaaatttctcaagttctgttgtatcttacagtatttgcagcaatgggggagaatttcataggtgcgggtcatgagtgagtggtgattgtgatcatcctcgctacctcttggaattcaaacaatgacactcacaaaccctcgagttttcttataggctcttttaatcgctttgtaccttcaatatatgtaccaaaaaatgtgttctttctgttgccaaatgaattcagacactaatgaagatcccaaaccgatggtgctaaaccgcatttggtattatttaatctgttct

SEQ ID NO: 44649 - protein, 525 aa, Arabidopsis thaliana
  peptide (1)..(525): Ceres Seq. ID no. 12455390
  misc_feature (3)..(62): Pfam Name: U-box domain Pfam Description: U-box domain
  misc_feature (3)..(62): Pfam Name: U-box domain Pfam Description: U-box domain
  misc_feature (3)..(62): Pfam Name: U-box domain Pfam Description: U-box domain
  misc_feature (3)..(509): Homolog of NCBI NO: 17647459 NR Description: GTP-binding-protein CG5519-PA [Drosophila
  misc_feature (1)..(33): Homolog of NCBI NO: 25406791 NR Description: hypothetical protein [imported] - Arabidopsis
  misc_feature (438)..(525): Homolog of NCBI NO: 25406791 NR Description: hypothetical protein [imported] - Arabidopsis
  misc_feature (107)..(398): Homolog of NCBI NO: 25406791 NR Description: hypothetical protein [imported] - Arabidopsis
  misc_feature (311)..(503): Homolog of NCBI NO: 25408261 NR Description: probable PRP19-like spliceosomal protein
  misc_feature (3)..(509): Homolog of NCBI NO: 17647459 NR Description: GTP-binding-protein CG5519-PA [Drosophila
  misc_feature (438)..(525): Homolog of NCBI NO: 25406791 NR Description: hypothetical protein [imported] - Arabidopsis
  misc_feature (311)..(503): Homolog of NCBI NO: 25408261 NR Description: probable PRP19-like spliceosomal protein
  misc_feature (107)..(398): Homolog of NCBI NO: 25406791 NR Description: hypothetical protein [imported] - Arabidopsis
  misc_feature (438)..(525): Homolog of NCBI NO: 25406791 NR Description: hypothetical protein [imported] - Arabidopsis
  misc_feature (1)..(33): Homolog of NCBI NO: 25406791 NR Description: hypothetical protein [imported] - Arabidopsis
  misc_feature (3)..(509): Homolog of NCBI NO: 17647459 NR Description: GTP-binding-protein CG5519-PA [Drosophila
  misc_feature (1)..(503): Homolog of NCBI NO: 30685651 NR Description: transducin / WD-40 repeat protein family
  misc_feature (1)..(503): Homolog of NCBI NO: 30685653 NR Description: transducin / WD-40 repeat protein family
  misc_feature (1)..(525): Homolog of NCBI NO: 18390401 NR Description: putative pre-mRNA splicing factor PRP19
  misc_feature (1)..(519): Homolog of NCBI NO: 37535206 NR Description: putative WD-repeat containing protein
  misc_feature (1)..(416): Homolog of NCBI NO: 25408261 NR Description: probable PRP19-like spliceosomal protein
  misc_feature (1)..(503): Homolog of NCBI NO: 30685651 NR Description: transducin / WD-40 repeat protein family
  misc_feature (1)..(503): Homolog of NCBI NO: 30685653 NR Description: transducin / WD-40 repeat protein family
  misc_feature (1)..(525): Homolog of NCBI NO: 18390401 NR Description: putative pre-mRNA splicing factor PRP19
  misc_feature (1)..(519): Homolog of NCBI NO: 37535206 NR Description: putative WD-repeat containing protein
  misc_feature (1)..(416): Homolog of NCBI NO: 25408261 NR Description: probable PRP19-like spliceosomal protein
  misc_feature (311)..(503): Homolog of NCBI NO: 25408261 NR Description: probable PRP19-like spliceosomal protein
  misc_feature (107)..(398): Homolog of NCBI NO: 25406791 NR Description: hypothetical protein [imported] - Arabidopsis
  misc_feature (1)..(33): Homolog of NCBI NO: 25406791 NR Description: hypothetical protein [imported] - Arabidopsis
  misc_feature (1)..(416): Homolog of NCBI NO: 25408261 NR Description: probable PRP19-like spliceosomal protein
  misc_feature (1)..(519): Homolog of NCBI NO: 37535206 NR Description: putative WD-repeat containing protein
  misc_feature (1)..(525): Homolog of NCBI NO: 18390401 NR Description: putative pre-mRNA splicing factor PRP19
  misc_feature (1)..(503): Homolog of NCBI NO: 30685653 NR Description: transducin / WD-40 repeat protein family
  misc_feature (1)..(503): Homolog of NCBI NO: 30685651 NR Description: transducin / WD-40 repeat protein family
MNCAISGEVPVEPVVSTKSGLLFERRLIERHISDYGKCPVTGEPLTIDDIVPIKTGEIIKPKTLHTASIPGLLGTFQNEWDGLMLSNFALEQQLHTARQELSHALYQHDSACRVIARLKKERDEARQLLAEVERHIPAAPEAVTANAALSNGKRAAVDEELGPDAKKLCPGISAEIITELTDCNAALSQKRKKRQIPQTLASIDTLERFTQLSSHPLHKTNKPGICSMDILHSKDVIATGGVDATAVLFDRPSGQILSTLTGHSKKVTSVKFVGDSDLVLTASADKTVRIWRNPGDGNYACGYTLNDHSAEVRAVTVHPTNKYFVSASLDGTWCFYDLSSGSCLAQVSDDSKNVDYTAAAFHPDGLILGTGTSQSVVKIWDVKSQANVAKFDGHTGEVTAISFSENGYFLATAAEDGVRLWDLRKLRNFKSFLSADANSVEFDPSGSYLGIAASDIKVYQTASVKAEWNLIKTLPDLSGTGKATCVKFGSDAQYVAVGSMDRNLRIFGLPGDEKANVDDDSAQDS

SEQ ID NO: 44650 - protein, 442 aa, Arabidopsis thaliana
  peptide (1)..(442): Ceres Seq. ID no. 12455391
  misc_feature (1)..(426): Homolog of NCBI NO: 28278498 NR Description: Similar to nuclear matrix protein NMP200 related
  misc_feature (1)..(426): Homolog of NCBI NO: 17647459 NR Description: GTP-binding-protein CG5519-PA [Drosophila
  misc_feature (355)..(442): Homolog of NCBI NO: 25406791 NR Description: hypothetical protein [imported] - Arabidopsis
  misc_feature (24)..(315): Homolog of NCBI NO: 25406791 NR Description: hypothetical protein [imported] - Arabidopsis
  misc_feature (228)..(420): Homolog of NCBI NO: 25408261 NR Description: probable PRP19-like spliceosomal protein
  misc_feature (1)..(333): Homolog of NCBI NO: 25408261 NR Description: probable PRP19-like spliceosomal protein
  misc_feature (1)..(436): Homolog of NCBI NO: 37535206 NR Description: putative WD-repeat containing protein
  misc_feature (1)..(442): Homolog of NCBI NO: 18390401 NR Description: putative pre-mRNA splicing factor PRP19
  misc_feature (1)..(420): Homolog of NCBI NO: 30685653 NR Description: transducin / WD-40 repeat protein family
  misc_feature (1)..(420): Homolog of NCBI NO: 30685651 NR Description: transducin / WD-40 repeat protein family
  misc_feature (1)..(426): Homolog of NCBI NO: 28278498 NR Description: Similar to nuclear matrix protein NMP200 related
  misc_feature (1)..(426): Homolog of NCBI NO: 17647459 NR Description: GTP-binding-protein CG5519-PA [Drosophila
  misc_feature (355)..(442): Homolog of NCBI NO: 25406791 NR Description: hypothetical protein [imported] - Arabidopsis
  misc_feature (24)..(315): Homolog of NCBI NO: 25406791 NR Description: hypothetical protein [imported] - Arabidopsis
  misc_feature (228)..(420): Homolog of NCBI NO: 25408261 NR Description: probable PRP19-like spliceosomal protein
  misc_feature (1)..(333): Homolog of NCBI NO: 25408261 NR Description: probable PRP19-like spliceosomal protein
  misc_feature (1)..(436): Homolog of NCBI NO: 37535206 NR Description: putative WD-repeat containing protein
  misc_feature (1)..(442): Homolog of NCBI NO: 18390401 NR Description: putative pre-mRNA splicing factor PRP19
  misc_feature (1)..(420): Homolog of NCBI NO: 30685653 NR Description: transducin / WD-40 repeat protein family
  misc_feature (1)..(420): Homolog of NCBI NO: 30685651 NR Description: transducin / WD-40 repeat protein family
  misc_feature (1)..(426): Homolog of NCBI NO: 28278498 NR Description: Similar to nuclear matrix protein NMP200 related
  misc_feature (1)..(426): Homolog of NCBI NO: 17647459 NR Description: GTP-binding-protein CG5519-PA [Drosophila
  misc_feature (355)..(442): Homolog of NCBI NO: 25406791 NR Description: hypothetical protein [imported] - Arabidopsis
  misc_feature (24)..(315): Homolog of NCBI NO: 25406791 NR Description: hypothetical protein [imported] - Arabidopsis
  misc_feature (228)..(420): Homolog of NCBI NO: 25408261 NR Description: probable PRP19-like spliceosomal protein
  misc_feature (1)..(333): Homolog of NCBI NO: 25408261 NR Description: probable PRP19-like spliceosomal protein
  misc_feature (1)..(436): Homolog of NCBI NO: 37535206 NR Description: putative WD-repeat containing protein
  misc_feature (1)..(442): Homolog of NCBI NO: 18390401 NR Description: putative pre-mRNA splicing factor PRP19
  misc_feature (1)..(420): Homolog of NCBI NO: 30685653 NR Description: transducin / WD-40 repeat protein family
  misc_feature (1)..(420): Homolog of NCBI NO: 30685651 NR Description: transducin / WD-40 repeat protein family
MLSNFALEQQLHTARQELSHALYQHDSACRVIARLKKERDEARQLLAEVERHIPAAPEAVTANAALSNGKRAAVDEELGPDAKKLCPGISAEIITELTDCNAALSQKRKKRQIPQTLASIDTLERFTQLSSHPLHKTNKPGICSMDILHSKDVIATGGVDATAVLFDRPSGQILSTLTGHSKKVTSVKFVGDSDLVLTASADKTVRIWRNPGDGNYACGYTLNDHSAEVRAVTVHPTNKYFVSASLDGTWCFYDLSSGSCLAQVSDDSKNVDYTAAAFHPDGLILGTGTSQSVVKIWDVKSQANVAKFDGHTGEVTAISFSENGYFLATAAEDGVRLWDLRKLRNFKSFLSADANSVEFDPSGSYLGIAASDIKVYQTASVKAEWNLIKTLPDLSGTGKATCVKFGSDAQYVAVGSMDRNLRIFGLPGDEKANVDDDSAQDS

SEQ ID NO: 44651 - protein, 298 aa, Arabidopsis thaliana
  peptide (1)..(298): Ceres Seq. ID no. 12455392
  misc_feature (1)..(282): Homolog of NCBI NO: 28278498 NR Description: Similar to nuclear matrix protein NMP200 related
  misc_feature (1)..(282): Homolog of NCBI NO: 17647459 NR Description: GTP-binding-protein CG5519-PA [Drosophila
  misc_feature (211)..(298): Homolog of NCBI NO: 25406791 NR Description: hypothetical protein [imported] - Arabidopsis
  misc_feature (1)..(171): Homolog of NCBI NO: 25406791 NR Description: hypothetical protein [imported] - Arabidopsis
  misc_feature (84)..(276): Homolog of NCBI NO: 25408261 NR Description: probable PRP19-like spliceosomal protein
  misc_feature (1)..(189): Homolog of NCBI NO: 25408261 NR Description: probable PRP19-like spliceosomal protein
  misc_feature (1)..(292): Homolog of NCBI NO: 37535206 NR Description: putative WD-repeat containing protein
  misc_feature (1)..(298): Homolog of NCBI NO: 18390401 NR Description: putative pre-mRNA splicing factor PRP19
  misc_feature (1)..(276): Homolog of NCBI NO: 30685653 NR Description: transducin / WD-40 repeat protein family
  misc_feature (1)..(276): Homolog of NCBI NO: 30685651 NR Description: transducin / WD-40 repeat protein family
  misc_feature (1)..(282): Homolog of NCBI NO: 28278498 NR Description: Similar to nuclear matrix protein NMP200 related
  misc_feature (1)..(282): Homolog of NCBI NO: 17647459 NR Description: GTP-binding-protein CG5519-PA [Drosophila
  misc_feature (211)..(298): Homolog of NCBI NO: 25406791 NR Description: hypothetical protein [imported] - Arabidopsis
  misc_feature (1)..(171): Homolog of NCBI NO: 25406791 NR Description: hypothetical protein [imported] - Arabidopsis
  misc_feature (84)..(276): Homolog of NCBI NO: 25408261 NR Description: probable PRP19-like spliceosomal protein
  misc_feature (1)..(189): Homolog of NCBI NO: 25408261 NR Description: probable PRP19-like spliceosomal protein
  misc_feature (1)..(292): Homolog of NCBI NO: 37535206 NR Description: putative WD-repeat containing protein
  misc_feature (1)..(298): Homolog of NCBI NO: 18390401 NR Description: putative pre-mRNA splicing factor PRP19
  misc_feature (1)..(276): Homolog of NCBI NO: 30685653 NR Description: transducin / WD-40 repeat protein family
  misc_feature (1)..(276): Homolog of NCBI NO: 30685651 NR Description: transducin / WD-40 repeat protein family
  misc_feature (1)..(282): Homolog of NCBI NO: 28278498 NR Description: Similar to nuclear matrix protein NMP200 related
  misc_feature (1)..(282): Homolog of NCBI NO: 17647459 NR Description: GTP-binding-protein CG5519-PA [Drosophila
  misc_feature (211)..(298): Homolog of NCBI NO: 25406791 NR Description: hypothetical protein [imported] - Arabidopsis
  misc_feature (1)..(171): Homolog of NCBI NO: 25406791 NR Description: hypothetical protein [imported] - Arabidopsis
  misc_feature (84)..(276): Homolog of NCBI NO: 25408261 NR Description: probable PRP19-like spliceosomal protein
  misc_feature (1)..(189): Homolog of NCBI NO: 25408261 NR Description: probable PRP19-like spliceosomal protein
  misc_feature (1)..(292): Homolog of NCBI NO: 37535206 NR Description: putative WD-repeat containing protein
  misc_feature (1)..(298): Homolog of NCBI NO: 18390401 NR Description: putative pre-mRNA splicing factor PRP19
  misc_feature (1)..(276): Homolog of NCBI NO: 30685653 NR Description: transducin / WD-40 repeat protein family
  misc_feature (1)..(276): Homolog of NCBI NO: 30685651 NR Description: transducin / WD-40 repeat protein family
MDILHSKDVIATGGVDATAVLFDRPSGQILSTLTGHSKKVTSVKFVGDSDLVLTASADKTVRIWRNPGDGNYACGYTLNDHSAEVRAVTVHPTNKYFVSASLDGTWCFYDLSSGSCLAQVSDDSKNVDYTAAAFHPDGLILGTGTSQSVVKIWDVKSQANVAKFDGHTGEVTAISFSENGYFLATAAEDGVRLWDLRKLRNFKSFLSADANSVEFDPSGSYLGIAASDIKVYQTASVKAEWNLIKTLPDLSGTGKATCVKFGSDAQYVAVGSMDRNLRIFGLPGDEKANVDDDSAQDS

SEQ ID NO: 44652 - DNA, 1245 bp, Arabidopsis thaliana
  misc_feature (1)..(1245): Ceres Seq. ID no. 13503062
  misc_feature: MA Experiment ID: 20000227 Result: Up-regulated in Transcription
  misc_feature: MA Experiment 20000227 PARAMETER Experiment Name: At_Root-Tips-vs-Tops_P Parameter: Tissue Value: Root Tips vs. Root Tops
  misc_feature: MA Experiment ID: 20001757 Result: Down-regulated in Transcription
  misc_feature: MA Experiment 20001757 PARAMETER Experiment Name: At_50mM_NH4NO3_L-to-H_P Parameter: Timepoint (hr) Value: 6
  misc_feature: MA Experiment 20001757 PARAMETER Experiment Name: At_50mM_NH4NO3_L-to-H_P Parameter: Tissue Value: Leaf
  misc_feature: MA Experiment 20001757 PARAMETER Experiment Name: At_50mM_NH4NO3_L-to-H_P Parameter: Treatment Value: 50mM NH4NO3 vs 100mM Mannitol
  misc_feature: MA Experiment ID: 20001905 Result: Up-regulated in Transcription
  misc_feature: MA Experiment 20001905 PARAMETER Experiment Name: At_Drought_Reproduction_P Parameter: Age (day) Value: 40
  misc_feature: MA Experiment 20001905 PARAMETER Experiment Name: At_Drought_Reproduction_P Parameter: Organism Value: A. thaliana
  misc_feature: MA Experiment 20001905 PARAMETER Experiment Name: At_Drought_Reproduction_P Parameter: Plant Line Value: WS
  misc_feature: MA Experiment 20001905 PARAMETER Experiment Name: At_Drought_Reproduction_P Parameter: Timepoint (day) Value: 10
  misc_feature: MA Experiment 20001905 PARAMETER Experiment Name: At_Drought_Reproduction_P Parameter: Tissue Value: Rosettes
  misc_feature: MA Experiment 20001905 PARAMETER Experiment Name: At_Drought_Reproduction_P Parameter: Treatment Value: Drought vs. No Drought
  misc_feature: MA Experiment ID: 20001911 Result: Up-regulated in Transcription
  misc_feature: MA Experiment 20001911 PARAMETER Experiment Name: At_Drought_Reproduction_P Parameter: Age (day) Value: 40
  misc_feature: MA Experiment 20001911 PARAMETER Experiment Name: At_Drought_Reproduction_P Parameter: Organism Value: A. thaliana
  misc_feature: MA Experiment 20001911 PARAMETER Experiment Name: At_Drought_Reproduction_P Parameter: Plant Line Value: WS
  misc_feature: MA Experiment 20001911 PARAMETER Experiment Name: At_Drought_Reproduction_P Parameter: Timepoint (day) Value: 10
  misc_feature: MA Experiment 20001911 PARAMETER Experiment Name: At_Drought_Reproduction_P Parameter: Tissue Value: Flowers
  misc_feature: MA Experiment 20001911 PARAMETER Experiment Name: At_Drought_Reproduction_P Parameter: Treatment Value: Drought vs. No Drought
cttaattgcctgtgttcatgtcttcatatctctaaccataagataaaactcaagatttctgaagaggacagctctggaattcatatacgttttgcctctccatctgattctcagcttatggaattggagcaaatctgcattttgaaacccgatgatgaggaanaaatggagtcaccatcaccatcgaaaacagaggaaaatttaggcgtggttcctctgtcttgcgcgtttacgagacaagaacattgcgtttccgagacgaaagaacgcgaagaatcgactagaagactaagcagccttatttttctttacctcatcgttatgtccgtacagattgtgggaggttttaaggcgaatagtcttgcggttatgacagatgctgcgcatttgttgtcggatgtggcgggtttgtgtgtctctttgttggcgatcaaggtctcgagctgggaagctaatccgcgaaactcgttcgggtttaaacggcttgaagttttagcggcgttcttgtctgttcagctcatatggcttgtctctggagtgataatccatgaagccattcaaagactacttagcagaagcagagaggttaatggagaaatcatgtttgggatttcggctttcgggtttttcatgaacttggttatggtcctttggttaggacataaccatagccaccaccaccacgaccatcatcaccatcatcataatcataaacatcaacatcaacatcatcacaaggaggtggtggcagaagaggaggaggaggaaatgaatcctttaaaaggtgagaaatcgtcttcaaaggagatgaacattaacatacaaggagcttatcttcacgcaatggctgatatgattcagtcactaggtgttatgattggtggaggtatcatttgggtaaaaccaaaatgggttttggttgatttgatttgcactcttgttttctctgcttttgctcttgctgctactctaccaattctcaagaacatatttggaatactgatggaacgcgtaccgcgtgatatggacatagagaagctcgaaagaggacttaagcgaatcgatggagttaagattgtttatgatctccatgtatgggagataacagtagggagaatcgtattgtcctgtcatatcttaccagagcctggagctagtcctaaagagatcattactggtgttagaaatttctgtaggaagtcttatgggatttatcatgcaactgttcaggttgaatcagagtag

SEQ ID NO: 44653 - protein, 414 aa, Arabidopsis thaliana
  peptide (1)..(414): Ceres Seq. ID no. 13503063
  misc_feature (100)..(414): Pfam Name: Cation efflux family Pfam Description: Cation efflux family
  misc_feature (220)..(412): Homolog of NCBI NO: 28315876 NR Description: putative vacuolar metal-ion transport protein
  misc_feature (75)..(253): Homolog of NCBI NO: 39919138 NR Description: zinc transporter CDF1-3 [Arabidopsis halleri
  misc_feature (220)..(412): Homolog of NCBI NO: 39919138 NR Description: zinc transporter CDF1-3 [Arabidopsis halleri
  misc_feature (75)..(245): Homolog of NCBI NO: 40287444 NR Description: heavy metal transporter MTP1 [Thlaspi
  misc_feature (221)..(412): Homolog of NCBI NO: 40287444 NR Description: heavy metal transporter MTP1 [Thlaspi
  misc_feature (218)..(412): Homolog of NCBI NO: 4206640 NR Description: zinc transporter ZAT [Arabidopsis thaliana]
  misc_feature (32)..(245): Homolog of NCBI NO: 4206640 NR Description: zinc transporter ZAT [Arabidopsis thaliana]
  misc_feature (220)..(412): Homolog of NCBI NO: 40287442 NR Description: heavy metal transporter MTP1 [Thlaspi arvense]
  misc_feature (44)..(245): Homolog of NCBI NO: 40287442 NR Description: heavy metal transporter MTP1 [Thlaspi arvense]
  misc_feature (38)..(414): Homolog of NCBI NO: 15227081 NR Description: zinc transporter, putative/metal tolerance
  misc_feature (55)..(55): Xaa is any aa, unknown or other
LNCLCSCLHISNHKIKLKISEEDSSGIHIRFASPSDSQLMELEQICILKPDDEEXMESPSPSKTEENLGVVPLSCAFTRQEHCVSETKEREESTRRLSSLIFLYLIVMSVQIVGGFKANSLAVMTDAAHLLSDVAGLCVSLLAIKVSSWEANPRNSFGFKRLEVLAAFLSVQLIWLVSGVIIHEAIQRLLSRSREVNGEIMFGISAFGFFMNLVMVLWLGHNHSHHHHDHHHHHHNHKHQHQHHHKEVVAEEEEEEMNPLKGEKSSSKEMNINIQGAYLHAMADMIQSLGVMIGGGIIWVKPKWVLVDLICTLVFSAFALAATLPILKNIFGILMERVPRDMDIEKLERGLKRIDGVKIVYDLHVWEITVGRIVLSCHILPEPGASPKEIITGVRNFCRKSYGIYHATVQVESE

SEQ ID NO: 44654 - protein, 375 aa, Arabidopsis thaliana
  peptide (1)..(375): Ceres Seq. ID no. 13503064
  misc_feature (61)..(375): Pfam Name: Cation efflux family Pfam Description: Cation efflux family
  misc_feature (181)..(373): Homolog of NCBI NO: 28315876 NR Description: putative vacuolar metal-ion transport protein
  misc_feature (36)..(214): Homolog of NCBI NO: 39919138 NR Description: zinc transporter CDF1-3 [Arabidopsis halleri
  misc_feature (181)..(373): Homolog of NCBI NO: 39919138 NR Description: zinc transporter CDF1-3 [Arabidopsis halleri
  misc_feature (36)..(206): Homolog of NCBI NO: 40287444 NR Description: heavy metal transporter MTP1 [Thlaspi
  misc_feature (182)..(373): Homolog of NCBI NO: 40287444 NR Description: heavy metal transporter MTP1 [Thlaspi
  misc_feature (179)..(373): Homolog of NCBI NO: 4206640 NR Description: zinc transporter ZAT [Arabidopsis thaliana]
  misc_feature (1)..(206): Homolog of NCBI NO: 4206640 NR Description: zinc transporter ZAT [Arabidopsis thaliana]
  misc_feature (181)..(373): Homolog of NCBI NO: 40287442 NR Description: heavy metal transporter MTP1 [Thlaspi arvense]
  misc_feature (5)..(206): Homolog of NCBI NO: 40287442 NR Description: heavy metal transporter MTP1 [Thlaspi arvense]
  misc_feature (1)..(375): Homolog of NCBI NO: 15227081 NR Description: zinc transporter, putative/metal tolerance
  misc_feature (16)..(16): Xaa is any aa, unknown or other
MELEQICILKPDDEEXMESPSPSKTEENLGVVPLSCAFTRQEHCVSETKEREESTRRLSSLIFLYLIVMSVQIVGGFKANSLAVMTDAAHLLSDVAGLCVSLLAIKVSSWEANPRNSFGFKRLEVLAAFLSVQLIWLVSGVIIHEAIQRLLSRSREVNGEIMFGISAFGFFMNLVMVLWLGHNHSHHHHDHHHHHHNHKHQHQHHHKEVVAEEEEEEMNPLKGEKSSSKEMNINIQGAYLHAMADMIQSLGVMIGGGIIWVKPKWVLVDLICTLVFSAFALAATLPILKNIFGILMERVPRDMDIEKLERGLKRIDGVKIVYDLHVWEITVGRIVLSCHILPEPGASPKEIITGVRNFCRKSYGIYHATVQVESE

SEQ ID NO: 44655 - protein, 359 aa, Arabidopsis thaliana
  peptide (1)..(359): Ceres Seq. ID no. 13503065
  misc_feature (45)..(359): Pfam Name: Cation efflux family Pfam Description: Cation efflux family
  misc_feature (165)..(357): Homolog of NCBI NO: 28315876 NR Description: putative vacuolar metal-ion transport protein
  misc_feature (20)..(198): Homolog of NCBI NO: 39919138 NR Description: zinc transporter CDF1-3 [Arabidopsis halleri
  misc_feature (165)..(357): Homolog of NCBI NO: 39919138 NR Description: zinc transporter CDF1-3 [Arabidopsis halleri
  misc_feature (20)..(190): Homolog of NCBI NO: 40287444 NR Description: heavy metal transporter MTP1 [Thlaspi
  misc_feature (166)..(357): Homolog of NCBI NO: 40287444 NR Description: heavy metal transporter MTP1 [Thlaspi
  misc_feature (163)..(357): Homolog of NCBI NO: 4206640 NR Description: zinc transporter ZAT [Arabidopsis thaliana]
  misc_feature (1)..(190): Homolog of NCBI NO: 4206640 NR Description: zinc transporter ZAT [Arabidopsis thaliana]
  misc_feature (165)..(357): Homolog of NCBI NO: 40287442 NR Description: heavy metal transporter MTP1 [Thlaspi arvense]
  misc_feature (1)..(190): Homolog of NCBI NO: 40287442 NR Description: heavy metal transporter MTP1 [Thlaspi arvense]
  misc_feature (1)..(359): Homolog of NCBI NO: 15227081 NR Description: zinc transporter, putative/metal tolerance
MESPSPSKTEENLGVVPLSCAFTRQEHCVSETKEREESTRRLSSLIFLYLIVMSVQIVGGFKANSLAVMTDAAHLLSDVAGLCVSLLAIKVSSWEANPRNSFGFKRLEVLAAFLSVQLIWLVSGVIIHEAIQRLLSRSREVNGEIMFGISAFGFFMNLVMVLWLGHNHSHHHHDHHHHHHNHKHQHQHHHKEVVAEEEEEEMNPLKGEKSSSKEMNINIQGAYLHAMADMIQSLGVMIGGGIIWVKPKWVLVDLICTLVFSAFALAATLPILKNIFGILMERVPRDMDIEKLERGLKRIDGVKIVYDLHVWEITVGRIVLSCHILPEPGASPKEIITGVRNFCRKSYGIYHATVQVESE

SEQ ID NO: 44656 - DNA, 750 bp, Arabidopsis thaliana
  misc_feature (1)..(750): Ceres Seq. ID no. 13509009
  misc_feature: MA Experiment ID: 20000315 Result: Up-regulated in Transcription
  misc_feature: MA Experiment 20000315 PARAMETER Experiment Name: At_14day_Shoots-Roots_Sub_P Parameter: Age (day) Value: 14
  misc_feature: MA Experiment 20000315 PARAMETER Experiment Name: At_14day_Shoots-Roots_Sub_P Parameter: Organism Value: A. thaliana
  misc_feature: MA Experiment 20000315 PARAMETER Experiment Name: At_14day_Shoots-Roots_Sub_P Parameter: Plant Line Value: WS
  misc_feature: MA Experiment 20000315 PARAMETER Experiment Name: At_14day_Shoots-Roots_Sub_P Parameter: Tissue Value: Shoots vs. Whole Plant
aatttattaatcagatcttgcccaattcttcaatttcttcaaccctaattcttctctctttctcagatctaccaaacttgatctccaatggcttcctcagcaccaccagtcctcccaatctccaatccccaaaccgttccatccgccgctccttcctccgtcgaatctcaaccaccgatcgctactccagctttccgcaatttcatcaatcagatcaccgaaaccgttaaaaacggtctctctaagcgtcgtccttgggctgagctcgcggatcgttccgcattatccaaacctgagtcgatctccgacgctgctgttcgtatccgcaagaattactcgtatttcaaggttaattacctcaccgtcgctacagcgatcgtcggattctctctcgtcactcatcctttctctctcgtcttcctcctctgtctcctcgcgtcgtggctcttcctctacttgttccgtcccacggatcagccgatcgttctattcggtcgtacattctccgatcgtgagacgttagggtgtttgattttgttcagtatctttgtgatcttcctcaccgatgttggatctgttctggtttcggctatgatgattggtgttgcgttgatctgtgctcatggtgcttttagagctccggaagatcttttccttgatgagcaagagcctgctgctaccggattcctctctttcctcggtggtgccgcctcttcagccgcgcctgctgttatcgccgctcgcgtgtaa

SEQ ID NO: 44657 - protein, 220 aa, Arabidopsis thaliana
  peptide (1)..(220): Ceres Seq. ID no. 13509010
  misc_feature (16)..(192): Homolog of NCBI NO: 34903576 NR Description: P0419B01.1 [Oryza sativa (japonica
  misc_feature (1)..(216): Homolog of NCBI NO: 40539036 NR Description: putative prenylated rab acceptor protein
  misc_feature (5)..(217): Homolog of NCBI NO: 15240698 NR Description: expressed protein [Arabidopsis thaliana]
  misc_feature (3)..(220): Homolog of NCBI NO: 15226664 NR Description: expressed protein [Arabidopsis thaliana]
  misc_feature (4)..(220): Homolog of NCBI NO: 15450978 NR Description: putative protein [Arabidopsis thaliana]
  misc_feature (11)..(214): Homolog of NCBI NO: 18072825 NR Description: prenylated Rab receptor 2 [Arabidopsis thaliana]
  misc_feature (11)..(214): Homolog of NCBI NO: 15239101 NR Description: expressed protein [Arabidopsis thaliana]
  misc_feature (4)..(220): Homolog of NCBI NO: 15228824 NR Description: expressed protein [Arabidopsis thaliana]
  misc_feature (1)..(218): Homolog of NCBI NO: 15241022 NR Description: expressed protein [Arabidopsis thaliana]
  misc_feature (1)..(220): Homolog of NCBI NO: 15224494 NR Description: expressed protein [Arabidopsis thaliana]
MASSAPPVLPISNPQTVPSAAPSSVESQPPIATPAFRNFINQITETVKNGLSKRRPWAELADRSALSKPESISDAAVRIRKNYSYFKVNYLTVATAIVGFSLVTHPFSLVFLLCLLASWLFLYLFRPTDQPIVLFGRTFSDRETLGCLILFSIFVIFLTDVGSVLVSAMMIGVALICAHGAFRAPEDLFLDEQEPAATGFLSFLGGAASSAAPAVIAARV

SEQ ID NO: 44658 - DNA, 2162 bp, Arabidopsis thaliana
  misc_feature (1)..(2162): Ceres Seq. ID no. 12455379
  misc_feature: MA Experiment ID: 20000171 Result: Down-regulated in Transcription
  misc_feature: MA Experiment 20000171 PARAMETER Experiment Name: At_42deg_Heat_P Parameter: Age (day) Value: 14
  misc_feature: MA Experiment 20000171 PARAMETER Experiment Name: At_42deg_Heat_P Parameter: Organism Value: A. thaliana
  misc_feature: MA Experiment 20000171 PARAMETER Experiment Name: At_42deg_Heat_P Parameter: Plant Line Value: WS
  misc_feature: MA Experiment 20000171 PARAMETER Experiment Name: At_42deg_Heat_P Parameter: Temperature (deg C) Value: 42 vs. 22
  misc_feature: MA Experiment 20000171 PARAMETER Experiment Name: At_42deg_Heat_P Parameter: Timepoint (hr) Value: 1
  misc_feature: MA Experiment 20000171 PARAMETER Experiment Name: At_42deg_Heat_P Parameter: Tissue Value: Aerial
  misc_feature: MA Experiment ID: 20000173 Result: Down-regulated in Transcription
  misc_feature: MA Experiment 20000173 PARAMETER Experiment Name: At_42deg_Heat_P Parameter: Age (day) Value: 14
  misc_feature: MA Experiment 20000173 PARAMETER Experiment Name: At_42deg_Heat_P Parameter: Organism Value: A. thaliana
  misc_feature: MA Experiment 20000173 PARAMETER Experiment Name: At_42deg_Heat_P Parameter: Plant Line Value: WS
  misc_feature: MA Experiment 20000173 PARAMETER Experiment Name: At_42deg_Heat_P Parameter: Temperature (deg C) Value: 42 vs. 22
  misc_feature: MA Experiment 20000173 PARAMETER Experiment Name: At_42deg_Heat_P Parameter: Timepoint (hr) Value: 6
  misc_feature: MA Experiment 20000173 PARAMETER Experiment Name: At_42deg_Heat_P Parameter: Tissue Value: Aerial
  misc_feature: MA Experiment ID: 20000794 Result: Up-regulated in Transcription
  misc_feature: MA Experiment 20000794 PARAMETER Experiment Name: At_Petals_P Parameter: Age (day) Value: 23-25 days
  misc_feature: MA Experiment 20000794 PARAMETER Experiment Name: At_Petals_P Parameter: Plant Line Value: WS
  misc_feature: MA Experiment 20000794 PARAMETER Experiment Name: At_Petals_P Parameter: Tissue Value: Petals vs. Whole plant
aaagaaaaaaatgagaatcttcaaataaaaaaaaaagaagagactacggagagtcaaaaacagtgagagctttctttcatcttcagccagatcggagcaatcttctccatagattccgtgaaacgatgggaatagccaataagctccggctaagttcatcatctctcagccgaatcctccaccggagaatactttactcatccgctgtcagatctttcaccacatcggaaggtcaccgtcccaccatcgttcataaacaaggtctcgatatcctccatgatccttggttcaacaaggggactgcgtttacgatgacggagagaaatcgtttagatcttagaggtcttcttcctcctaatgttatggactctgagcaacagatttttcgttttatgactgacctgaagagattagaggagcaagctagagatggaccttctgatcctaatgctttggctaaatggcggattcttaatcggttacatgaccgaaatgagactatgtactataaggttttgattaacaatattgaggagtatgcgccgatagtgtatactcctacggtaggtcttgtctgccagaactacagtgggttgtttaggaggccaaggggaatgtattttagtgctgaagatcgtggtgaaatgatgtccatggtttacaactggccagctgagcaggttgatatgattgttgttaccgatggaagccggattttgggtcttggagatctaggtgttcatggaattggaattgctgtagggaagcttgatttatatgttgccgcagctggaataaatcctcaacgggtactacctgtcatgattgatgttggaacaaacaatgaaaaactacgcaacgaccccatgtacttgggtctgcaacaacgtcgtttagaggatgacgactatatagatgttattgatgaatttatggaggcagtgtatactcggtggccacatgttattgtgcagtttgaggatttccagagcaagtgggctttcaaattattgcagaggtatagatgcacctaccgaatgttcaatgatgatgtccaggggacagcaggggttgctatcgctggtcttcttggagcagttagagcacaggggcgacctatgattgatttcccaaagatgaagatcgttgttgctggcgcgggaagtgcgggaattggtgttctaaatgctgcgaggaagacaatggcacgaatgttgggaaatactgaaactgcgtttgatagtgcacaaagtcaattttgggtggttgatgcgcagggtcttatcaccgaaggccgggaaaatattgacccagaggctcagccttttgctaggaagactaaagaaatggagcgtcagggattaaaagaaggagcaactcttgtggaagtggttcgtgaagttaaacctgatgtgcttcttggtttatcagcagttggagggttattctcaaaagaggttttagaagcaatgaaaggttcaacctcgacaaggcctgctatatttgcaatgtcaaaccccacaaaaaatgctgaatgcacgcctcaagatgcattttcgatattaggcgaaaatatgatttttgcgagtggaagcccattcaagaatgtggaatttggaaatggtcatgtaggacattgcaaccagggaaacaacatgtatctatttccaggtattggacttggcactcttttatctggtgctcccattgtctccgacgggatgcttcaggccgcatccgagtgcctagcagcatacatgagcgaagaagaagtgctagaggggattatataccctccaatatcaaggatacgagacataacaaaaagaatagcagctgcggtgattaaggaagcgattgaggaggatttggttgaaggatatagagaaatggacgctcgagagatccaaaagctggatgaggaggggctgatggagtatgtggaaaacaacatgtggaatccagagtacccgactttggtctacaaggatgactaagtttggttcccaaaatgaataagtctactttctcttatttatatgtaaaaatttataattggggttgctttatacccaatcaaattcatagctactgctttctcttgttcttatgtaaaaaaaaaaaaaatatataattgggttgtttgttatccaatcagattc

SEQ ID NO: 44659 - protein, 623 aa, Arabidopsis thaliana
  peptide (1)..(623): Ceres Seq. ID no. 12455380
  misc_feature (310)..(578): Pfam Name: Malic enzyme, NAD binding domain Pfam Description: Malic enzyme, NAD binding domain
  misc_feature (29)..(621): Homolog of NCBI NO: 7431221 NR Description: malate dehydrogenase (decarboxylating) (EC
  misc_feature (29)..(621): Homolog of NCBI NO: 30678679 NR Description: malate oxidoreductase -related [Arabidopsis
  misc_feature (29)..(621): Homolog of NCBI NO: 6382043 NR Description: F6N23.16 gene product [Arabidopsis thaliana]
  misc_feature (39)..(621): Homolog of NCBI NO: 585452 NR Description: NAD-DEPENDENT MALIC ENZYME 59 KDA ISOFORM,
  misc_feature (9)..(94): Homolog of NCBI NO: 34901810 NR Description: putative NAD-dependent malic enzyme 62 KDA
  misc_feature (64)..(332): Homolog of NCBI NO: 34901810 NR Description: putative NAD-dependent malic enzyme 62 KDA
  misc_feature (321)..(623): Homolog of NCBI NO: 34901810 NR Description: putative NAD-dependent malic enzyme 62 KDA
  misc_feature (3)..(621): Homolog of NCBI NO: 585450 NR Description: NAD-DEPENDENT MALIC ENZYME 65 KDA ISOFORM,
  misc_feature (9)..(623): Homolog of NCBI NO: 34393731 NR Description: putative malate dehydrogenase
  misc_feature (4)..(623): Homolog of NCBI NO: 585451 NR Description: NAD-DEPENDENT MALIC ENZYME 62 KDA ISOFORM,
MGIANKLRLSSSSLSRILHRRILYSSAVRSFTTSEGHRPTIVHKQGLDILHDPWFNKGTAFTMTERNRLDLRGLLPPNVMDSEQQIFRFMTDLKRLEEQARDGPSDPNALAKWRILNRLHDRNETMYYKVLINNIEEYAPIVYTPTVGLVCQNYSGLFRRPRGMYFSAEDRGEMMSMVYNWPAEQVDMIVVTDGSRILGLGDLGVHGIGIAVGKLDLYVAAAGINPQRVLPVMIDVGTNNEKLRNDPMYLGLQQRRLEDDDYIDVIDEFMEAVYTRWPHVIVQFEDFQSKWAFKLLQRYRCTYRMFNDDVQGTAGVAIAGLLGAVRAQGRPMIDFPKMKIVVAGAGSAGIGVLNAARKTMARMLGNTETAFDSAQSQFWVVDAQGLITEGRENIDPEAQPFARKTKEMERQGLKEGATLVEVVREVKPDVLLGLSAVGGLFSKEVLEAMKGSTSTRPAIFAMSNPTKNAECTPQDAFSILGENMIFASGSPFKNVEFGNGHVGHCNQGNNMYLFPGIGLGTLLSGAPIVSDGMLQAASECLAAYMSEEEVLEGIIYPPISRIRDITKRIAAAVIKEAIEEDLVEGYREMDAREIQKLDEEGLMEYVENNMWNPEYPTLVYKDD

SEQ ID NO: 44660 - protein, 561 aa, Arabidopsis thaliana
  peptide (1)..(561): Ceres Seq. ID no. 12455381
  misc_feature (248)..(516): Pfam Name: Malic enzyme, NAD binding domain Pfam Description: Malic enzyme, NAD binding domain
  misc_feature (1)..(559): Homolog of NCBI NO: 7431221 NR Description: malate dehydrogenase (decarboxylating) (EC
  misc_feature (1)..(559): Homolog of NCBI NO: 30678679 NR Description: malate oxidoreductase -related [Arabidopsis
  misc_feature (1)..(559): Homolog of NCBI NO: 6382043 NR Description: F6N23.16 gene product [Arabidopsis thaliana]
  misc_feature (1)..(559): Homolog of NCBI NO: 585452 NR Description: NAD-DEPENDENT MALIC ENZYME 59 KDA ISOFORM,
  misc_feature (1)..(32): Homolog of NCBI NO: 34901810 NR Description: putative NAD-dependent malic enzyme 62 KDA
  misc_feature (2)..(270): Homolog of NCBI NO: 34901810 NR Description: putative NAD-dependent malic enzyme 62 KDA
  misc_feature (259)..(561): Homolog of NCBI NO: 34901810 NR Description: putative NAD-dependent malic enzyme 62 KDA
  misc_feature (1)..(559): Homolog of NCBI NO: 585450 NR Description: NAD-DEPENDENT MALIC ENZYME 65 KDA ISOFORM,
  misc_feature (1)..(561): Homolog of NCBI NO: 34393731 NR Description: putative malate dehydrogenase
  misc_feature (1)..(561): Homolog of NCBI NO: 585451 NR Description: NAD-DEPENDENT MALIC ENZYME 62 KDA ISOFORM,
MTERNRLDLRGLLPPNVMDSEQQIFRFMTDLKRLEEQARDGPSDPNALAKWRILNRLHDRNETMYYKVLINNIEEYAPIVYTPTVGLVCQNYSGLFRRPRGMYFSAEDRGEMMSMVYNWPAEQVDMIVVTDGSRILGLGDLGVHGIGIAVGKLDLYVAAAGINPQRVLPVMIDVGTNNEKLRNDPMYLGLQQRRLEDDDYIDVIDEFMEAVYTRWPHVIVQFEDFQSKWAFKLLQRYRCTYRMFNDDVQGTAGVAIAGLLGAVRAQGRPMIDFPKMKIVVAGAGSAGIGVLNAARKTMARMLGNTETAFDSAQSQFWVVDAQGLITEGRENIDPEAQPFARKTKEMERQGLKEGATLVEVVREVKPDVLLGLSAVGGLFSKEVLEAMKGSTSTRPAIFAMSNPTKNAECTPQDAFSILGENMIFASGSPFKNVEFGNGHVGHCNQGNNMYLFPGIGLGTLLSGAPIVSDGMLQAASECLAAYMSEEEVLEGIIYPPISRIRDITKRIAAAVIKEAIEEDLVEGYREMDAREIQKLDEEGLMEYVENNMWNPEYPTLVYKDD

SEQ ID NO: 44661 - protein, 544 aa, Arabidopsis thaliana
  peptide (1)..(544): Ceres Seq. ID no. 12455382
  misc_feature (231)..(499): Pfam Name: Malic enzyme, NAD binding domain Pfam Description: Malic enzyme, NAD binding domain
  misc_feature (1)..(542): Homolog of NCBI NO: 7431221 NR Description: malate dehydrogenase (decarboxylating) (EC
  misc_feature (1)..(542): Homolog of NCBI NO: 30678679 NR Description: malate oxidoreductase -related [Arabidopsis
  misc_feature (1)..(542): Homolog of NCBI NO: 6382043 NR Description: F6N23.16 gene product [Arabidopsis thaliana]
  misc_feature (1)..(542): Homolog of NCBI NO: 585452 NR Description: NAD-DEPENDENT MALIC ENZYME 59 KDA ISOFORM,
  misc_feature (1)..(15): Homolog of NCBI NO: 34901810 NR Description: putative NAD-dependent malic enzyme 62 KDA
  misc_feature (1)..(253): Homolog of NCBI NO: 34901810 NR Description: putative NAD-dependent malic enzyme 62 KDA
  misc_feature (242)..(544): Homolog of NCBI NO: 34901810 NR Description: putative NAD-dependent malic enzyme 62 KDA
  misc_feature (1)..(542): Homolog of NCBI NO: 585450 NR Description: NAD-DEPENDENT MALIC ENZYME 65 KDA ISOFORM,
  misc_feature (1)..(544): Homolog of NCBI NO: 34393731 NR Description: putative malate dehydrogenase
  misc_feature (1)..(544): Homolog of NCBI NO: 585451 NR Description: NAD-DEPENDENT MALIC ENZYME 62 KDA ISOFORM,
MDSEQQIFRFMTDLKRLEEQARDGPSDPNALAKWRILNRLHDRNETMYYKVLINNIEEYAPIVYTPTVGLVCQNYSGLFRRPRGMYFSAEDRGEMMSMVYNWPAEQVDMIVVTDGSRILGLGDLGVHGIGIAVGKLDLYVAAAGINPQRVLPVMIDVGTNNEKLRNDPMYLGLQQRRLEDDDYIDVIDEFMEAVYTRWPHVIVQFEDFQSKWAFKLLQRYRCTYRMFNDDVQGTAGVAIAGLLGAVRAQGRPMIDFPKMKIVVAGAGSAGIGVLNAARKTMARMLGNTETAFDSAQSQFWVVDAQGLITEGRENIDPEAQPFARKTKEMERQGLKEGATLVEVVREVKPDVLLGLSAVGGLFSKEVLEAMKGSTSTRPAIFAMSNPTKNAECTPQDAFSILGENMIFASGSPFKNVEFGNGHVGHCNQGNNMYLFPGIGLGTLLSGAPIVSDGMLQAASECLAAYMSEEEVLEGIIYPPISRIRDITKRIAAAVIKEAIEEDLVEGYREMDAREIQKLDEEGLMEYVENNMWNPEYPTLVYKDD

SEQ ID NO: 44662 - DNA, 1010 bp, Arabidopsis thaliana
  misc_feature (1)..(1010): Ceres Seq. ID no. 12462224
  misc_feature: MA Experiment ID: 20000180 Result: Up-regulated in Transcription
  misc_feature: MA Experiment 20000180 PARAMETER Experiment Name: At_Germinating_Seeds_P Parameter: Age (hr) Value: 24 vs. 0
  misc_feature: MA Experiment 20000180 PARAMETER Experiment Name: At_Germinating_Seeds_P Parameter: Tissue Value: Germinating Seeds
  misc_feature: MA Experiment ID: 20000185 Result: Up-regulated in Transcription
  misc_feature: MA Experiment 20000185 PARAMETER Experiment Name: At_Roots__P Parameter: Age (day) Value: 7 vs. 21
  misc_feature: MA Experiment 20000185 PARAMETER Experiment Name: At_Roots__P Parameter: Organism Value: A. thaliana
  misc_feature: MA Experiment 20000185 PARAMETER Experiment Name: At_Roots__P Parameter: Tissue Value: Roots vs. Whole Plant
  misc_feature: MA Experiment ID: 20000438 Result: Down-regulated in Transcription
  misc_feature: MA Experiment 20000438 PARAMETER Experiment Name: At_Shoots__P Parameter: Age (day) Value: 14
  misc_feature: MA Experiment 20000438 PARAMETER Experiment Name: At_Shoots__P Parameter: Tissue Value: Shoots vs. Whole Plant
  misc_feature: MA Experiment ID: 20000527 Result: Down-regulated in Transcription
  misc_feature: MA Experiment 20000527 PARAMETER Experiment Name: At_10percent_PEG_P Parameter: Age (day) Value: 20
  misc_feature: MA Experiment 20000527 PARAMETER Experiment Name: At_10percent_PEG_P Parameter: Organism Value: A. thaliana
  misc_feature: MA Experiment 20000527 PARAMETER Experiment Name: At_10percent_PEG_P Parameter: Plant Line Value: WS
  misc_feature: MA Experiment 20000527 PARAMETER Experiment Name: At_10percent_PEG_P Parameter: Timepoint (day) Value: 20
  misc_feature: MA Experiment 20000527 PARAMETER Experiment Name: At_10percent_PEG_P Parameter: Tissue Value: Whole Plant
  misc_feature: MA Experiment 20000527 PARAMETER Experiment Name: At_10percent_PEG_P Parameter: Treatment Value: 10percent PEG vs. No Treatment
acgcgctttactgttttctcatcatcgtcacttttctttctccacactttccgcaagattgttctgttcttcaaacgattctaagatgaatggagaagaagtgaaaacgagtcaacctcagaagaagcttcagaaccctactccacgtttaaacgagaggattctctcatctttgtctaagagatcggttgctgcacatccatggcatgatcttgaaatcggacctggagctccagtgattttcaatgtggttattgagatctcaaaggggagcaaagtcaaatatgaacttgacaaaaaaacaggtctcatcaaggttgataggattctttattcttcggttgtgtatcctcacaactacgggtttgtcccacgcacactatgtgaagacaatgaccctatagatgttttagttatcatgcaggagcctgtgcttccgggttgttttcttcgcgcccgagctattggtttaatgcctatgattgaccagggtgaaaaagatgacaagatcattgcagtttgtgttgatgatcctgagtataagcacatcactaacatcaatgaacttcctcctcatcgtctttctgaaatccgtcgattctttgaagactacaagaagaatgagaacaaggaagttgcagtgaatgattttctacaacctggtcctgctattgaagccattcagtactcaatggatctttacgctgagtacattcttcacaccctgaggagatagatgaaaagaagacttcttcaagaacattcctgccaatttttgggtctgcaatctcagattctgttgcagtgaatatgcaaaagaacaagaatttgtcttatatttggattttttttgaataagcacgtgtctcatatttggctttgacgctttcctttttgttgttgttgttgttgttgtcttctggggatgttttgtctgaacattaagagtttgtatttgtaacactgcctttggatctttttttaataatttcaagcttcgatttggttcc

SEQ ID NO: 44663 - protein, 244 aa, Arabidopsis thaliana
  peptide (1)..(244): Ceres Seq. ID no. 12462225
  misc_feature (82)..(236): Pfam Name: Inorganic pyrophosphatase Pfam Description: Inorganic pyrophosphatase
  misc_feature (32)..(244): Homolog of NCBI NO: 4033424 NR Description: Soluble inorganic pyrophosphatase (Pyrophosphate
  misc_feature (33)..(244): Homolog of NCBI NO: 15231849 NR Description: inorganic pyrophosphatase -like protein
  misc_feature (44)..(244): Homolog of NCBI NO: 2500047 NR Description: Soluble inorganic pyrophosphatase (Pyrophosphate
  misc_feature (29)..(244): Homolog of NCBI NO: 26451240 NR Description: putative inorganic pyrophosphatase [Arabidopsis
  misc_feature (29)..(244): Homolog of NCBI NO: 15226453 NR Description: putative inorganic pyrophosphatase; protein id:
  misc_feature (35)..(244): Homolog of NCBI NO: 5669924 NR Description: soluble inorganic pyrophosphatase
  misc_feature (205)..(244): Homolog of NCBI NO: 25290346 NR Description: protein T25K16.5 [imported] - Arabidopsis
  misc_feature (32)..(203): Homolog of NCBI NO: 25290346 NR Description: protein T25K16.5 [imported] - Arabidopsis
  misc_feature (32)..(244): Homolog of NCBI NO: 15223288 NR Description: soluble inorganic pyrophosphatase, putative
  misc_feature (29)..(244): Homolog of NCBI NO: 15234191 NR Description: putative inorganic phosphatase
RALLFSHHRHFSFSTLSARLFCSSNDSKMNGEEVKTSQPQKKLQNPTPRLNERILSSLSKRSVAAHPWHDLEIGPGAPVIFNVVIEISKGSKVKYELDKKTGLIKVDRILYSSVVYPHNYGFVPRTLCEDNDPIDVLVIMQEPVLPGCFLRARAIGLMPMIDQGEKDDKIIAVCVDDPEYKHITNINELPPHRLSEIRRFFEDYKKNENKEVAVNDFLQPGPAIEAIQYSMDLYAEYILHTLRR

SEQ ID NO: 44664 - protein, 216 aa, Arabidopsis thaliana
  peptide (1)..(216): Ceres Seq. ID no. 12462226
  misc_feature (54)..(208): Pfam Name: Inorganic pyrophosphatase Pfam Description: Inorganic pyrophosphatase
  misc_feature (4)..(216): Homolog of NCBI NO: 4033424 NR Description: Soluble inorganic pyrophosphatase (Pyrophosphate
  misc_feature (5)..(216): Homolog of NCBI NO: 15231849 NR Description: inorganic pyrophosphatase -like protein
  misc_feature (16)..(216): Homolog of NCBI NO: 2500047 NR Description: Soluble inorganic pyrophosphatase (Pyrophosphate
  misc_feature (1)..(216): Homolog of NCBI NO: 26451240 NR Description: putative inorganic pyrophosphatase [Arabidopsis
  misc_feature (1)..(216): Homolog of NCBI NO: 15226453 NR Description: putative inorganic pyrophosphatase; protein id:
  misc_feature (7)..(216): Homolog of NCBI NO: 5669924 NR Description: soluble inorganic pyrophosphatase
  misc_feature (177)..(216): Homolog of NCBI NO: 25290346 NR Description: protein T25K16.5 [imported] - Arabidopsis
  misc_feature (4)..(175): Homolog of NCBI NO: 25290346 NR Description: protein T25K16.5 [imported] - Arabidopsis
  misc_feature (4)..(216): Homolog of NCBI NO: 15223288 NR Description: soluble inorganic pyrophosphatase, putative
  misc_feature (1)..(216): Homolog of NCBI NO: 15234191 NR Description: putative inorganic phosphatase
MNGEEVKTSQPQKKLQNPTPRLNERILSSLSKRSVAAHPWHDLEIGPGAPVIFNVVIEISKGSKVKYELDKKTGLIKVDRILYSSVVYPHNYGFVPRTLCEDNDPIDVLVIMQEPVLPGCFLRARAIGLMPMIDQGEKDDKIIAVCVDDPEYKHITNINELPPHRLSEIRRFFEDYKKNENKEVAVNDFLQPGPAIEAIQYSMDLYAEYILHTLRR

SEQ ID NO: 44665 - DNA, 1420 bp, Arabidopsis thaliana; identical to SEQ ID NO: 44132
  misc_feature (1)..(1420): Ceres Seq. ID no. 13503804
  misc_feature: MA Experiment ID: 20000314 Result: Down-regulated in Transcription
  misc_feature: MA Experiment 20000314 PARAMETER Experiment Name: At_14day_Shoots-Roots_Sub_P Parameter: Age (day) Value: 14
  misc_feature: MA Experiment 20000314 PARAMETER Experiment Name: At_14day_Shoots-Roots_Sub_P Parameter: Organism Value: A. thaliana
  misc_feature: MA Experiment 20000314 PARAMETER Experiment Name: At_14day_Shoots-Roots_Sub_P Parameter: Plant Line Value: WS
  misc_feature: MA Experiment 20000314 PARAMETER Experiment Name: At_14day_Shoots-Roots_Sub_P Parameter: Tissue Value: Roots vs. Whole Plant
  misc_feature: MA Experiment ID: 20000315 Result: Down-regulated in Transcription
  misc_feature: MA Experiment 20000315 PARAMETER Experiment Name: At_14day_Shoots-Roots_Sub_P Parameter: Age (day) Value: 14
  misc_feature: MA Experiment 20000315 PARAMETER Experiment Name: At_14day_Shoots-Roots_Sub_P Parameter: Organism Value: A. thaliana
  misc_feature: MA Experiment 20000315 PARAMETER Experiment Name: At_14day_Shoots-Roots_Sub_P Parameter: Plant Line Value: WS
  misc_feature: MA Experiment 20000315 PARAMETER Experiment Name: At_14day_Shoots-Roots_Sub_P Parameter: Tissue Value: Shoots vs. Whole Plant
  misc_feature: MA Experiment ID: 20000329 Result: Down-regulated in Transcription
  misc_feature: MA Experiment 20000329 PARAMETER Experiment Name: At_4deg_Cold_Sub_P Parameter: Age (day) Value: 14
  misc_feature: MA Experiment 20000329 PARAMETER Experiment Name: At_4deg_Cold_Sub_P Parameter: Organism Value: A. thaliana
  misc_feature: MA Experiment 20000329 PARAMETER Experiment Name: At_4deg_Cold_Sub_P Parameter: Plant Line Value: WS
  misc_feature: MA Experiment 20000329 PARAMETER Experiment Name: At_4deg_Cold_Sub_P Parameter: Temperature (deg C) Value: 4 vs. 22
  misc_feature: MA Experiment 20000329 PARAMETER Experiment Name: At_4deg_Cold_Sub_P Parameter: Timepoint (hr) Value: 6
  misc_feature: MA Experiment 20000329 PARAMETER Experiment Name: At_4deg_Cold_Sub_P Parameter: Tissue Value: Aerial
  misc_feature: MA Experiment ID: 20000332 Result: Down-regulated in Transcription
  misc_feature: MA Experiment 20000332 PARAMETER Experiment Name: At_4deg_Cold_Sub_P Parameter: Age (day) Value: 14
  misc_feature: MA Experiment 20000332 PARAMETER Experiment Name: At_4deg_Cold_Sub_P Parameter: Organism Value: A. thaliana
  misc_feature: MA Experiment 20000332 PARAMETER Experiment Name: At_4deg_Cold_Sub_P Parameter: Plant Line Value: WS
  misc_feature: MA Experiment 20000332 PARAMETER Experiment Name: At_4deg_Cold_Sub_P Parameter: Temperature (deg C) Value: 4 vs. 22
  misc_feature: MA Experiment 20000332 PARAMETER Experiment Name: At_4deg_Cold_Sub_P Parameter: Timepoint (hr) Value: 2
  misc_feature: MA Experiment 20000332 PARAMETER Experiment Name: At_4deg_Cold_Sub_P Parameter: Tissue Value: Aerial
  misc_feature: MA Experiment ID: 20000355 Result: Down-regulated in Transcription
  misc_feature: MA Experiment 20000355 PARAMETER Experiment Name: At_Siliques_Sub_P Parameter: Age (day) Value: 21
  misc_feature: MA Experiment 20000355 PARAMETER Experiment Name: At_Siliques_Sub_P Parameter: Organism Value: A. thaliana
  misc_feature: MA Experiment 20000355 PARAMETER Experiment Name: At_Siliques_Sub_P Parameter: Plant Line Value: WS
  misc_feature: MA Experiment 20000355 PARAMETER Experiment Name: At_Siliques_Sub_P Parameter: Tissue Value: Less Than 5mm Siliques vs. Whole Plant

SEQ ID NO: 44666 - protein, 351 aa, Arabidopsis thaliana; identical to SEQ ID NO: 44133
  peptide (1)..(351): Ceres Seq. ID no. 13503805
  misc_feature (9)..(344): Pfam Name: NAD dependent epimerase/dehydratase family Pfam Description: NAD dependent epimerase/dehydratase family
  misc_feature (9)..(344): Pfam Name: NAD dependent epimerase/dehydratase family Pfam Description: NAD dependent epimerase/dehydratase family
  misc_feature (7)..(349): Homolog of NCBI NO: 12643850 NR Description: Probable UDP-glucose 4-epimerase At4g10960
  misc_feature (7)..(350): Homolog of NCBI NO: 21553659 NR Description: UDP-galactose 4-epimerase-like protein
  misc_feature (7)..(347): Homolog of NCBI NO: 11386775 NR Description: UDP-glucose 4-epimerase GEPI48 (Galactowaldenase)
  misc_feature (8)..(347): Homolog of NCBI NO: 26106014 NR Description: putative UDP-glucose 4-epimerase
  misc_feature (7)..(350): Homolog of NCBI NO: 11386774 NR Description: UDP-glucose 4-epimerase GEPI42 (Galactowaldenase)
  misc_feature (7)..(349): Homolog of NCBI NO: 12643850 NR Description: Probable UDP-glucose 4-epimerase At4g10960
  misc_feature (7)..(347): Homolog of NCBI NO: 11386775 NR Description: UDP-glucose 4-epimerase GEPI48 (Galactowaldenase)
  misc_feature (7)..(350): Homolog of NCBI NO: 11386774 NR Description: UDP-glucose 4-epimerase GEPI42 (Galactowaldenase)
  misc_feature (1)..(351): Homolog of NCBI NO: 15222072 NR Description: UDP-glucose 4-epimerase (UDP-galactose
  misc_feature (1)..(351): Homolog of NCBI NO: 2129759 NR Description: UDPglucose 4-epimerase (EC 5.1.3.2) - Arabidopsis
  misc_feature (1)..(350): Homolog of NCBI NO: 18407751 NR Description: UDP-glucose 4-epimerase (UDP-galactose
  misc_feature (1)..(350): Homolog of NCBI NO: 25292327 NR Description: hypothetical protein F16M19.8 [imported] -
  misc_feature (7)..(350): Homolog of NCBI NO: 11386762 NR Description: UDP-glucose 4-epimerase (Galactowaldenase)
  misc_feature (8)..(347): Homolog of NCBI NO: 26106014 NR Description: putative UDP-glucose 4-epimerase
  misc_feature (7)..(350): Homolog of NCBI NO: 21553659 NR Description: UDP-galactose 4-epimerase-like protein
  misc_feature (7)..(350): Homolog of NCBI NO: 11386762 NR Description: UDP-glucose 4-epimerase (Galactowaldenase)
  misc_feature (1)..(350): Homolog of NCBI NO: 25292327 NR Description: hypothetical protein F16M19.8 [imported] -
  misc_feature (1)..(350): Homolog of NCBI NO: 18407751 NR Description: UDP-glucose 4-epimerase (UDP-galactose
  misc_feature (1)..(351): Homolog of NCBI NO: 2129759 NR Description: UDPglucose 4-epimerase (EC 5.1.3.2) - Arabidopsis
  misc_feature (1)..(351): Homolog of NCBI NO: 15222072 NR Description: UDP-glucose 4-epimerase (UDP-galactose

SEQ ID NO: 44667 - protein, 231 aa, Arabidopsis thaliana; identical to SEQ ID NO: 44134
  peptide (1)..(231): Ceres Seq. ID no. 13503806
  misc_feature (1)..(224): Pfam Name: NAD dependent epimerase/dehydratase family Pfam Description: NAD dependent epimerase/dehydratase family
  misc_feature (1)..(224): Pfam Name: NAD dependent epimerase/dehydratase family Pfam Description: NAD dependent epimerase/dehydratase family
  misc_feature (1)..(229): Homolog of NCBI NO: 12643850 NR Description: Probable UDP-glucose 4-epimerase At4g10960
  misc_feature (1)..(230): Homolog of NCBI NO: 21553659 NR Description: UDP-galactose 4-epimerase-like protein
  misc_feature (1)..(227): Homolog of NCBI NO: 11386775 NR Description: UDP-glucose 4-epimerase GEPI48 (Galactowaldenase)
  misc_feature (1)..(227): Homolog of NCBI NO: 26106014 NR Description: putative UDP-glucose 4-epimerase
  misc_feature (1)..(230): Homolog of NCBI NO: 11386774 NR Description: UDP-glucose 4-epimerase GEPI42 (Galactowaldenase)
  misc_feature (1)..(229): Homolog of NCBI NO: 12643850 NR Description: Probable UDP-glucose 4-epimerase At4g10960
  misc_feature (1)..(227): Homolog of NCBI NO: 11386775 NR Description: UDP-glucose 4-epimerase GEPI48 (Galactowaldenase)
  misc_feature (1)..(230): Homolog of NCBI NO: 11386774 NR Description: UDP-glucose 4-epimerase GEPI42 (Galactowaldenase)
  misc_feature (1)..(231): Homolog of NCBI NO: 15222072 NR Description: UDP-glucose 4-epimerase (UDP-galactose
  misc_feature (1)..(231): Homolog of NCBI NO: 2129759 NR Description: UDPglucose 4-epimerase (EC 5.1.3.2) - Arabidopsis
  misc_feature (1)..(230): Homolog of NCBI NO: 18407751 NR Description: UDP-glucose 4-epimerase (UDP-galactose
  misc_feature (1)..(230): Homolog of NCBI NO: 25292327 NR Description: hypothetical protein F16M19.8 [imported] -
  misc_feature (1)..(230): Homolog of NCBI NO: 11386762 NR Description: UDP-glucose 4-epimerase (Galactowaldenase)
  misc_feature (1)..(227): Homolog of NCBI NO: 26106014 NR Description: putative UDP-glucose 4-epimerase
  misc_feature (1)..(230): Homolog of NCBI NO: 21553659 NR Description: UDP-galactose 4-epimerase-like protein
  misc_feature (1)..(230): Homolog of NCBI NO: 11386762 NR Description: UDP-glucose 4-epimerase (Galactowaldenase)
  misc_feature (1)..(230): Homolog of NCBI NO: 25292327 NR Description: hypothetical protein F16M19.8 [imported] -
  misc_feature (1)..(230): Homolog of NCBI NO: 18407751 NR Description: UDP-glucose 4-epimerase (UDP-galactose
  misc_feature (1)..(231): Homolog of NCBI NO: 2129759 NR Description: UDPglucose 4-epimerase (EC 5.1.3.2) - Arabidopsis
  misc_feature (1)..(231): Homolog of NCBI NO: 15222072 NR Description: UDP-glucose 4-epimerase (UDP-galactose

SEQ ID NO: 44668 - protein, 224 aa, Arabidopsis thaliana; identical to SEQ ID NO: 44135
  peptide (1)..(224): Ceres Seq. ID no. 13503807
  misc_feature (1)..(217): Pfam Name: NAD dependent epimerase/dehydratase family Pfam Description: NAD dependent epimerase/dehydratase family
  misc_feature (1)..(217): Pfam Name: NAD dependent epimerase/dehydratase family Pfam Description: NAD dependent epimerase/dehydratase family
  misc_feature (1)..(222): Homolog of NCBI NO: 12643850 NR Description: Probable UDP-glucose 4-epimerase At4g10960
  misc_feature (1)..(223): Homolog of NCBI NO: 21553659 NR Description: UDP-galactose 4-epimerase-like protein
  misc_feature (1)..(220): Homolog of NCBI NO: 11386775 NR Description: UDP-glucose 4-epimerase GEPI48 (Galactowaldenase)
  misc_feature (1)..(220): Homolog of NCBI NO: 26106014 NR Description: putative UDP-glucose 4-epimerase
  misc_feature (1)..(223): Homolog of NCBI NO: 11386774 NR Description: UDP-glucose 4-epimerase GEPI42 (Galactowaldenase)
  misc_feature (1)..(222): Homolog of NCBI NO: 12643850 NR Description: Probable UDP-glucose 4-epimerase At4g10960
  misc_feature (1)..(220): Homolog of NCBI NO: 11386775 NR Description: UDP-glucose 4-epimerase GEPI48 (Galactowaldenase)
  misc_feature (1)..(223): Homolog of NCBI NO: 11386774 NR Description: UDP-glucose 4-epimerase GEPI42 (Galactowaldenase)
  misc_feature (1)..(224): Homolog of NCBI NO: 15222072 NR Description: UDP-glucose 4-epimerase (UDP-galactose
  misc_feature (1)..(224): Homolog of NCBI NO: 2129759 NR Description: UDPglucose 4-epimerase (EC 5.1.3.2) - Arabidopsis
  misc_feature (1)..(223): Homolog of NCBI NO: 18407751 NR Description: UDP-glucose 4-epimerase (UDP-galactose
  misc_feature (1)..(223): Homolog of NCBI NO: 25292327 NR Description: hypothetical protein F16M19.8 [imported] -
  misc_feature (1)..(223): Homolog of NCBI NO: 11386762 NR Description: UDP-glucose 4-epimerase (Galactowaldenase)
  misc_feature (1)..(220): Homolog of NCBI NO: 26106014 NR Description: putative UDP-glucose 4-epimerase
  misc_feature (1)..(223): Homolog of NCBI NO: 21553659 NR Description: UDP-galactose 4-epimerase-like protein
  misc_feature (1)..(223): Homolog of NCBI NO: 11386762 NR Description: UDP-glucose 4-epimerase (Galactowaldenase)
  misc_feature (1)..(223): Homolog of NCBI NO: 25292327 NR Description: hypothetical protein F16M19.8 [imported] -
  misc_feature (1)..(223): Homolog of NCBI NO: 18407751 NR Description: UDP-glucose 4-epimerase (UDP-galactose
  misc_feature (1)..(224): Homolog of NCBI NO: 2129759 NR Description: UDPglucose 4-epimerase (EC 5.1.3.2) - Arabidopsis
  misc_feature (1)..(224): Homolog of NCBI NO: 15222072 NR Description: UDP-glucose 4-epimerase (UDP-galactose

SEQ ID NO: 44669 - DNA, 895 bp, Arabidopsis thaliana
  misc_feature (1)..(895): Ceres Seq. ID no. 12466214
  misc_feature: MA Experiment ID: 108573 Result: Up-regulated in Transcription
  misc_feature: MA Experiment 108573 PARAMETER Experiment Name: At_Drought_cDNA_P Parameter: Timepoint (hr) Value: 6
  misc_feature: MA Experiment 108573 PARAMETER Experiment Name: At_Drought_cDNA_P Parameter: Tissue Value: Aerial
  misc_feature: MA Experiment 108573 PARAMETER Experiment Name: At_Drought_cDNA_P Parameter: Treatment Value: Drought vs. No Drought
  misc_feature: MA Experiment ID: 108579 Result: Down-regulated in Transcription
  misc_feature: MA Experiment 108579 PARAMETER Experiment Name: At_4deg_Cold_cDNA_P Parameter: Temperature (deg C) Value: 4 vs. 22
  misc_feature: MA Experiment 108579 PARAMETER Experiment Name: At_4deg_Cold_cDNA_P Parameter: Timepoint (hr) Value: 6
  misc_feature: MA Experiment 108579 PARAMETER Experiment Name: At_4deg_Cold_cDNA_P Parameter: Tissue Value: Aerial
  misc_feature: MA Experiment ID: 20000437 Result: Up-regulated in Transcription
  misc_feature: MA Experiment 20000437 PARAMETER Experiment Name: At_Drought_P Parameter: Age (day) Value: 8
  misc_feature: MA Experiment 20000437 PARAMETER Experiment Name: At_Drought_P Parameter: Organism Value: A. thaliana
  misc_feature: MA Experiment 20000437 PARAMETER Experiment Name: At_Drought_P Parameter: Plant Line Value: WS
  misc_feature: MA Experiment 20000437 PARAMETER Experiment Name: At_Drought_P Parameter: Timepoint (hr) Value: 24
  misc_feature: MA Experiment 20000437 PARAMETER Experiment Name: At_Drought_P Parameter: Tissue Value: Whole Plant
  misc_feature: MA Experiment 20000437 PARAMETER Experiment Name: At_Drought_P Parameter: Treatment Value: Drought vs. No Drought
aggaatattccggtgatggctgaagatttttcggtggttgtgttggcttctgatctaggaattgacgctagacccttcttgacgagaagcgatgacgttgatgaacaagaaaactggcatgattgtccccaatacttaggagatgaagatttctctgatctcgatcttctccagttctttactctccagggcttggataggtccggtaaccggattttccgcatcgtcggaaagtatttccctgctcgtgtagtgagtgcggagcggctgaagaagtatatatcccagaagataagcaaccaatgtcctgagggacctttgtgcttggtttacatgcatagcacagtccaaaaggacgacaattcaccgggaattaccatcttacggtggatttacgaggaccttccttcagatatcaaagacaggcttcaacttgtttatttcatccaccctggtcttcgttcaagacttgtcattgccactcttggccgccttcttttaagtggaggactgtactggaagattaagtacgtgagcaggttgcagtacctttgggaggacataaagaaaggcgaggtggaaattcccgactttgtgaagaaccatgacaatgtgctcgagcatagaccattaacggactatggaatcgaaccggatcctttccagttaagcgaggttcaatcttcatcgttctctctcaaccgctacgagaacagatgggtctcatagtacaattgctctttgttgagctagaacctctatatgtttgtgtctgttgtatagagtaatctaatgtattaaacactcgtgtatcatcaatctggtttttgattgattttggaccgaaccagtaccagtattagatttgttttcgaaagcgggtcgaattttactc

SEQ ID NO: 44670 - protein, 242 aa, Arabidopsis thaliana
  peptide (1)..(242): Ceres Seq. ID no. 12466215
  misc_feature (50)..(203): Homolog of NCBI NO: 37534804 NR Description: unknown protein [Oryza sativa (japonica
  misc_feature (54)..(217): Homolog of NCBI NO: 38345848 NR Description: OSJNBa0084K11.12 [Oryza sativa (japonica
  misc_feature (54)..(242): Homolog of NCBI NO: 21553817 NR Description: unknown [Arabidopsis thaliana]
  misc_feature (54)..(242): Homolog of NCBI NO: 15237117 NR Description: putative protein
  misc_feature (9)..(81): Homolog of NCBI NO: 22830926 NR Description: P0466H10.24 [Oryza sativa (japonica
  misc_feature (81)..(240): Homolog of NCBI NO: 22830926 NR Description: P0466H10.24 [Oryza sativa (japonica
  misc_feature (6)..(242): Homolog of NCBI NO: 21593697 NR Description: unknown [Arabidopsis thaliana]
  misc_feature (6)..(242): Homolog of NCBI NO: 18398797 NR Description: expressed protein
RNIPVMAEDFSVVVLASDLGIDARPFLTRSDDVDEQENWHDCPQYLGDEDFSDLDLLQFFTLQGLDRSGNRIFRIVGKYFPARVVSAERLKKYISQKISNQCPEGPLCLVYMHSTVQKDDNSPGITILRWIYEDLPSDIKDRLQLVYFIHPGLRSRLVIATLGRLLLSGGLYWKIKYVSRLQYLWEDIKKGEVEIPDFVKNHDNVLEHRPLTDYGIEPDPFQLSEVQSSSFSLNRYENRWVS

SEQ ID NO: 44671 - protein, 237 aa, Arabidopsis thaliana
  peptide (1)..(237): Ceres Seq. ID no. 12466216
  misc_feature (45)..(198): Homolog of NCBI NO: 37534804 NR Description: unknown protein [Oryza sativa (japonica
  misc_feature (49)..(212): Homolog of NCBI NO: 38345848 NR Description: OSJNBa0084K11.12 [Oryza sativa (japonica
  misc_feature (49)..(237): Homolog of NCBI NO: 21553817 NR Description: unknown [Arabidopsis thaliana]
  misc_feature (49)..(237): Homolog of NCBI NO: 15237117 NR Description: putative protein
  misc_feature (4)..(76): Homolog of NCBI NO: 22830926 NR Description: P0466H10.24 [Oryza sativa (japonica
  misc_feature (76)..(235): Homolog of NCBI NO: 22830926 NR Description: P0466H10.24 [Oryza sativa (japonica
  misc_feature (1)..(237): Homolog of NCBI NO: 21593697 NR Description: unknown [Arabidopsis thaliana]
  misc_feature (1)..(237): Homolog of NCBI NO: 18398797 NR Description: expressed protein
MAEDFSVVVLASDLGIDARPFLTRSDDVDEQENWHDCPQYLGDEDFSDLDLLQFFTLQGLDRSGNRIFRIVGKYFPARVVSAERLKKYISQKISNQCPEGPLCLVYMHSTVQKDDNSPGITILRWIYEDLPSDIKDRLQLVYFIHPGLRSRLVIATLGRLLLSGGLYWKIKYVSRLQYLWEDIKKGEVEIPDFVKNHDNVLEHRPLTDYGIEPDPFQLSEVQSSSFSLNRYENRWVS

SEQ ID NO: 44672 - protein, 131 aa, Arabidopsis thaliana
  peptide (1)..(131): Ceres Seq. ID no. 12466217
  misc_feature (1)..(92): Homolog of NCBI NO: 37534804 NR Description: unknown protein [Oryza sativa (japonica
  misc_feature (1)..(106): Homolog of NCBI NO: 38345848 NR Description: OSJNBa0084K11.12 [Oryza sativa (japonica
  misc_feature (1)..(131): Homolog of NCBI NO: 21553817 NR Description: unknown [Arabidopsis thaliana]
  misc_feature (1)..(131): Homolog of NCBI NO: 15237117 NR Description: putative protein
  misc_feature (1)..(129): Homolog of NCBI NO: 22830926 NR Description: P0466H10.24 [Oryza sativa (japonica
  misc_feature (1)..(131): Homolog of NCBI NO: 21593697 NR Description: unknown [Arabidopsis thaliana]
  misc_feature (1)..(131): Homolog of NCBI NO: 18398797 NR Description: expressed protein
MHSTVQKDDNSPGITILRWIYEDLPSDIKDRLQLVYFIHPGLRSRLVIATLGRLLLSGGLYWKIKYVSRLQYLWEDIKKGEVEIPDFVKNHDNVLEHRPLTDYGIEPDPFQLSEVQSSSFSLNRYENRWVS

SEQ ID NO: 44673 - DNA, 1842 bp, Arabidopsis thaliana; identical to SEQ ID NO: 37427
  misc_feature (1)..(1842): Ceres Seq. ID no. 13509651
  misc_feature: MA Experiment ID: 20000113 Result: Down-regulated in Transcription
  misc_feature: MA Experiment 20000113 PARAMETER Experiment Name: At_42deg_Heat_cDNA_P Parameter: Temperature (deg C) Value: 42 vs. 22
  misc_feature: MA Experiment 20000113 PARAMETER Experiment Name: At_42deg_Heat_cDNA_P Parameter: Timepoint (hr) Value: 8
  misc_feature: MA Experiment 20000113 PARAMETER Experiment Name: At_42deg_Heat_cDNA_P Parameter: Tissue Value: Aerial
  misc_feature: MA Experiment ID: 20000315 Result: Down-regulated in Transcription
  misc_feature: MA Experiment 20000315 PARAMETER Experiment Name: At_14day_Shoots-Roots_Sub_P Parameter: Age (day) Value: 14
  misc_feature: MA Experiment 20000315 PARAMETER Experiment Name: At_14day_Shoots-Roots_Sub_P Parameter: Organism Value: A. thaliana
  misc_feature: MA Experiment 20000315 PARAMETER Experiment Name: At_14day_Shoots-Roots_Sub_P Parameter: Plant Line Value: WS
  misc_feature: MA Experiment 20000315 PARAMETER Experiment Name: At_14day_Shoots-Roots_Sub_P Parameter: Tissue Value: Shoots vs. Whole Plant
  misc_feature: MA Experiment ID: 20000328 Result: Down-regulated in Transcription
  misc_feature: MA Experiment 20000328 PARAMETER Experiment Name: At_42deg_Heat_Sub_P Parameter: Age (day) Value: 14
  misc_feature: MA Experiment 20000328 PARAMETER Experiment Name: At_42deg_Heat_Sub_P Parameter: Organism Value: A. thaliana
  misc_feature: MA Experiment 20000328 PARAMETER Experiment Name: At_42deg_Heat_Sub_P Parameter: Plant Line Value: WS
  misc_feature: MA Experiment 20000328 PARAMETER Experiment Name: At_42deg_Heat_Sub_P Parameter: Temperature (deg C) Value: 42 vs. 22
  misc_feature: MA Experiment 20000328 PARAMETER Experiment Name: At_42deg_Heat_Sub_P Parameter: Timepoint (hr) Value: 6
  misc_feature: MA Experiment 20000328 PARAMETER Experiment Name: At_42deg_Heat_Sub_P Parameter: Tissue Value: Aerial

SEQ ID NO: 44674 - protein, 497 aa, Arabidopsis thaliana; identical to SEQ ID NO: 37428
  peptide (1)..(497): Ceres Seq. ID no. 13509652
  misc_feature (3)..(312): Homolog of NCBI NO: 21618002 NR Description: unknown [Arabidopsis thaliana]
  misc_feature (192)..(497): Homolog of NCBI NO: 18266049 NR Description: myrosinase precursor [Brassica oleracea]
  misc_feature (3)..(312): Homolog of NCBI NO: 18394314 NR Description: expressed protein [Arabidopsis thaliana]
  misc_feature (234)..(488): Homolog of NCBI NO: 14517360 NR Description: At1g80910/F23A5_21 [Arabidopsis thaliana]
  misc_feature (125)..(497): Homolog of NCBI NO: 21618002 NR Description: unknown [Arabidopsis thaliana]
  misc_feature (125)..(497): Homolog of NCBI NO: 18394314 NR Description: expressed protein [Arabidopsis thaliana]
  misc_feature (1)..(497): Homolog of NCBI NO: 38175489 NR Description: putative myrosinase precursor
  misc_feature (3)..(497): Homolog of NCBI NO: 30684673 NR Description: expressed protein [Arabidopsis thaliana]
  misc_feature (1)..(497): Homolog of NCBI NO: 15220866 NR Description: myrosinase precursor -related [Arabidopsis
  misc_feature (1)..(497): Homolog of NCBI NO: 25372816 NR Description: F23A5.27 [imported] - Arabidopsis thaliana
  misc_feature (3)..(312): Homolog of NCBI NO: 21618002 NR Description: unknown [Arabidopsis thaliana]
  misc_feature (192)..(497): Homolog of NCBI NO: 18266049 NR Description: myrosinase precursor [Brassica oleracea]
  misc_feature (3)..(312): Homolog of NCBI NO: 18394314 NR Description: expressed protein [Arabidopsis thaliana]
  misc_feature (234)..(488): Homolog of NCBI NO: 14517360 NR Description: At1g80910/F23A5_21 [Arabidopsis thaliana]
  misc_feature (125)..(497): Homolog of NCBI NO: 21618002 NR Description: unknown [Arabidopsis thaliana]
  misc_feature (125)..(497): Homolog of NCBI NO: 18394314 NR Description: expressed protein [Arabidopsis thaliana]
  misc_feature (1)..(497): Homolog of NCBI NO: 38175489 NR Description: putative myrosinase precursor
  misc_feature (3)..(497): Homolog of NCBI NO: 30684673 NR Description: expressed protein [Arabidopsis thaliana]
  misc_feature (1)..(497): Homolog of NCBI NO: 15220866 NR Description: myrosinase precursor -related [Arabidopsis
  misc_feature (1)..(497): Homolog of NCBI NO: 25372816 NR Description: F23A5.27 [imported] - Arabidopsis thaliana
  misc_feature (3)..(312): Homolog of NCBI NO: 21618002 NR Description: unknown [Arabidopsis thaliana]
  misc_feature (192)..(497): Homolog of NCBI NO: 18266049 NR Description: myrosinase precursor [Brassica oleracea]
  misc_feature (3)..(312): Homolog of NCBI NO: 18394314 NR Description: expressed protein [Arabidopsis thaliana]
  misc_feature (234)..(488): Homolog of NCBI NO: 14517360 NR Description: At1g80910/F23A5_21 [Arabidopsis thaliana]
  misc_feature (125)..(497): Homolog of NCBI NO: 21618002 NR Description: unknown [Arabidopsis thaliana]
  misc_feature (125)..(497): Homolog of NCBI NO: 18394314 NR Description: expressed protein [Arabidopsis thaliana]
  misc_feature (1)..(497): Homolog of NCBI NO: 38175489 NR Description: putative myrosinase precursor
  misc_feature (3)..(497): Homolog of NCBI NO: 30684673 NR Description: expressed protein [Arabidopsis thaliana]
  misc_feature (1)..(497): Homolog of NCBI NO: 15220866 NR Description: myrosinase precursor -related [Arabidopsis
  misc_feature (1)..(497): Homolog of NCBI NO: 25372816 NR Description: F23A5.27 [imported] - Arabidopsis thaliana

SEQ ID NO: 44675 - protein, 495 aa, Arabidopsis thaliana; identical to SEQ ID NO: 37429
  peptide (1)..(495): Ceres Seq. ID no. 13509653
  misc_feature (1)..(310): Homolog of NCBI NO: 21618002 NR Description: unknown [Arabidopsis thaliana]
  misc_feature (190)..(495): Homolog of NCBI NO: 18266049 NR Description: myrosinase precursor [Brassica oleracea]
  misc_feature (1)..(310): Homolog of NCBI NO: 18394314 NR Description: expressed protein [Arabidopsis thaliana]
  misc_feature (232)..(486): Homolog of NCBI NO: 14517360 NR Description: At1g80910/F23A5_21 [Arabidopsis thaliana]
  misc_feature (123)..(495): Homolog of NCBI NO: 21618002 NR Description: unknown [Arabidopsis thaliana]
  misc_feature (123)..(495): Homolog of NCBI NO: 18394314 NR Description: expressed protein [Arabidopsis thaliana]
  misc_feature (1)..(495): Homolog of NCBI NO: 38175489 NR Description: putative myrosinase precursor
  misc_feature (1)..(495): Homolog of NCBI NO: 30684673 NR Description: expressed protein [Arabidopsis thaliana]
  misc_feature (1)..(495): Homolog of NCBI NO: 15220866 NR Description: myrosinase precursor -related [Arabidopsis
  misc_feature (1)..(495): Homolog of NCBI NO: 25372816 NR Description: F23A5.27 [imported] - Arabidopsis thaliana
  misc_feature (1)..(310): Homolog of NCBI NO: 21618002 NR Description: unknown [Arabidopsis thaliana]
  misc_feature (190)..(495): Homolog of NCBI NO: 18266049 NR Description: myrosinase precursor [Brassica oleracea]
  misc_feature (1)..(310): Homolog of NCBI NO: 18394314 NR Description: expressed protein [Arabidopsis thaliana]
  misc_feature (232)..(486): Homolog of NCBI NO: 14517360 NR Description: At1g80910/F23A5_21 [Arabidopsis thaliana]
  misc_feature (123)..(495): Homolog of NCBI NO: 21618002 NR Description: unknown [Arabidopsis thaliana]
  misc_feature (123)..(495): Homolog of NCBI NO: 18394314 NR Description: expressed protein [Arabidopsis thaliana]
  misc_feature (1)..(495): Homolog of NCBI NO: 38175489 NR Description: putative myrosinase precursor
  misc_feature (1)..(495): Homolog of NCBI NO: 30684673 NR Description: expressed protein [Arabidopsis thaliana]
  misc_feature (1)..(495): Homolog of NCBI NO: 15220866 NR Description: myrosinase precursor -related [Arabidopsis
  misc_feature (1)..(495): Homolog of NCBI NO: 25372816 NR Description: F23A5.27 [imported] - Arabidopsis thaliana
  misc_feature (1)..(310): Homolog of NCBI NO: 21618002 NR Description: unknown [Arabidopsis thaliana]
  misc_feature (190)..(495): Homolog of NCBI NO: 18266049 NR Description: myrosinase precursor [Brassica oleracea]
  misc_feature (1)..(310): Homolog of NCBI NO: 18394314 NR Description: expressed protein [Arabidopsis thaliana]
  misc_feature (232)..(486): Homolog of NCBI NO: 14517360 NR Description: At1g80910/F23A5_21 [Arabidopsis thaliana]
  misc_feature (123)..(495): Homolog of NCBI NO: 21618002 NR Description: unknown [Arabidopsis thaliana]
  misc_feature (123)..(495): Homolog of NCBI NO: 18394314 NR Description: expressed protein [Arabidopsis thaliana]
  misc_feature (1)..(495): Homolog of NCBI NO: 38175489 NR Description: putative myrosinase precursor
  misc_feature (1)..(495): Homolog of NCBI NO: 30684673 NR Description: expressed protein [Arabidopsis thaliana]
  misc_feature (1)..(495): Homolog of NCBI NO: 15220866 NR Description: myrosinase precursor -related [Arabidopsis
  misc_feature (1)..(495): Homolog of NCBI NO: 25372816 NR Description: F23A5.27 [imported] - Arabidopsis thaliana

SEQ ID NO: 44676 - protein, 492 aa, Arabidopsis thaliana; identical to SEQ ID NO: 37430
  peptide (1)..(492): Ceres Seq. ID no. 13509654
  misc_feature (1)..(307): Homolog of NCBI NO: 21618002 NR Description: unknown [Arabidopsis thaliana]
  misc_feature (187)..(492): Homolog of NCBI NO: 18266049 NR Description: myrosinase precursor [Brassica oleracea]
  misc_feature (1)..(307): Homolog of NCBI NO: 18394314 NR Description: expressed protein [Arabidopsis thaliana]
  misc_feature (229)..(483): Homolog of NCBI NO: 14517360 NR Description: At1g80910/F23A5_21 [Arabidopsis thaliana]
  misc_feature (120)..(492): Homolog of NCBI NO: 21618002 NR Description: unknown [Arabidopsis thaliana]
  misc_feature (120)..(492): Homolog of NCBI NO: 18394314 NR Description: expressed protein [Arabidopsis thaliana]
  misc_feature (1)..(492): Homolog of NCBI NO: 38175489 NR Description: putative myrosinase precursor
  misc_feature (1)..(492): Homolog of NCBI NO: 30684673 NR Description: expressed protein [Arabidopsis thaliana]
  misc_feature (1)..(492): Homolog of NCBI NO: 15220866 NR Description: myrosinase precursor -related [Arabidopsis
  misc_feature (1)..(492): Homolog of NCBI NO: 25372816 NR Description: F23A5.27 [imported] - Arabidopsis thaliana
  misc_feature (1)..(307): Homolog of NCBI NO: 21618002 NR Description: unknown [Arabidopsis thaliana]
  misc_feature (187)..(492): Homolog of NCBI NO: 18266049 NR Description: myrosinase precursor [Brassica oleracea]
  misc_feature (1)..(307): Homolog of NCBI NO: 18394314 NR Description: expressed protein [Arabidopsis thaliana]
  misc_feature (229)..(483): Homolog of NCBI NO: 14517360 NR Description: At1g80910/F23A5_21 [Arabidopsis thaliana]
  misc_feature (120)..(492): Homolog of NCBI NO: 21618002 NR Description: unknown [Arabidopsis thaliana]
  misc_feature (120)..(492): Homolog of NCBI NO: 18394314 NR Description: expressed protein [Arabidopsis thaliana]
  misc_feature (1)..(492): Homolog of NCBI NO: 38175489 NR Description: putative myrosinase precursor
  misc_feature (1)..(492): Homolog of NCBI NO: 30684673 NR Description: expressed protein [Arabidopsis thaliana]
  misc_feature (1)..(492): Homolog of NCBI NO: 15220866 NR Description: myrosinase precursor -related [Arabidopsis
  misc_feature (1)..(492): Homolog of NCBI NO: 25372816 NR Description: F23A5.27 [imported] - Arabidopsis thaliana
  misc_feature (1)..(307): Homolog of NCBI NO: 21618002 NR Description: unknown [Arabidopsis thaliana]
  misc_feature (187)..(492): Homolog of NCBI NO: 18266049 NR Description: myrosinase precursor [Brassica oleracea]
  misc_feature (1)..(307): Homolog of NCBI NO: 18394314 NR Description: expressed protein [Arabidopsis thaliana]
  misc_feature (229)..(483): Homolog of NCBI NO: 14517360 NR Description: At1g80910/F23A5_21 [Arabidopsis thaliana]
  misc_feature (120)..(492): Homolog of NCBI NO: 21618002 NR Description: unknown [Arabidopsis thaliana]
  misc_feature (120)..(492): Homolog of NCBI NO: 18394314 NR Description: expressed protein [Arabidopsis thaliana]
  misc_feature (1)..(492): Homolog of NCBI NO: 38175489 NR Description: putative myrosinase precursor
  misc_feature (1)..(492): Homolog of NCBI NO: 30684673 NR Description: expressed protein [Arabidopsis thaliana]
  misc_feature (1)..(492): Homolog of NCBI NO: 15220866 NR Description: myrosinase precursor -related [Arabidopsis
  misc_feature (1)..(492): Homolog of NCBI NO: 25372816 NR Description: F23A5.27 [imported] - Arabidopsis thaliana

SEQ ID NO: 44677 - DNA, 920 bp, Arabidopsis thaliana; identical to SEQ ID NO: 34726
  misc_feature (1)..(920): Ceres Seq. ID no. 13504388
  misc_feature: MA Experiment ID: 108461 Result: Up-regulated in Transcription
  misc_feature: MA Experiment 108461 PARAMETER Experiment Name: At_Germinating_Seeds_cDNA_P Parameter: Age (day) Value: 1 vs. 0
  misc_feature: MA Experiment 108461 PARAMETER Experiment Name: At_Germinating_Seeds_cDNA_P Parameter: Tissue Value: Germinating Seeds
  misc_feature: MA Experiment ID: 108462 Result: Up-regulated in Transcription
  misc_feature: MA Experiment 108462 PARAMETER Experiment Name: At_Germinating_Seeds_cDNA_P Parameter: Age (day) Value: 2 vs. 0
  misc_feature: MA Experiment 108462 PARAMETER Experiment Name: At_Germinating_Seeds_cDNA_P Parameter: Tissue Value: Germinating Seeds
  misc_feature: MA Experiment ID: 108463 Result: Up-regulated in Transcription
  misc_feature: MA Experiment 108463 PARAMETER Experiment Name: At_Germinating_Seeds_cDNA_P Parameter: Age (day) Value: 3 vs. 0
  misc_feature: MA Experiment 108463 PARAMETER Experiment Name: At_Germinating_Seeds_cDNA_P Parameter: Tissue Value: Germinating Seeds
  misc_feature: MA Experiment ID: 108473 Result: Down-regulated in Transcription
  misc_feature: MA Experiment 108473 PARAMETER Experiment Name: At_Drought_Flowers_cDNA_P Parameter: Timepoint (hr) Value: 7 d
  misc_feature: MA Experiment 108473 PARAMETER Experiment Name: At_Drought_Flowers_cDNA_P Parameter: Tissue Value: Flower
  misc_feature: MA Experiment 108473 PARAMETER Experiment Name: At_Drought_Flowers_cDNA_P Parameter: Treatment Value: Drought vs. No Drought
  misc_feature: MA Experiment ID: 108489 Result: Down-regulated in Transcription
  misc_feature: MA Experiment ID: 108576 Result: Down-regulated in Transcription
  misc_feature: MA Experiment 108576 PARAMETER Experiment Name: At_42deg_Heat_cDNA_P Parameter: Temperature (deg C) Value: 42 vs. 22
  misc_feature: MA Experiment 108576 PARAMETER Experiment Name: At_42deg_Heat_cDNA_P Parameter: Timepoint (hr) Value: 1
  misc_feature: MA Experiment 108576 PARAMETER Experiment Name: At_42deg_Heat_cDNA_P Parameter: Tissue Value: Aerial
  misc_feature: MA Experiment ID: 20000090 Result: Down-regulated in Transcription
  misc_feature: MA Experiment ID: 20000111 Result: Down-regulated in Transcription
  misc_feature: MA Experiment 20000111 PARAMETER Experiment Name: At_42deg_Heat_cDNA_P Parameter: Temperature (deg C) Value: 42 vs. 22
  misc_feature: MA Experiment 20000111 PARAMETER Experiment Name: At_42deg_Heat_cDNA_P Parameter: Timepoint (hr) Value: 6
  misc_feature: MA Experiment 20000111 PARAMETER Experiment Name: At_42deg_Heat_cDNA_P Parameter: Tissue Value: Aerial
  misc_feature: MA Experiment ID: 20000112 Result: Down-regulated in Transcription
  misc_feature: MA Experiment 20000112 PARAMETER Experiment Name: At_42deg_Heat_cDNA_P Parameter: Temperature (deg C) Value: 42 vs. 22
  misc_feature: MA Experiment 20000112 PARAMETER Experiment Name: At_42deg_Heat_cDNA_P Parameter: Timepoint (hr) Value: 2
  misc_feature: MA Experiment 20000112 PARAMETER Experiment Name: At_42deg_Heat_cDNA_P Parameter: Tissue Value: Aerial
  misc_feature: MA Experiment ID: 20000113 Result: Down-regulated in Transcription
  misc_feature: MA Experiment 20000113 PARAMETER Experiment Name: At_42deg_Heat_cDNA_P Parameter: Temperature (deg C) Value: 42 vs. 22
  misc_feature: MA Experiment 20000113 PARAMETER Experiment Name: At_42deg_Heat_cDNA_P Parameter: Timepoint (hr) Value: 8
  misc_feature: MA Experiment 20000113 PARAMETER Experiment Name: At_42deg_Heat_cDNA_P Parameter: Tissue Value: Aerial
  misc_feature: MA Experiment ID: 20000144 Result: Down-regulated in Transcription
  misc_feature: MA Experiment 20000144 PARAMETER Experiment Name: At_42deg_Heat_cDNA_P Parameter: Temperature (deg C) Value: 42 vs. 22
  misc_feature: MA Experiment 20000144 PARAMETER Experiment Name: At_42deg_Heat_cDNA_P Parameter: Timepoint (hr) Value: 1
  misc_feature: MA Experiment 20000144 PARAMETER Experiment Name: At_42deg_Heat_cDNA_P Parameter: Tissue Value: Aerial
  misc_feature: MA Experiment ID: 20000224 Result: Up-regulated in Transcription
  misc_feature: MA Experiment ID: 20000307 Result: Up-regulated in Transcription
  misc_feature: MA Experiment 20000307 PARAMETER Experiment Name: At_Germinating_Seeds_Sub_P Parameter: Age (hr) Value: 24 vs. 0
  misc_feature: MA Experiment 20000307 PARAMETER Experiment Name: At_Germinating_Seeds_Sub_P Parameter: Organism Value: A. thaliana
  misc_feature: MA Experiment 20000307 PARAMETER Experiment Name: At_Germinating_Seeds_Sub_P Parameter: Plant Line Value: WS
  misc_feature: MA Experiment 20000307 PARAMETER Experiment Name: At_Germinating_Seeds_Sub_P Parameter: Tissue Value: Germinating Seeds
  misc_feature: MA Experiment ID: 20000314 Result: Down-regulated in Transcription
  misc_feature: MA Experiment 20000314 PARAMETER Experiment Name: At_14day_Shoots-Roots_Sub_P Parameter: Age (day) Value: 14
  misc_feature: MA Experiment 20000314 PARAMETER Experiment Name: At_14day_Shoots-Roots_Sub_P Parameter: Organism Value: A. thaliana
  misc_feature: MA Experiment 20000314 PARAMETER Experiment Name: At_14day_Shoots-Roots_Sub_P Parameter: Plant Line Value: WS
  misc_feature: MA Experiment 20000314 PARAMETER Experiment Name: At_14day_Shoots-Roots_Sub_P Parameter: Tissue Value: Roots vs. Whole Plant
  misc_feature: MA Experiment ID: 20000327 Result: Down-regulated in Transcription
  misc_feature: MA Experiment 20000327 PARAMETER Experiment Name: At_42deg_Heat_Sub_P Parameter: Age (day) Value: 14
  misc_feature: MA Experiment 20000327 PARAMETER Experiment Name: At_42deg_Heat_Sub_P Parameter: Organism Value: A. thaliana
  misc_feature: MA Experiment 20000327 PARAMETER Experiment Name: At_42deg_Heat_Sub_P Parameter: Plant Line Value: WS
  misc_feature: MA Experiment 20000327 PARAMETER Experiment Name: At_42deg_Heat_Sub_P Parameter: Temperature (deg C) Value: 42 vs. 22
  misc_feature: MA Experiment 20000327 PARAMETER Experiment Name: At_42deg_Heat_Sub_P Parameter: Timepoint (hr) Value: 1
  misc_feature: MA Experiment 20000327 PARAMETER Experiment Name: At_42deg_Heat_Sub_P Parameter: Tissue Value: Aerial
  misc_feature: MA Experiment ID: 20000328 Result: Down-regulated in Transcription
  misc_feature: MA Experiment 20000328 PARAMETER Experiment Name: At_42deg_Heat_Sub_P Parameter: Age (day) Value: 14
  misc_feature: MA Experiment 20000328 PARAMETER Experiment Name: At_42deg_Heat_Sub_P Parameter: Organism Value: A. thaliana
  misc_feature: MA Experiment 20000328 PARAMETER Experiment Name: At_42deg_Heat_Sub_P Parameter: Plant Line Value: WS
  misc_feature: MA Experiment 20000328 PARAMETER Experiment Name: At_42deg_Heat_Sub_P Parameter: Temperature (deg C) Value: 42 vs. 22
  misc_feature: MA Experiment 20000328 PARAMETER Experiment Name: At_42deg_Heat_Sub_P Parameter: Timepoint (hr) Value: 6
  misc_feature: MA Experiment 20000328 PARAMETER Experiment Name: At_42deg_Heat_Sub_P Parameter: Tissue Value: Aerial
  misc_feature: MA Experiment ID: 20000355 Result: Up-regulated in Transcription
  misc_feature: MA Experiment 20000355 PARAMETER Experiment Name: At_Siliques_Sub_P Parameter: Age (day) Value: 21
  misc_feature: MA Experiment 20000355 PARAMETER Experiment Name: At_Siliques_Sub_P Parameter: Organism Value: A. thaliana
  misc_feature: MA Experiment 20000355 PARAMETER Experiment Name: At_Siliques_Sub_P Parameter: Plant Line Value: WS
  misc_feature: MA Experiment 20000355 PARAMETER Experiment Name: At_Siliques_Sub_P Parameter: Tissue Value: Less Than 5mm Siliques vs. Whole Plant

SEQ ID NO: 44678 - protein, 252 aa, Arabidopsis thaliana; identical to SEQ ID NO: 34727
  peptide (1)..(252): Ceres Seq. ID no. 13504389
  misc_feature (55)..(246): Homolog of NCBI NO: 27661880 NR Description: hypothetical protein XP_236191 [Rattus norvegicus]
  misc_feature (33)..(244): Homolog of NCBI NO: 34535216 NR Description: unnamed protein product [Homo sapiens]
  misc_feature (141)..(185): Homolog of NCBI NO: 25405881 NR Description: protein F27F5.9 [imported] - Arabidopsis thaliana
  misc_feature (22)..(97): Homolog of NCBI NO: 25405881 NR Description: protein F27F5.9 [imported] - Arabidopsis thaliana
  misc_feature (33)..(249): Homolog of NCBI NO: 34903030 NR Description: unnamed protein product [Oryza sativa (japonica
  misc_feature (22)..(192): Homolog of NCBI NO: 25518603 NR Description: hypothetical protein T32G9.28 - Arabidopsis
  misc_feature (22)..(216): Homolog of NCBI NO: 15219511 NR Description: hypothetical protein [Arabidopsis thaliana]
  misc_feature (22)..(251): Homolog of NCBI NO: 30693154 NR Description: expressed protein [Arabidopsis thaliana]
  misc_feature (22)..(252): Homolog of NCBI NO: 22330031 NR Description: expressed protein [Arabidopsis thaliana]
  misc_feature (55)..(246): Homolog of NCBI NO: 27661880 NR Description: hypothetical protein XP_236191 [Rattus norvegicus]
  misc_feature (33)..(244): Homolog of NCBI NO: 34535216 NR Description: unnamed protein product [Homo sapiens]
  misc_feature (141)..(185): Homolog of NCBI NO: 25405881 NR Description: protein F27F5.9 [imported] - Arabidopsis thaliana
  misc_feature (22)..(97): Homolog of NCBI NO: 25405881 NR Description: protein F27F5.9 [imported] - Arabidopsis thaliana
  misc_feature (33)..(249): Homolog of NCBI NO: 34903030 NR Description: unnamed protein product [Oryza sativa (japonica
  misc_feature (22)..(192): Homolog of NCBI NO: 25518603 NR Description: hypothetical protein T32G9.28 - Arabidopsis
  misc_feature (22)..(216): Homolog of NCBI NO: 15219511 NR Description: hypothetical protein [Arabidopsis thaliana]
  misc_feature (22)..(251): Homolog of NCBI NO: 30693154 NR Description: expressed protein [Arabidopsis thaliana]
  misc_feature (22)..(252): Homolog of NCBI NO: 22330031 NR Description: expressed protein [Arabidopsis thaliana]

SEQ ID NO: 44679 - protein, 231 aa, Arabidopsis thaliana; identical to SEQ ID NO: 34728
  peptide (1)..(231): Ceres Seq. ID no. 13504390
  misc_feature (34)..(225): Homolog of NCBI NO: 27661880 NR Description: hypothetical protein XP_236191 [Rattus norvegicus]
  misc_feature (12)..(223): Homolog of NCBI NO: 34535216 NR Description: unnamed protein product [Homo sapiens]
  misc_feature (120)..(164): Homolog of NCBI NO: 25405881 NR Description: protein F27F5.9 [imported] - Arabidopsis thaliana
  misc_feature (1)..(76): Homolog of NCBI NO: 25405881 NR Description: protein F27F5.9 [imported] - Arabidopsis thaliana
  misc_feature (12)..(228): Homolog of NCBI NO: 34903030 NR Description: unnamed protein product [Oryza sativa (japonica
  misc_feature (1)..(171): Homolog of NCBI NO: 25518603 NR Description: hypothetical protein T32G9.28 - Arabidopsis
  misc_feature (1)..(195): Homolog of NCBI NO: 15219511 NR Description: hypothetical protein [Arabidopsis thaliana]
  misc_feature (1)..(230): Homolog of NCBI NO: 30693154 NR Description: expressed protein [Arabidopsis thaliana]
  misc_feature (1)..(231): Homolog of NCBI NO: 22330031 NR Description: expressed protein [Arabidopsis thaliana]
  misc_feature (34)..(225): Homolog of NCBI NO: 27661880 NR Description: hypothetical protein XP_236191 [Rattus norvegicus]
  misc_feature (12)..(223): Homolog of NCBI NO: 34535216 NR Description: unnamed protein product [Homo sapiens]
  misc_feature (120)..(164): Homolog of NCBI NO: 25405881 NR Description: protein F27F5.9 [imported] - Arabidopsis thaliana
  misc_feature (1)..(76): Homolog of NCBI NO: 25405881 NR Description: protein F27F5.9 [imported] - Arabidopsis thaliana
  misc_feature (12)..(228): Homolog of NCBI NO: 34903030 NR Description: unnamed protein product [Oryza sativa (japonica
  misc_feature (1)..(171): Homolog of NCBI NO: 25518603 NR Description: hypothetical protein T32G9.28 - Arabidopsis
  misc_feature (1)..(195): Homolog of NCBI NO: 15219511 NR Description: hypothetical protein [Arabidopsis thaliana]
  misc_feature (1)..(230): Homolog of NCBI NO: 30693154 NR Description: expressed protein [Arabidopsis thaliana]
  misc_feature (1)..(231): Homolog of NCBI NO: 22330031 NR Description: expressed protein [Arabidopsis thaliana]

SEQ ID NO: 44680 - protein, 155 aa, Arabidopsis thaliana; identical to SEQ ID NO: 34729
  peptide (1)..(155): Ceres Seq. ID no. 13504391
  misc_feature (1)..(149): Homolog of NCBI NO: 27661880 NR Description: hypothetical protein XP_236191 [Rattus norvegicus]
  misc_feature (1)..(147): Homolog of NCBI NO: 34535216 NR Description: unnamed protein product [Homo sapiens]
  misc_feature (44)..(88): Homolog of NCBI NO: 25405881 NR Description: protein F27F5.9 [imported] - Arabidopsis thaliana
  misc_feature (1)..(152): Homolog of NCBI NO: 34903030 NR Description: unnamed protein product [Oryza sativa (japonica
  misc_feature (1)..(95): Homolog of NCBI NO: 25518603 NR Description: hypothetical protein T32G9.28 - Arabidopsis
  misc_feature (1)..(119): Homolog of NCBI NO: 15219511 NR Description: hypothetical protein [Arabidopsis thaliana]
  misc_feature (1)..(154): Homolog of NCBI NO: 30693154 NR Description: expressed protein [Arabidopsis thaliana]
  misc_feature (1)..(155): Homolog of NCBI NO: 22330031 NR Description: expressed protein [Arabidopsis thaliana]
  misc_feature (1)..(149): Homolog of NCBI NO: 27661880 NR Description: hypothetical protein XP_236191 [Rattus norvegicus]
  misc_feature (1)..(147): Homolog of NCBI NO: 34535216 NR Description: unnamed protein product [Homo sapiens]
  misc_feature (44)..(88): Homolog of NCBI NO: 25405881 NR Description: protein F27F5.9 [imported] - Arabidopsis thaliana
  misc_feature (1)..(152): Homolog of NCBI NO: 34903030 NR Description: unnamed protein product [Oryza sativa (japonica
  misc_feature (1)..(95): Homolog of NCBI NO: 25518603 NR Description: hypothetical protein T32G9.28 - Arabidopsis
  misc_feature (1)..(119): Homolog of NCBI NO: 15219511 NR Description: hypothetical protein [Arabidopsis thaliana]
  misc_feature (1)..(154): Homolog of NCBI NO: 30693154 NR Description: expressed protein [Arabidopsis thaliana]
  misc_feature (1)..(155): Homolog of NCBI NO: 22330031 NR Description: expressed protein [Arabidopsis thaliana]

SEQ ID NO: 44681 - DNA, 790 bp, Arabidopsis thaliana
  misc_feature (1)..(790): Ceres Seq. ID no. 13503835
  misc_feature: MA Experiment ID: 20000185 Result: Down-regulated in Transcription
  misc_feature: MA Experiment 20000185 PARAMETER Experiment Name: At_Roots__P Parameter: Age (day) Value: 7 vs. 21
  misc_feature: MA Experiment 20000185 PARAMETER Experiment Name: At_Roots__P Parameter: Organism Value: A. thaliana
  misc_feature: MA Experiment 20000185 PARAMETER Experiment Name: At_Roots__P Parameter: Tissue Value: Roots vs. Whole Plant
  misc_feature: MA Experiment ID: 20000437 Result: Down-regulated in Transcription
  misc_feature: MA Experiment 20000437 PARAMETER Experiment Name: At_Drought_P Parameter: Age (day) Value: 8
  misc_feature: MA Experiment 20000437 PARAMETER Experiment Name: At_Drought_P Parameter: Organism Value: A. thaliana
  misc_feature: MA Experiment 20000437 PARAMETER Experiment Name: At_Drought_P Parameter: Plant Line Value: WS
  misc_feature: MA Experiment 20000437 PARAMETER Experiment Name: At_Drought_P Parameter: Timepoint (hr) Value: 24
  misc_feature: MA Experiment 20000437 PARAMETER Experiment Name: At_Drought_P Parameter: Tissue Value: Whole Plant
  misc_feature: MA Experiment 20000437 PARAMETER Experiment Name: At_Drought_P Parameter: Treatment Value: Drought vs. No Drought
  misc_feature: MA Experiment ID: 20000794 Result: Down-regulated in Transcription
  misc_feature: MA Experiment 20000794 PARAMETER Experiment Name: At_Petals_P Parameter: Age (day) Value: 23-25 days
  misc_feature: MA Experiment 20000794 PARAMETER Experiment Name: At_Petals_P Parameter: Plant Line Value: WS
  misc_feature: MA Experiment 20000794 PARAMETER Experiment Name: At_Petals_P Parameter: Tissue Value: Petals vs. Whole plant
  misc_feature: MA Experiment ID: 20001248 Result: Down-regulated in Transcription
  misc_feature: MA Experiment 20001248 PARAMETER Experiment Name: At_Far-red-induction_P Parameter: Age (day) Value: 7
  misc_feature: MA Experiment 20001248 PARAMETER Experiment Name: At_Far-red-induction_P Parameter: Light Value: Far-red vs. White
  misc_feature: MA Experiment 20001248 PARAMETER Experiment Name: At_Far-red-induction_P Parameter: Organism Value: A. thaliana
  misc_feature: MA Experiment 20001248 PARAMETER Experiment Name: At_Far-red-induction_P Parameter: Plant Line Value: Columbia
  misc_feature: MA Experiment 20001248 PARAMETER Experiment Name: At_Far-red-induction_P Parameter: Timepoint (hr) Value: 4
  misc_feature: MA Experiment 20001248 PARAMETER Experiment Name: At_Far-red-induction_P Parameter: Tissue Value: Whole Plant
  misc_feature: MA Experiment ID: 20001450 Result: Down-regulated in Transcription
  misc_feature: MA Experiment 20001450 PARAMETER Experiment Name: At_Far-red-induction_P Parameter: Age (day) Value: 7
  misc_feature: MA Experiment 20001450 PARAMETER Experiment Name: At_Far-red-induction_P Parameter: Light Value: Far-red vs. White
  misc_feature: MA Experiment 20001450 PARAMETER Experiment Name: At_Far-red-induction_P Parameter: Organism Value: A. thaliana
  misc_feature: MA Experiment 20001450 PARAMETER Experiment Name: At_Far-red-induction_P Parameter: Plant Line Value: Columbia
  misc_feature: MA Experiment 20001450 PARAMETER Experiment Name: At_Far-red-induction_P Parameter: Timepoint (hr) Value: 8
  misc_feature: MA Experiment 20001450 PARAMETER Experiment Name: At_Far-red-induction_P Parameter: Tissue Value: Whole Plant
  misc_feature: MA Experiment ID: 20001557 Result: Down-regulated in Transcription
  misc_feature: MA Experiment 20001557 PARAMETER Experiment Name: At_Drought_Soil_Dry_P Parameter: Age (day) Value: 27
  misc_feature: MA Experiment 20001557 PARAMETER Experiment Name: At_Drought_Soil_Dry_P Parameter: Organism Value: A. thaliana
  misc_feature: MA Experiment 20001557 PARAMETER Experiment Name: At_Drought_Soil_Dry_P Parameter: Plant Line Value: WS
  misc_feature: MA Experiment 20001557 PARAMETER Experiment Name: At_Drought_Soil_Dry_P Parameter: Post Timepoint (hr) Value: 3
  misc_feature: MA Experiment 20001557 PARAMETER Experiment Name: At_Drought_Soil_Dry_P Parameter: Post-Treatment Value: Re-Water vs. No Drought
  misc_feature: MA Experiment 20001557 PARAMETER Experiment Name: At_Drought_Soil_Dry_P Parameter: Timepoint (day) Value: 13
  misc_feature: MA Experiment 20001557 PARAMETER Experiment Name: At_Drought_Soil_Dry_P Parameter: Treatment Value: Drought vs. No Drought
  misc_feature: MA Experiment ID: 20001905 Result: Down-regulated in Transcription
  misc_feature: MA Experiment 20001905 PARAMETER Experiment Name: At_Drought_Reproduction_P Parameter: Age (day) Value: 40
  misc_feature: MA Experiment 20001905 PARAMETER Experiment Name: At_Drought_Reproduction_P Parameter: Organism Value: A. thaliana
  misc_feature: MA Experiment 20001905 PARAMETER Experiment Name: At_Drought_Reproduction_P Parameter: Plant Line Value: WS
  misc_feature: MA Experiment 20001905 PARAMETER Experiment Name: At_Drought_Reproduction_P Parameter: Timepoint (day) Value: 10
  misc_feature: MA Experiment 20001905 PARAMETER Experiment Name: At_Drought_Reproduction_P Parameter: Tissue Value: Rosettes
  misc_feature: MA Experiment 20001905 PARAMETER Experiment Name: At_Drought_Reproduction_P Parameter: Treatment Value: Drought vs. No Drought
  misc_feature: MA Experiment ID: 20001906 Result: Down-regulated in Transcription
  misc_feature: MA Experiment 20001906 PARAMETER Experiment Name: At_Drought_Reproduction_P Parameter: Age (day) Value: 35
  misc_feature: MA Experiment 20001906 PARAMETER Experiment Name: At_Drought_Reproduction_P Parameter: Organism Value: A. thaliana
  misc_feature: MA Experiment 20001906 PARAMETER Experiment Name: At_Drought_Reproduction_P Parameter: Plant Line Value: WS
  misc_feature: MA Experiment 20001906 PARAMETER Experiment Name: At_Drought_Reproduction_P Parameter: Timepoint (day) Value: 5
  misc_feature: MA Experiment 20001906 PARAMETER Experiment Name: At_Drought_Reproduction_P Parameter: Tissue Value: Siliques
  misc_feature: MA Experiment 20001906 PARAMETER Experiment Name: At_Drought_Reproduction_P Parameter: Treatment Value: Drought vs. No Drought
aaaaattaaaccagaacttgggaattggaaattggagaaaaatctcagccatggcgattgcttcaacagccaccgttcttttctgctgcgccaaacccaatttccggcgaattcattctgagagccgtccagcttcttctctcaccacctctaacgaacctgtaattcggatccgaagccgcagtttaattcatgacccggttgcgctgtcgggtcttatcggaaccagtttggttgcggctgctttcatcacggcgggaccagatgctactgctttggcggcggtggtggattctcttcagctaagcgaaccgtccaatgcgttgtctttacccacttgggccgttcatgtttccagcgttgtcgaatggattacggcgatggcattggtatggaagtatggagaaagaaagggttatgagtcttggaaaggtctctcatggggaatggtacctttgcttggtggagctctctgtgcatgcacatggcatttcttctacaacgatgaatctcttgaggtgttggtcgctcttcaggcagcactaacggtgtttggtaatatcactctctgcattgctgcctttcggatcaacaagttgtcatccaaaattgaagtctctgaaaagccatgatggctaaaccgatcaatatgagcaaagtataattgaattattaattggaggatcactaagattcttttcccctttgaaaagttctatgagattctatgtcaacgatttaagtatattatatagtctttatatgaggaagatccatgtgcattcaacct

SEQ ID NO: 44682 - protein, 209 aa, Arabidopsis thaliana
  peptide (1)..(209): Ceres Seq. ID no. 13503836
  misc_feature (106)..(206): Homolog of NCBI NO: 33862961 NR Description: conserved hypothetical protein
  misc_feature (106)..(196): Homolog of NCBI NO: 33865822 NR Description: conserved hypothetical protein [Synechococcus sp.
  misc_feature (108)..(204): Homolog of NCBI NO: 33861461 NR Description: conserved hypothetical protein
  misc_feature (106)..(193): Homolog of NCBI NO: 22298980 NR Description: ORF_ID:tlr1437~hypothetical protein
  misc_feature (107)..(196): Homolog of NCBI NO: 37521445 NR Description: hypothetical protein glr1876 [Gloeobacter
  misc_feature (106)..(205): Homolog of NCBI NO: 23041345 NR Description: hypothetical protein [Trichodesmium erythraeum
  misc_feature (106)..(207): Homolog of NCBI NO: 17232000 NR Description: hypothetical protein [Nostoc sp. PCC 7120]
  misc_feature (106)..(202): Homolog of NCBI NO: 16331563 NR Description: hypothetical protein [Synechocystis sp. PCC 6803]
  misc_feature (17)..(126): Homolog of NCBI NO: 7486889 NR Description: hypothetical protein T12H17.220 - Arabidopsis
  misc_feature (17)..(209): Homolog of NCBI NO: 30685952 NR Description: expressed protein [Arabidopsis thaliana]
KLNQNLGIGNWRKISAMAIASTATVLFCCAKPNFRRIHSESRPASSLTTSNEPVIRIRSRSLIHDPVALSGLIGTSLVAAAFITAGPDATALAAVVDSLQLSEPSNALSLPTWAVHVSSVVEWITAMALVWKYGERKGYESWKGLSWGMVPLLGGALCACTWHFFYNDESLEVLVALQAALTVFGNITLCIAAFRINKLSSKIEVSEKP

SEQ ID NO: 44683 - protein, 193 aa, Arabidopsis thaliana
  peptide (1)..(193): Ceres Seq. ID no. 13503837
  misc_feature (90)..(190): Homolog of NCBI NO: 33862961 NR Description: conserved hypothetical protein
  misc_feature (90)..(180): Homolog of NCBI NO: 33865822 NR Description: conserved hypothetical protein [Synechococcus sp.
  misc_feature (92)..(188): Homolog of NCBI NO: 33861461 NR Description: conserved hypothetical protein
  misc_feature (90)..(177): Homolog of NCBI NO: 22298980 NR Description: ORF_ID:tlr1437~hypothetical protein
  misc_feature (91)..(180): Homolog of NCBI NO: 37521445 NR Description: hypothetical protein glr1876 [Gloeobacter
  misc_feature (90)..(189): Homolog of NCBI NO: 23041345 NR Description: hypothetical protein [Trichodesmium erythraeum
  misc_feature (90)..(191): Homolog of NCBI NO: 17232000 NR Description: hypothetical protein [Nostoc sp. PCC 7120]
  misc_feature (90)..(186): Homolog of NCBI NO: 16331563 NR Description: hypothetical protein [Synechocystis sp. PCC 6803]
  misc_feature (1)..(110): Homolog of NCBI NO: 7486889 NR Description: hypothetical protein T12H17.220 - Arabidopsis
  misc_feature (1)..(193): Homolog of NCBI NO: 30685952 NR Description: expressed protein [Arabidopsis thaliana]
MAIASTATVLFCCAKPNFRRIHSESRPASSLTTSNEPVIRIRSRSLIHDPVALSGLIGTSLVAAAFITAGPDATALAAVVDSLQLSEPSNALSLPTWAVHVSSVVEWITAMALVWKYGERKGYESWKGLSWGMVPLLGGALCACTWHFFYNDESLEVLVALQAALTVFGNITLCIAAFRINKLSSKIEVSEKP

SEQ ID NO: 44684 - DNA, 1434 bp, Arabidopsis thaliana
  misc_feature (1)..(1434): Ceres Seq. ID no. 13509599
  misc_feature: MA Experiment ID: 20000439 Result: Up-regulated in Transcription
  misc_feature: MA Experiment 20000439 PARAMETER Experiment Name: At_Roots__P Parameter: Age (day) Value: 14 vs. 21
  misc_feature: MA Experiment 20000439 PARAMETER Experiment Name: At_Roots__P Parameter: Organism Value: A. thaliana
  misc_feature: MA Experiment 20000439 PARAMETER Experiment Name: At_Roots__P Parameter: Tissue Value: Roots vs. Whole Plant
aaaattagaaccaacagtcatcttcgtcattagtgagctaagttgttcaatctctcacctgaaaaccctaaccttcttcttcaatctccaatggcgcgtaaatcttccctcctcaaacgagcagcaatcgccgtcgtctccgtcatcgccatctatgtaattctcaacgcctccgttagtcgctctctcccttcctcatccgatctccctcgccagctaatccgtgaagatgatgatgatgaaggacgtgctccgattcagcctagggttagggtttacatgtacaatctccccaagagattcacttacggtttaatcgagcagcactcaatcgctcgcggcggaatcaagaagcccgtcggtgacgtcaccacgcttaagtatccgggtcatcaacatatgcacgagtggtatcttttctcggatcttaatcaacccgaagttgatcgatccgggtctccgattgtccgtgtctcggatcctgccgacgctgatctcttctacgtccctgtgttctcttcactcagcttaattgtaaatgcgggtcgacccgttgaagctggatccggttacagcgatgagaagatgcaggaagggttggtggagtggcttgaaggtcaagagtggtggaggaggaatgctgggagagatcacgtgatacccgcaggcgatccgaatgcgttgtatcggatcttggatcgggtcaaaaacgcagttctgctggtttcggatttcgggcggttgaggcctgatcaaggatcgttcgtcaaggatgttgtaataccttactcccatagagtcaatctcttcaatggagaaattggagttgaggatcgcaacacattactcttcttcatgggaaatcgatatcgcaaagatggtggaaaagttcgtgatttgctgttccaagtacttgaaaaggaagatgatgtaacaataaaacatggaactcagtccagagagaatcgacgagctgctacgaaaggaatgcatacttcgaagttttgtttaaatcctgcgggtgacactccatccgcctgcagactctttgactccattgtcagtttgtgtgtgcccctgattgttagcgatagtatcgagttacctttcgaagatgttatagattatagaaagttttccatttttgttgaggccaatgcagctctgcagcctggatttctggttcagatgctgaggaaaataaaaaccaagaagatcctcgagtatcagagagaaatgaaatcggtaagacggtattttgactatgacaacccaaatggagcagtgaaggaaatctggcgtcaagtctcccacaagttaccactcatcaaactaatgagtaaccgtgacaggcgcctcgtcctaagaaatttgaccgaaccaaactgctcatgtctatgcacaaaccaaaccggtcttatcacttccatttaa

SEQ ID NO: 44685 - protein, 447 aa, Arabidopsis thaliana
  peptide (1)..(447): Ceres Seq. ID no. 13509600
  misc_feature (62)..(383): Pfam Name: Exostosin family Pfam Description: Exostosin family
  misc_feature (15)..(422): Homolog of NCBI NO: 18410670 NR Description: Exostosin family [Arabidopsis thaliana]
  misc_feature (1)..(422): Homolog of NCBI NO: 15230692 NR Description: Exostosin family [Arabidopsis thaliana]
  misc_feature (296)..(410): Homolog of NCBI NO: 7487224 NR Description: hypothetical protein T1F15.13 - Arabidopsis
  misc_feature (16)..(320): Homolog of NCBI NO: 7487224 NR Description: hypothetical protein T1F15.13 - Arabidopsis
  misc_feature (54)..(423): Homolog of NCBI NO: 19386797 NR Description: OJ1485_B09.5 [Oryza sativa (japonica
  misc_feature (16)..(423): Homolog of NCBI NO: 22330483 NR Description: Exostosin family [Arabidopsis thaliana]
  misc_feature (1)..(444): Homolog of NCBI NO: 34899802 NR Description: OJ1092_A07.9 [Oryza sativa (japonica
  misc_feature (1)..(447): Homolog of NCBI NO: 15241619 NR Description: Exostosin family [Arabidopsis thaliana]
  misc_feature (1)..(385): Homolog of NCBI NO: 25408349 NR Description: hypothetical protein At2g35100 [imported] -
  misc_feature (1)..(447): Homolog of NCBI NO: 30686300 NR Description: Exostosin family [Arabidopsis thaliana]
MARKSSLLKRAAIAVVSVIAIYVILNASVSRSLPSSSDLPRQLIREDDDDEGRAPIQPRVRVYMYNLPKRFTYGLIEQHSIARGGIKKPVGDVTTLKYPGHQHMHEWYLFSDLNQPEVDRSGSPIVRVSDPADADLFYVPVFSSLSLIVNAGRPVEAGSGYSDEKMQEGLVEWLEGQEWWRRNAGRDHVIPAGDPNALYRILDRVKNAVLLVSDFGRLRPDQGSFVKDVVIPYSHRVNLFNGEIGVEDRNTLLFFMGNRYRKDGGKVRDLLFQVLEKEDDVTIKHGTQSRENRRAATKGMHTSKFCLNPAGDTPSACRLFDSIVSLCVPLIVSDSIELPFEDVIDYRKFSIFVEANAALQPGFLVQMLRKIKTKKILEYQREMKSVRRYFDYDNPNGAVKEIWRQVSHKLPLIKLMSNRDRRLVLRNLTEPNCSCLCTNQTGLITSI

SEQ ID NO: 44686 - protein, 384 aa, Arabidopsis thaliana
  peptide (1)..(384): Ceres Seq. ID no. 13509601
  misc_feature (1)..(320): Pfam Name: Exostosin family Pfam Description: Exostosin family
  misc_feature (1)..(359): Homolog of NCBI NO: 18410670 NR Description: Exostosin family [Arabidopsis thaliana]
  misc_feature (1)..(359): Homolog of NCBI NO: 15230692 NR Description: Exostosin family [Arabidopsis thaliana]
  misc_feature (233)..(347): Homolog of NCBI NO: 7487224 NR Description: hypothetical protein T1F15.13 - Arabidopsis
  misc_feature (1)..(257): Homolog of NCBI NO: 7487224 NR Description: hypothetical protein T1F15.13 - Arabidopsis
  misc_feature (1)..(360): Homolog of NCBI NO: 19386797 NR Description: OJ1485_B09.5 [Oryza sativa (japonica
  misc_feature (1)..(360): Homolog of NCBI NO: 22330483 NR Description: Exostosin family [Arabidopsis thaliana]
  misc_feature (1)..(381): Homolog of NCBI NO: 34899802 NR Description: OJ1092_A07.9 [Oryza sativa (japonica
  misc_feature (1)..(384): Homolog of NCBI NO: 15241619 NR Description: Exostosin family [Arabidopsis thaliana]
  misc_feature (1)..(322): Homolog of NCBI NO: 25408349 NR Description: hypothetical protein At2g35100 [imported] -
  misc_feature (1)..(384): Homolog of NCBI NO: 30686300 NR Description: Exostosin family [Arabidopsis thaliana]
MYNLPKRFTYGLIEQHSIARGGIKKPVGDVTTLKYPGHQHMHEWYLFSDLNQPEVDRSGSPIVRVSDPADADLFYVPVFSSLSLIVNAGRPVEAGSGYSDEKMQEGLVEWLEGQEWWRRNAGRDHVIPAGDPNALYRILDRVKNAVLLVSDFGRLRPDQGSFVKDVVIPYSHRVNLFNGEIGVEDRNTLLFFMGNRYRKDGGKVRDLLFQVLEKEDDVTIKHGTQSRENRRAATKGMHTSKFCLNPAGDTPSACRLFDSIVSLCVPLIVSDSIELPFEDVIDYRKFSIFVEANAALQPGFLVQMLRKIKTKKILEYQREMKSVRRYFDYDNPNGAVKEIWRQVSHKLPLIKLMSNRDRRLVLRNLTEPNCSCLCTNQTGLITSI

SEQ ID NO: 44687 - protein, 344 aa, Arabidopsis thaliana
  peptide (1)..(344): Ceres Seq. ID no. 13509602
  misc_feature (1)..(280): Pfam Name: Exostosin family Pfam Description: Exostosin family
  misc_feature (1)..(319): Homolog of NCBI NO: 18410670 NR Description: Exostosin family [Arabidopsis thaliana]
  misc_feature (1)..(319): Homolog of NCBI NO: 15230692 NR Description: Exostosin family [Arabidopsis thaliana]
  misc_feature (193)..(307): Homolog of NCBI NO: 7487224 NR Description: hypothetical protein T1F15.13 - Arabidopsis
  misc_feature (1)..(217): Homolog of NCBI NO: 7487224 NR Description: hypothetical protein T1F15.13 - Arabidopsis
  misc_feature (1)..(320): Homolog of NCBI NO: 19386797 NR Description: OJ1485_B09.5 [Oryza sativa (japonica
  misc_feature (1)..(320): Homolog of NCBI NO: 22330483 NR Description: Exostosin family [Arabidopsis thaliana]
  misc_feature (1)..(341): Homolog of NCBI NO: 34899802 NR Description: OJ1092_A07.9 [Oryza sativa (japonica
  misc_feature (1)..(344): Homolog of NCBI NO: 15241619 NR Description: Exostosin family [Arabidopsis thaliana]
  misc_feature (1)..(282): Homolog of NCBI NO: 25408349 NR Description: hypothetical protein At2g35100 [imported] -
  misc_feature (1)..(344): Homolog of NCBI NO: 30686300 NR Description: Exostosin family [Arabidopsis thaliana]
MHEWYLFSDLNQPEVDRSGSPIVRVSDPADADLFYVPVFSSLSLIVNAGRPVEAGSGYSDEKMQEGLVEWLEGQEWWRRNAGRDHVIPAGDPNALYRILDRVKNAVLLVSDFGRLRPDQGSFVKDVVIPYSHRVNLFNGEIGVEDRNTLLFFMGNRYRKDGGKVRDLLFQVLEKEDDVTIKHGTQSRENRRAATKGMHTSKFCLNPAGDTPSACRLFDSIVSLCVPLIVSDSIELPFEDVIDYRKFSIFVEANAALQPGFLVQMLRKIKTKKILEYQREMKSVRRYFDYDNPNGAVKEIWRQVSHKLPLIKLMSNRDRRLVLRNLTEPNCSCLCTNQTGLITSI

SEQ ID NO: 44688 - DNA, 638 bp, Arabidopsis thaliana; identical to SEQ ID NO: 29645
  misc_feature (1)..(638): Ceres Seq. ID no. 13489850
  misc_feature: MA Experiment ID: 108434 Result: Up-regulated in Transcription
  misc_feature: MA Experiment 108434 PARAMETER Experiment Name: At_Root_Tips_cDNA_P Parameter: Tissue Value: Root Tips
  misc_feature: MA Experiment ID: 108462 Result: Down-regulated in Transcription
  misc_feature: MA Experiment 108462 PARAMETER Experiment Name: At_Germinating_Seeds_cDNA_P Parameter: Age (day) Value: 2 vs. 0
  misc_feature: MA Experiment 108462 PARAMETER Experiment Name: At_Germinating_Seeds_cDNA_P Parameter: Tissue Value: Germinating Seeds
  misc_feature: MA Experiment ID: 108463 Result: Down-regulated in Transcription
  misc_feature: MA Experiment 108463 PARAMETER Experiment Name: At_Germinating_Seeds_cDNA_P Parameter: Age (day) Value: 3 vs. 0
  misc_feature: MA Experiment 108463 PARAMETER Experiment Name: At_Germinating_Seeds_cDNA_P Parameter: Tissue Value: Germinating Seeds
  misc_feature: MA Experiment ID: 108464 Result: Down-regulated in Transcription
  misc_feature: MA Experiment 108464 PARAMETER Experiment Name: At_Germinating_Seeds_cDNA_P Parameter: Age (day) Value: 4 vs. 0
  misc_feature: MA Experiment 108464 PARAMETER Experiment Name: At_Germinating_Seeds_cDNA_P Parameter: Tissue Value: Germinating Seeds
  misc_feature: MA Experiment ID: 108573 Result: Down-regulated in Transcription
  misc_feature: MA Experiment 108573 PARAMETER Experiment Name: At_Drought_cDNA_P Parameter: Timepoint (hr) Value: 6
  misc_feature: MA Experiment 108573 PARAMETER Experiment Name: At_Drought_cDNA_P Parameter: Tissue Value: Aerial
  misc_feature: MA Experiment 108573 PARAMETER Experiment Name: At_Drought_cDNA_P Parameter: Treatment Value: Drought vs. No Drought
  misc_feature: MA Experiment ID: 20000111 Result: Down-regulated in Transcription
  misc_feature: MA Experiment 20000111 PARAMETER Experiment Name: At_42deg_Heat_cDNA_P Parameter: Temperature (deg C) Value: 42 vs. 22
  misc_feature: MA Experiment 20000111 PARAMETER Experiment Name: At_42deg_Heat_cDNA_P Parameter: Timepoint (hr) Value: 6
  misc_feature: MA Experiment 20000111 PARAMETER Experiment Name: At_42deg_Heat_cDNA_P Parameter: Tissue Value: Aerial

SEQ ID NO: 44689 - protein, 122 aa, Arabidopsis thaliana; identical to SEQ ID NO: 29646
  peptide (1)..(122): Ceres Seq. ID no. 13489851
  misc_feature (8)..(122): Pfam Name: Mitochondrial ATP synthase g subunit Pfam Description: Mitochondrial ATP synthase g subunit
  misc_feature (8)..(122): Pfam Name: Mitochondrial ATP synthase g subunit Pfam Description: Mitochondrial ATP synthase g subunit
  misc_feature (1)..(120): Homolog of NCBI NO: 34912342 NR Description: P0518F01.5 [Oryza sativa (japonica
  misc_feature (1)..(122): Homolog of NCBI NO: 15236143 NR Description: expressed protein [Arabidopsis thaliana]
  misc_feature (1)..(120): Homolog of NCBI NO: 34912342 NR Description: P0518F01.5 [Oryza sativa (japonica
  misc_feature (1)..(122): Homolog of NCBI NO: 15233603 NR Description: expressed protein [Arabidopsis thaliana]
  misc_feature (1)..(122): Homolog of NCBI NO: 15224821 NR Description: copia-related retroelement pol polyprotein
  misc_feature (1)..(122): Homolog of NCBI NO: 15236143 NR Description: expressed protein [Arabidopsis thaliana]
  misc_feature (1)..(122): Homolog of NCBI NO: 15233603 NR Description: expressed protein [Arabidopsis thaliana]
  misc_feature (1)..(122): Homolog of NCBI NO: 15224821 NR Description: copia-related retroelement pol polyprotein

SEQ ID NO: 44690 - protein, 65 aa, Arabidopsis thaliana; identical to SEQ ID NO: 29647
  peptide (1)..(65): Ceres Seq. ID no. 13489852

SEQ ID NO: 44691 - DNA, 932 bp, Arabidopsis thaliana; identical to SEQ ID NO: 28492
  misc_feature (1)..(932): Ceres Seq. ID no. 12574162
  misc_feature: MA Experiment ID: 20000227 Result: Up-regulated in Transcription
  misc_feature: MA Experiment 20000227 PARAMETER Experiment Name: At_Root-Tips-vs-Tops_P Parameter: Tissue Value: Root Tips vs. Root Tops
  misc_feature: MA Experiment ID: 20001557 Result: Up-regulated in Transcription
  misc_feature: MA Experiment 20001557 PARAMETER Experiment Name: At_Drought_Soil_Dry_P Parameter: Age (day) Value: 27
  misc_feature: MA Experiment 20001557 PARAMETER Experiment Name: At_Drought_Soil_Dry_P Parameter: Organism Value: A. thaliana
  misc_feature: MA Experiment 20001557 PARAMETER Experiment Name: At_Drought_Soil_Dry_P Parameter: Plant Line Value: WS
  misc_feature: MA Experiment 20001557 PARAMETER Experiment Name: At_Drought_Soil_Dry_P Parameter: Post Timepoint (hr) Value: 3
  misc_feature: MA Experiment 20001557 PARAMETER Experiment Name: At_Drought_Soil_Dry_P Parameter: Post-Treatment Value: Re-Water vs. No Drought
  misc_feature: MA Experiment 20001557 PARAMETER Experiment Name: At_Drought_Soil_Dry_P Parameter: Timepoint (day) Value: 13
  misc_feature: MA Experiment 20001557 PARAMETER Experiment Name: At_Drought_Soil_Dry_P Parameter: Treatment Value: Drought vs. No Drought
  misc_feature: MA Experiment ID: 20001558 Result: Up-regulated in Transcription
  misc_feature: MA Experiment 20001558 PARAMETER Experiment Name: At_Drought_Soil_Dry_P Parameter: Age (day) Value: 27
  misc_feature: MA Experiment 20001558 PARAMETER Experiment Name: At_Drought_Soil_Dry_P Parameter: Organism Value: A. thaliana
  misc_feature: MA Experiment 20001558 PARAMETER Experiment Name: At_Drought_Soil_Dry_P Parameter: Plant Line Value: WS
  misc_feature: MA Experiment 20001558 PARAMETER Experiment Name: At_Drought_Soil_Dry_P Parameter: Post Timepoint (hr) Value: 6
  misc_feature: MA Experiment 20001558 PARAMETER Experiment Name: At_Drought_Soil_Dry_P Parameter: Post-Treatment Value: Re-Water vs. No Drought
  misc_feature: MA Experiment 20001558 PARAMETER Experiment Name: At_Drought_Soil_Dry_P Parameter: Timepoint (day) Value: 13
  misc_feature: MA Experiment 20001558 PARAMETER Experiment Name: At_Drought_Soil_Dry_P Parameter: Treatment Value: Drought vs. No Drought
  misc_feature: MA Experiment ID: 20001560 Result: Up-regulated in Transcription
  misc_feature: MA Experiment 20001560 PARAMETER Experiment Name: At_Drought_Soil_Dry_P Parameter: Age (day) Value: 28
  misc_feature: MA Experiment 20001560 PARAMETER Experiment Name: At_Drought_Soil_Dry_P Parameter: Organism Value: A. thaliana
  misc_feature: MA Experiment 20001560 PARAMETER Experiment Name: At_Drought_Soil_Dry_P Parameter: Plant Line Value: WS
  misc_feature: MA Experiment 20001560 PARAMETER Experiment Name: At_Drought_Soil_Dry_P Parameter: Post Timepoint (hr) Value: None
  misc_feature: MA Experiment 20001560 PARAMETER Experiment Name: At_Drought_Soil_Dry_P Parameter: Post-Treatment Value: None
  misc_feature: MA Experiment 20001560 PARAMETER Experiment Name: At_Drought_Soil_Dry_P Parameter: Timepoint (day) Value: 14
  misc_feature: MA Experiment 20001560 PARAMETER Experiment Name: At_Drought_Soil_Dry_P Parameter: Treatment Value: Drought vs. No Drought
  misc_feature: MA Experiment ID: 20001757 Result: Up-regulated in Transcription
  misc_feature: MA Experiment 20001757 PARAMETER Experiment Name: At_50mM_NH4NO3_L-to-H_P Parameter: Timepoint (hr) Value: 6
  misc_feature: MA Experiment 20001757 PARAMETER Experiment Name: At_50mM_NH4NO3_L-to-H_P Parameter: Tissue Value: Leaf
  misc_feature: MA Experiment 20001757 PARAMETER Experiment Name: At_50mM_NH4NO3_L-to-H_P Parameter: Treatment Value: 50mM NH4NO3 vs 100mM Mannitol

SEQ ID NO: 44692 - protein, 238 aa, Arabidopsis thaliana; identical to SEQ ID NO: 28493
  peptide (1)..(238): Ceres Seq. ID no. 12574163
  misc_feature (92)..(151): Pfam Name: NAC domain Pfam Description: NAC domain
  misc_feature (92)..(151): Pfam Name: NAC domain Pfam Description: NAC domain
  misc_feature (34)..(237): Homolog of NCBI NO: 34907258 NR Description: putative nascent polypeptide associated complex
  misc_feature (37)..(238): Homolog of NCBI NO: 15230476 NR Description: nascent polypeptide associated complex alpha
  misc_feature (49)..(237): Homolog of NCBI NO: 34902238 NR Description: Putative nascent polypeptide associated complex
  misc_feature (37)..(238): Homolog of NCBI NO: 32352154 NR Description: nascent polypeptide associated complex alpha
  misc_feature (28)..(238): Homolog of NCBI NO: 15229149 NR Description: alpha NAC-like protein
  misc_feature (34)..(237): Homolog of NCBI NO: 34907258 NR Description: putative nascent polypeptide associated complex
  misc_feature (49)..(237): Homolog of NCBI NO: 34902238 NR Description: Putative nascent polypeptide associated complex
  misc_feature (28)..(238): Homolog of NCBI NO: 15229149 NR Description: alpha NAC-like protein
  misc_feature (27)..(238): Homolog of NCBI NO: 15235122 NR Description: putative alpha NAC
  misc_feature (27)..(238): Homolog of NCBI NO: 18398710 NR Description: expressed protein
  misc_feature (27)..(238): Homolog of NCBI NO: 21536597 NR Description: putative alpha NAC [Arabidopsis thaliana]
  misc_feature (20)..(238): Homolog of NCBI NO: 4115918 NR Description: similar to nascent polypeptide associated complex
  misc_feature (28)..(238): Homolog of NCBI NO: 13899101 NR Description: alpha NAC-like protein [Arabidopsis thaliana]
  misc_feature (37)..(238): Homolog of NCBI NO: 32352154 NR Description: nascent polypeptide associated complex alpha
  misc_feature (37)..(238): Homolog of NCBI NO: 15230476 NR Description: nascent polypeptide associated complex alpha
  misc_feature (28)..(238): Homolog of NCBI NO: 13899101 NR Description: alpha NAC-like protein [Arabidopsis thaliana]
  misc_feature (20)..(238): Homolog of NCBI NO: 4115918 NR Description: similar to nascent polypeptide associated complex
  misc_feature (27)..(238): Homolog of NCBI NO: 21536597 NR Description: putative alpha NAC [Arabidopsis thaliana]
  misc_feature (27)..(238): Homolog of NCBI NO: 18398710 NR Description: expressed protein
  misc_feature (27)..(238): Homolog of NCBI NO: 15235122 NR Description: putative alpha NAC

SEQ ID NO: 44693 - protein, 212 aa, Arabidopsis thaliana; identical to SEQ ID NO: 28494
  peptide (1)..(212): Ceres Seq. ID no. 12574164
  misc_feature (66)..(125): Pfam Name: NAC domain Pfam Description: NAC domain
  misc_feature (66)..(125): Pfam Name: NAC domain Pfam Description: NAC domain
  misc_feature (8)..(211): Homolog of NCBI NO: 34907258 NR Description: putative nascent polypeptide associated complex
  misc_feature (11)..(212): Homolog of NCBI NO: 15230476 NR Description: nascent polypeptide associated complex alpha
  misc_feature (23)..(211): Homolog of NCBI NO: 34902238 NR Description: Putative nascent polypeptide associated complex
  misc_feature (11)..(212): Homolog of NCBI NO: 32352154 NR Description: nascent polypeptide associated complex alpha
  misc_feature (2)..(212): Homolog of NCBI NO: 15229149 NR Description: alpha NAC-like protein
  misc_feature (8)..(211): Homolog of NCBI NO: 34907258 NR Description: putative nascent polypeptide associated complex
  misc_feature (23)..(211): Homolog of NCBI NO: 34902238 NR Description: Putative nascent polypeptide associated complex
  misc_feature (2)..(212): Homolog of NCBI NO: 15229149 NR Description: alpha NAC-like protein
  misc_feature (1)..(212): Homolog of NCBI NO: 15235122 NR Description: putative alpha NAC
  misc_feature (1)..(212): Homolog of NCBI NO: 18398710 NR Description: expressed protein
  misc_feature (1)..(212): Homolog of NCBI NO: 21536597 NR Description: putative alpha NAC [Arabidopsis thaliana]
  misc_feature (1)..(212): Homolog of NCBI NO: 4115918 NR Description: similar to nascent polypeptide associated complex
  misc_feature (2)..(212): Homolog of NCBI NO: 13899101 NR Description: alpha NAC-like protein [Arabidopsis thaliana]
  misc_feature (11)..(212): Homolog of NCBI NO: 32352154 NR Description: nascent polypeptide associated complex alpha
  misc_feature (11)..(212): Homolog of NCBI NO: 15230476 NR Description: nascent polypeptide associated complex alpha
  misc_feature (2)..(212): Homolog of NCBI NO: 13899101 NR Description: alpha NAC-like protein [Arabidopsis thaliana]
  misc_feature (1)..(212): Homolog of NCBI NO: 4115918 NR Description: similar to nascent polypeptide associated complex
  misc_feature (1)..(212): Homolog of NCBI NO: 21536597 NR Description: putative alpha NAC [Arabidopsis thaliana]
  misc_feature (1)..(212): Homolog of NCBI NO: 18398710 NR Description: expressed protein
  misc_feature (1)..(212): Homolog of NCBI NO: 15235122 NR Description: putative alpha NAC

SEQ ID NO: 44694 - protein, 198 aa, Arabidopsis thaliana; identical to SEQ ID NO: 28495
  peptide (1)..(198): Ceres Seq. ID no. 12574165
  misc_feature (52)..(111): Pfam Name: NAC domain Pfam Description: NAC domain
  misc_feature (52)..(111): Pfam Name: NAC domain Pfam Description: NAC domain
  misc_feature (1)..(197): Homolog of NCBI NO: 34907258 NR Description: putative nascent polypeptide associated complex
  misc_feature (1)..(198): Homolog of NCBI NO: 15230476 NR Description: nascent polypeptide associated complex alpha
  misc_feature (9)..(197): Homolog of NCBI NO: 34902238 NR Description: Putative nascent polypeptide associated complex
  misc_feature (1)..(198): Homolog of NCBI NO: 32352154 NR Description: nascent polypeptide associated complex alpha
  misc_feature (1)..(198): Homolog of NCBI NO: 15229149 NR Description: alpha NAC-like protein
  misc_feature (1)..(197): Homolog of NCBI NO: 34907258 NR Description: putative nascent polypeptide associated complex
  misc_feature (9)..(197): Homolog of NCBI NO: 34902238 NR Description: Putative nascent polypeptide associated complex
  misc_feature (1)..(198): Homolog of NCBI NO: 15229149 NR Description: alpha NAC-like protein
  misc_feature (1)..(198): Homolog of NCBI NO: 15235122 NR Description: putative alpha NAC
  misc_feature (1)..(198): Homolog of NCBI NO: 18398710 NR Description: expressed protein
  misc_feature (1)..(198): Homolog of NCBI NO: 21536597 NR Description: putative alpha NAC [Arabidopsis thaliana]
  misc_feature (1)..(198): Homolog of NCBI NO: 4115918 NR Description: similar to nascent polypeptide associated complex
  misc_feature (1)..(198): Homolog of NCBI NO: 13899101 NR Description: alpha NAC-like protein [Arabidopsis thaliana]
  misc_feature (1)..(198): Homolog of NCBI NO: 32352154 NR Description: nascent polypeptide associated complex alpha
  misc_feature (1)..(198): Homolog of NCBI NO: 15230476 NR Description: nascent polypeptide associated complex alpha
  misc_feature (1)..(198): Homolog of NCBI NO: 13899101 NR Description: alpha NAC-like protein [Arabidopsis thaliana]
  misc_feature (1)..(198): Homolog of NCBI NO: 4115918 NR Description: similar to nascent polypeptide associated complex
  misc_feature (1)..(198): Homolog of NCBI NO: 21536597 NR Description: putative alpha NAC [Arabidopsis thaliana]
  misc_feature (1)..(198): Homolog of NCBI NO: 18398710 NR Description: expressed protein
  misc_feature (1)..(198): Homolog of NCBI NO: 15235122 NR Description: putative alpha NAC

SEQ ID NO: 44695 - DNA, 847 bp, Arabidopsis thaliana; identical to SEQ ID NO: 42547
  misc_feature (1)..(847): Ceres Seq. ID no. 12488557
  misc_feature: MA Experiment ID: 108473 Result: Down-regulated in Transcription
  misc_feature: MA Experiment 108473 PARAMETER Experiment Name: At_Drought_Flowers_cDNA_P Parameter: Timepoint (hr) Value: 7 d
  misc_feature: MA Experiment 108473 PARAMETER Experiment Name: At_Drought_Flowers_cDNA_P Parameter: Tissue Value: Flower
  misc_feature: MA Experiment 108473 PARAMETER Experiment Name: At_Drought_Flowers_cDNA_P Parameter: Treatment Value: Drought vs. No Drought
  misc_feature: MA Experiment ID: 108501 Result: Down-regulated in Transcription
  misc_feature: MA Experiment 108501 PARAMETER Experiment Name: At_ap2_floral_buds_cDNA_P Parameter: Plant Line Value: ap2 (Ler.)
  misc_feature: MA Experiment 108501 PARAMETER Experiment Name: At_ap2_floral_buds_cDNA_P Parameter: Tissue Value: Closed Flower
  misc_feature: MA Experiment ID: 108595 Result: Up-regulated in Transcription
  misc_feature: MA Experiment 108595 PARAMETER Experiment Name: At_Ler-pi_Ovule_cDNA_P Parameter: Plant Line Value: null
  misc_feature: MA Experiment ID: 20000171 Result: Down-regulated in Transcription
  misc_feature: MA Experiment 20000171 PARAMETER Experiment Name: At_42deg_Heat_P Parameter: Age (day) Value: 14
  misc_feature: MA Experiment 20000171 PARAMETER Experiment Name: At_42deg_Heat_P Parameter: Organism Value: A. thaliana
  misc_feature: MA Experiment 20000171 PARAMETER Experiment Name: At_42deg_Heat_P Parameter: Plant Line Value: WS
  misc_feature: MA Experiment 20000171 PARAMETER Experiment Name: At_42deg_Heat_P Parameter: Temperature (deg C) Value: 42 vs. 22
  misc_feature: MA Experiment 20000171 PARAMETER Experiment Name: At_42deg_Heat_P Parameter: Timepoint (hr) Value: 1
  misc_feature: MA Experiment 20000171 PARAMETER Experiment Name: At_42deg_Heat_P Parameter: Tissue Value: Aerial
  misc_feature: MA Experiment ID: 20000173 Result: Down-regulated in Transcription
  misc_feature: MA Experiment 20000173 PARAMETER Experiment Name: At_42deg_Heat_P Parameter: Age (day) Value: 14
  misc_feature: MA Experiment 20000173 PARAMETER Experiment Name: At_42deg_Heat_P Parameter: Organism Value: A. thaliana
  misc_feature: MA Experiment 20000173 PARAMETER Experiment Name: At_42deg_Heat_P Parameter: Plant Line Value: WS
  misc_feature: MA Experiment 20000173 PARAMETER Experiment Name: At_42deg_Heat_P Parameter: Temperature (deg C) Value: 42 vs. 22
  misc_feature: MA Experiment 20000173 PARAMETER Experiment Name: At_42deg_Heat_P Parameter: Timepoint (hr) Value: 6
  misc_feature: MA Experiment 20000173 PARAMETER Experiment Name: At_42deg_Heat_P Parameter: Tissue Value: Aerial
  misc_feature: MA Experiment ID: 20000184 Result: Down-regulated in Transcription
  misc_feature: MA Experiment 20000184 PARAMETER Experiment Name: At_Shoots__P Parameter: Age (day) Value: 7
  misc_feature: MA Experiment 20000184 PARAMETER Experiment Name: At_Shoots__P Parameter: Tissue Value: Shoots vs. Whole Plant
  misc_feature: MA Experiment ID: 20000235 Result: Down-regulated in Transcription
  misc_feature: MA Experiment 20000235 PARAMETER Experiment Name: At_Siliques_P Parameter: Age (day) Value: 21
  misc_feature: MA Experiment 20000235 PARAMETER Experiment Name: At_Siliques_P Parameter: Organism Value: A. thaliana
  misc_feature: MA Experiment 20000235 PARAMETER Experiment Name: At_Siliques_P Parameter: Plant Line Value: WS
  misc_feature: MA Experiment 20000235 PARAMETER Experiment Name: At_Siliques_P Parameter: Tissue Value: 5-10mm Siliques vs. Whole Plant
  misc_feature: MA Experiment ID: 20000264 Result: Down-regulated in Transcription
  misc_feature: MA Experiment 20000264 PARAMETER Experiment Name: At_Open_Flower_P Parameter: Age (day) Value: 21
  misc_feature: MA Experiment 20000264 PARAMETER Experiment Name: At_Open_Flower_P Parameter: Plant Line Value: WS
  misc_feature: MA Experiment 20000264 PARAMETER Experiment Name: At_Open_Flower_P Parameter: Tissue Value: Open Flower vs. Whole Plant
  misc_feature: MA Experiment ID: 20000265 Result: Up-regulated in Transcription
  misc_feature: MA Experiment 20000265 PARAMETER Experiment Name: At_Open_Flower_P Parameter: Age (day) Value: 21
  misc_feature: MA Experiment 20000265 PARAMETER Experiment Name: At_Open_Flower_P Parameter: Plant Line Value: WS
  misc_feature: MA Experiment 20000265 PARAMETER Experiment Name: At_Open_Flower_P Parameter: Tissue Value: Closed Flower vs. Whole Plant
  misc_feature: MA Experiment ID: 20000286 Result: Up-regulated in Transcription
  misc_feature: MA Experiment 20000286 PARAMETER Experiment Name: At_Open_Flower_P Parameter: Age (day) Value: 21
  misc_feature: MA Experiment 20000286 PARAMETER Experiment Name: At_Open_Flower_P Parameter: Plant Line Value: WS
  misc_feature: MA Experiment 20000286 PARAMETER Experiment Name: At_Open_Flower_P Parameter: Tissue Value: Half Open vs. Whole Plant
  misc_feature: MA Experiment ID: 20000438 Result: Down-regulated in Transcription
  misc_feature: MA Experiment 20000438 PARAMETER Experiment Name: At_Shoots__P Parameter: Age (day) Value: 14
  misc_feature: MA Experiment 20000438 PARAMETER Experiment Name: At_Shoots__P Parameter: Tissue Value: Shoots vs. Whole Plant
  misc_feature: MA Experiment ID: 20000439 Result: Down-regulated in Transcription
  misc_feature: MA Experiment 20000439 PARAMETER Experiment Name: At_Roots__P Parameter: Age (day) Value: 14 vs. 21
  misc_feature: MA Experiment 20000439 PARAMETER Experiment Name: At_Roots__P Parameter: Organism Value: A. thaliana
  misc_feature: MA Experiment 20000439 PARAMETER Experiment Name: At_Roots__P Parameter: Tissue Value: Roots vs. Whole Plant
  misc_feature: MA Experiment ID: 20000794 Result: Down-regulated in Transcription
  misc_feature: MA Experiment 20000794 PARAMETER Experiment Name: At_Petals_P Parameter: Age (day) Value: 23-25 days
  misc_feature: MA Experiment 20000794 PARAMETER Experiment Name: At_Petals_P Parameter: Plant Line Value: WS
  misc_feature: MA Experiment 20000794 PARAMETER Experiment Name: At_Petals_P Parameter: Tissue Value: Petals vs. Whole plant
  misc_feature: MA Experiment ID: 20001555 Result: Down-regulated in Transcription
  misc_feature: MA Experiment 20001555 PARAMETER Experiment Name: At_Drought_Soil_Dry_P Parameter: Age (day) Value: 24
  misc_feature: MA Experiment 20001555 PARAMETER Experiment Name: At_Drought_Soil_Dry_P Parameter: Organism Value: A. thaliana
  misc_feature: MA Experiment 20001555 PARAMETER Experiment Name: At_Drought_Soil_Dry_P Parameter: Plant Line Value: WS
  misc_feature: MA Experiment 20001555 PARAMETER Experiment Name: At_Drought_Soil_Dry_P Parameter: Post Timepoint (hr) Value: None
  misc_feature: MA Experiment 20001555 PARAMETER Experiment Name: At_Drought_Soil_Dry_P Parameter: Post-Treatment Value: None
  misc_feature: MA Experiment 20001555 PARAMETER Experiment Name: At_Drought_Soil_Dry_P Parameter: Timepoint (day) Value: 10
  misc_feature: MA Experiment 20001555 PARAMETER Experiment Name: At_Drought_Soil_Dry_P Parameter: Treatment Value: Drought vs. No Drought
  misc_feature: MA Experiment ID: 20001556 Result: Down-regulated in Transcription
  misc_feature: MA Experiment 20001556 PARAMETER Experiment Name: At_Drought_Soil_Dry_P Parameter: Age (day) Value: 26
  misc_feature: MA Experiment 20001556 PARAMETER Experiment Name: At_Drought_Soil_Dry_P Parameter: Organism Value: A. thaliana
  misc_feature: MA Experiment 20001556 PARAMETER Experiment Name: At_Drought_Soil_Dry_P Parameter: Plant Line Value: WS
  misc_feature: MA Experiment 20001556 PARAMETER Experiment Name: At_Drought_Soil_Dry_P Parameter: Post Timepoint (hr) Value: None
  misc_feature: MA Experiment 20001556 PARAMETER Experiment Name: At_Drought_Soil_Dry_P Parameter: Post-Treatment Value: None
  misc_feature: MA Experiment 20001556 PARAMETER Experiment Name: At_Drought_Soil_Dry_P Parameter: Timepoint (day) Value: 12
  misc_feature: MA Experiment 20001556 PARAMETER Experiment Name: At_Drought_Soil_Dry_P Parameter: Treatment Value: Drought vs. No Drought
  misc_feature: MA Experiment ID: 20001557 Result: Down-regulated in Transcription
  misc_feature: MA Experiment 20001557 PARAMETER Experiment Name: At_Drought_Soil_Dry_P Parameter: Age (day) Value: 27
  misc_feature: MA Experiment 20001557 PARAMETER Experiment Name: At_Drought_Soil_Dry_P Parameter: Organism Value: A. thaliana
  misc_feature: MA Experiment 20001557 PARAMETER Experiment Name: At_Drought_Soil_Dry_P Parameter: Plant Line Value: WS
  misc_feature: MA Experiment 20001557 PARAMETER Experiment Name: At_Drought_Soil_Dry_P Parameter: Post Timepoint (hr) Value: 3
  misc_feature: MA Experiment 20001557 PARAMETER Experiment Name: At_Drought_Soil_Dry_P Parameter: Post-Treatment Value: Re-Water vs. No Drought
  misc_feature: MA Experiment 20001557 PARAMETER Experiment Name: At_Drought_Soil_Dry_P Parameter: Timepoint (day) Value: 13
  misc_feature: MA Experiment 20001557 PARAMETER Experiment Name: At_Drought_Soil_Dry_P Parameter: Treatment Value: Drought vs. No Drought
  misc_feature: MA Experiment ID: 20001560 Result: Up-regulated in Transcription
  misc_feature: MA Experiment 20001560 PARAMETER Experiment Name: At_Drought_Soil_Dry_P Parameter: Age (day) Value: 28
  misc_feature: MA Experiment 20001560 PARAMETER Experiment Name: At_Drought_Soil_Dry_P Parameter: Organism Value: A. thaliana
  misc_feature: MA Experiment 20001560 PARAMETER Experiment Name: At_Drought_Soil_Dry_P Parameter: Plant Line Value: WS
  misc_feature: MA Experiment 20001560 PARAMETER Experiment Name: At_Drought_Soil_Dry_P Parameter: Post Timepoint (hr) Value: None
  misc_feature: MA Experiment 20001560 PARAMETER Experiment Name: At_Drought_Soil_Dry_P Parameter: Post-Treatment Value: None
  misc_feature: MA Experiment 20001560 PARAMETER Experiment Name: At_Drought_Soil_Dry_P Parameter: Timepoint (day) Value: 14
  misc_feature: MA Experiment 20001560 PARAMETER Experiment Name: At_Drought_Soil_Dry_P Parameter: Treatment Value: Drought vs. No Drought
  misc_feature: MA Experiment ID: 20001761 Result: Up-regulated in Transcription
  misc_feature: MA Experiment 20001761 PARAMETER Experiment Name: At_50mM_NH4NO3_L-to-H_P Parameter: Timepoint (hr) Value: 4
  misc_feature: MA Experiment 20001761 PARAMETER Experiment Name: At_50mM_NH4NO3_L-to-H_P Parameter: Tissue Value: Siliques
  misc_feature: MA Experiment 20001761 PARAMETER Experiment Name: At_50mM_NH4NO3_L-to-H_P Parameter: Treatment Value: 50mM NH4NO3 vs 100mM Mannitol
  misc_feature: MA Experiment ID: 20001762 Result: Down-regulated in Transcription
  misc_feature: MA Experiment 20001762 PARAMETER Experiment Name: At_50mM_NH4NO3_L-to-H_P Parameter: Timepoint (hr) Value: 6
  misc_feature: MA Experiment 20001762 PARAMETER Experiment Name: At_50mM_NH4NO3_L-to-H_P Parameter: Tissue Value: Siliques
  misc_feature: MA Experiment 20001762 PARAMETER Experiment Name: At_50mM_NH4NO3_L-to-H_P Parameter: Treatment Value: 50mM NH4NO3 vs 100mM Mannitol
  misc_feature: MA Experiment ID: 20001771 Result: Up-regulated in Transcription
  misc_feature: MA Experiment 20001771 PARAMETER Experiment Name: At_Far-red-enriched-adult_P Parameter: Age (day) Value: 28
  misc_feature: MA Experiment 20001771 PARAMETER Experiment Name: At_Far-red-enriched-adult_P Parameter: Light Value: Far-red enriched vs. White
  misc_feature: MA Experiment 20001771 PARAMETER Experiment Name: At_Far-red-enriched-adult_P Parameter: Organism Value: A. thaliana
  misc_feature: MA Experiment 20001771 PARAMETER Experiment Name: At_Far-red-enriched-adult_P Parameter: Plant Line Value: Columbia
  misc_feature: MA Experiment 20001771 PARAMETER Experiment Name: At_Far-red-enriched-adult_P Parameter: Timepoint (hr) Value: 16
  misc_feature: MA Experiment 20001771 PARAMETER Experiment Name: At_Far-red-enriched-adult_P Parameter: Tissue Value: Aerial
  misc_feature: MA Experiment ID: 20001773 Result: Up-regulated in Transcription
  misc_feature: MA Experiment 20001773 PARAMETER Experiment Name: At_Far-red-enriched-adult_P Parameter: Age (day) Value: 30
  misc_feature: MA Experiment 20001773 PARAMETER Experiment Name: At_Far-red-enriched-adult_P Parameter: Light Value: Far-red enriched vs. White
  misc_feature: MA Experiment 20001773 PARAMETER Experiment Name: At_Far-red-enriched-adult_P Parameter: Organism Value: A. thaliana
  misc_feature: MA Experiment 20001773 PARAMETER Experiment Name: At_Far-red-enriched-adult_P Parameter: Plant Line Value: Columbia
  misc_feature: MA Experiment 20001773 PARAMETER Experiment Name: At_Far-red-enriched-adult_P Parameter: Timepoint (hr) Value: 48
  misc_feature: MA Experiment 20001773 PARAMETER Experiment Name: At_Far-red-enriched-adult_P Parameter: Tissue Value: Aerial
  misc_feature: MA Experiment ID: 20001904 Result: Down-regulated in Transcription
  misc_feature: MA Experiment 20001904 PARAMETER Experiment Name: At_Drought_Reproduction_P Parameter: Age (day) Value: 37
  misc_feature: MA Experiment 20001904 PARAMETER Experiment Name: At_Drought_Reproduction_P Parameter: Organism Value: A. thaliana
  misc_feature: MA Experiment 20001904 PARAMETER Experiment Name: At_Drought_Reproduction_P Parameter: Plant Line Value: WS
  misc_feature: MA Experiment 20001904 PARAMETER Experiment Name: At_Drought_Reproduction_P Parameter: Timepoint (day) Value: 7
  misc_feature: MA Experiment 20001904 PARAMETER Experiment Name: At_Drought_Reproduction_P Parameter: Tissue Value: Rosettes
  misc_feature: MA Experiment 20001904 PARAMETER Experiment Name: At_Drought_Reproduction_P Parameter: Treatment Value: Drought vs. No Drought
  misc_feature: MA Experiment ID: 20001911 Result: Down-regulated in Transcription
  misc_feature: MA Experiment 20001911 PARAMETER Experiment Name: At_Drought_Reproduction_P Parameter: Age (day) Value: 40
  misc_feature: MA Experiment 20001911 PARAMETER Experiment Name: At_Drought_Reproduction_P Parameter: Organism Value: A. thaliana
  misc_feature: MA Experiment 20001911 PARAMETER Experiment Name: At_Drought_Reproduction_P Parameter: Plant Line Value: WS
  misc_feature: MA Experiment 20001911 PARAMETER Experiment Name: At_Drought_Reproduction_P Parameter: Timepoint (day) Value: 10
  misc_feature: MA Experiment 20001911 PARAMETER Experiment Name: At_Drought_Reproduction_P Parameter: Tissue Value: Flowers
  misc_feature: MA Experiment 20001911 PARAMETER Experiment Name: At_Drought_Reproduction_P Parameter: Treatment Value: Drought vs. No Drought

SEQ ID NO: 44696 - protein, 172 aa, Arabidopsis thaliana; identical to SEQ ID NO: 42548
  peptide (1)..(172): Ceres Seq. ID no. 12488558
  misc_feature (1)..(172): Homolog of NCBI NO: 30683502 NR Description: expressed protein [Arabidopsis thaliana]
  misc_feature (1)..(172): Homolog of NCBI NO: 21594030 NR Description: unknown [Arabidopsis thaliana]
  misc_feature (1)..(172): Homolog of NCBI NO: 18420486 NR Description: expressed protein
  misc_feature (1)..(172): Homolog of NCBI NO: 30683502 NR Description: expressed protein [Arabidopsis thaliana]
  misc_feature (1)..(172): Homolog of NCBI NO: 21594030 NR Description: unknown [Arabidopsis thaliana]
  misc_feature (1)..(172): Homolog of NCBI NO: 18420486 NR Description: expressed protein

SEQ ID NO: 44697 - DNA, 836 bp, Arabidopsis thaliana
  misc_feature (1)..(836): Ceres Seq. ID no. 12466196
  misc_feature: MA Experiment ID: 108435 Result: Up-regulated in Transcription
  misc_feature: MA Experiment 108435 PARAMETER Experiment Name: At_stm_Mutants_cDNA_P Parameter: Plant Line Value: wt Landsburg vs stm
  misc_feature: MA Experiment 108435 PARAMETER Experiment Name: At_stm_Mutants_cDNA_P Parameter: Tissue Value: Shoot Apical Meristem Region
  misc_feature: MA Experiment ID: 20000069 Result: Down-regulated in Transcription
  misc_feature: MA Experiment 20000069 PARAMETER Experiment Name: At_100uM_ABA_Mutants_cDNA_P Parameter: Plant Line Value: CS23
  misc_feature: MA Experiment 20000069 PARAMETER Experiment Name: At_100uM_ABA_Mutants_cDNA_P Parameter: Timepoint (hr) Value: 6
  misc_feature: MA Experiment 20000069 PARAMETER Experiment Name: At_100uM_ABA_Mutants_cDNA_P Parameter: Tissue Value: Aerial
  misc_feature: MA Experiment 20000069 PARAMETER Experiment Name: At_100uM_ABA_Mutants_cDNA_P Parameter: Treatment Value: 100uM ABA vs. No Treatment
  misc_feature: MA Experiment ID: 20000071 Result: Down-regulated in Transcription
  misc_feature: MA Experiment 20000071 PARAMETER Experiment Name: At_100uM_ABA_Mutants_cDNA_P Parameter: Plant Line Value: CS8104
  misc_feature: MA Experiment 20000071 PARAMETER Experiment Name: At_100uM_ABA_Mutants_cDNA_P Parameter: Timepoint (hr) Value: 6
  misc_feature: MA Experiment 20000071 PARAMETER Experiment Name: At_100uM_ABA_Mutants_cDNA_P Parameter: Tissue Value: Aerial
  misc_feature: MA Experiment 20000071 PARAMETER Experiment Name: At_100uM_ABA_Mutants_cDNA_P Parameter: Treatment Value: 100uM ABA vs. No Treatment
  misc_feature: MA Experiment ID: 20000117 Result: Down-regulated in Transcription
  misc_feature: MA Experiment 20000117 PARAMETER Experiment Name: At_100uM_ABA_Mutants_cDNA_P Parameter: Plant Line Value: Columbia
  misc_feature: MA Experiment 20000117 PARAMETER Experiment Name: At_100uM_ABA_Mutants_cDNA_P Parameter: Timepoint (hr) Value: 6
  misc_feature: MA Experiment 20000117 PARAMETER Experiment Name: At_100uM_ABA_Mutants_cDNA_P Parameter: Tissue Value: Aerial
  misc_feature: MA Experiment 20000117 PARAMETER Experiment Name: At_100uM_ABA_Mutants_cDNA_P Parameter: Treatment Value: 100uM ABA vs. No Treatment
  misc_feature: MA Experiment ID: 20000437 Result: Down-regulated in Transcription
  misc_feature: MA Experiment 20000437 PARAMETER Experiment Name: At_Drought_P Parameter: Age (day) Value: 8
  misc_feature: MA Experiment 20000437 PARAMETER Experiment Name: At_Drought_P Parameter: Organism Value: A. thaliana
  misc_feature: MA Experiment 20000437 PARAMETER Experiment Name: At_Drought_P Parameter: Plant Line Value: WS
  misc_feature: MA Experiment 20000437 PARAMETER Experiment Name: At_Drought_P Parameter: Timepoint (hr) Value: 24
  misc_feature: MA Experiment 20000437 PARAMETER Experiment Name: At_Drought_P Parameter: Tissue Value: Whole Plant
  misc_feature: MA Experiment 20000437 PARAMETER Experiment Name: At_Drought_P Parameter: Treatment Value: Drought vs. No Drought
  misc_feature: MA Experiment ID: 20000439 Result: Down-regulated in Transcription
  misc_feature: MA Experiment 20000439 PARAMETER Experiment Name: At_Roots__P Parameter: Age (day) Value: 14 vs. 21
  misc_feature: MA Experiment 20000439 PARAMETER Experiment Name: At_Roots__P Parameter: Organism Value: A. thaliana
  misc_feature: MA Experiment 20000439 PARAMETER Experiment Name: At_Roots__P Parameter: Tissue Value: Roots vs. Whole Plant
  misc_feature: MA Experiment ID: 20000451 Result: Up-regulated in Transcription
  misc_feature: MA Experiment 20000451 PARAMETER Experiment Name: At_CS6879_Shoots-Roots_P Parameter: Age (day) Value: 14
  misc_feature: MA Experiment 20000451 PARAMETER Experiment Name: At_CS6879_Shoots-Roots_P Parameter: Organism Value: A. thaliana
  misc_feature: MA Experiment 20000451 PARAMETER Experiment Name: At_CS6879_Shoots-Roots_P Parameter: Plant Line Value: CS6879 vs. WS
  misc_feature: MA Experiment 20000451 PARAMETER Experiment Name: At_CS6879_Shoots-Roots_P Parameter: Tissue Value: Roots
  misc_feature: MA Experiment ID: 20001248 Result: Down-regulated in Transcription
  misc_feature: MA Experiment 20001248 PARAMETER Experiment Name: At_Far-red-induction_P Parameter: Age (day) Value: 7
  misc_feature: MA Experiment 20001248 PARAMETER Experiment Name: At_Far-red-induction_P Parameter: Light Value: Far-red vs. White
  misc_feature: MA Experiment 20001248 PARAMETER Experiment Name: At_Far-red-induction_P Parameter: Organism Value: A. thaliana
  misc_feature: MA Experiment 20001248 PARAMETER Experiment Name: At_Far-red-induction_P Parameter: Plant Line Value: Columbia
  misc_feature: MA Experiment 20001248 PARAMETER Experiment Name: At_Far-red-induction_P Parameter: Timepoint (hr) Value: 4
  misc_feature: MA Experiment 20001248 PARAMETER Experiment Name: At_Far-red-induction_P Parameter: Tissue Value: Whole Plant
acgatagcctctcatcttcttttttcctctccatcatcttctcttatcaactttagactcacaagcctcctctcatcttcaccataaccgaaaaaccaaacaaaaaatccttagataatcagatcttgatattatggatcatatcatcggctttatgggcacaacaaacatgtcacataacacaaaccttatgatcgctgccgcagccactaccactacgacctcttcgtcttcctcttcttcctccggaggctcggggactaaccagctaagcaggtacgagaatcagaagagaagagattggaacactttcggacagtatctacgcaatcaccgtccaccactttctctctcccgttgcagtggtgctcatgttcttgaattcctcaggtacctcgaccaattcggcaagactaaggttcacacacacctatgtccgttcttcggacacccaaacccaccagcaccatgtgcctgtccactccgacaagcgtggggtagtctggacgcactcattggccgtcttagagctgcttttgaagagaacggtggttcaccagagacgaacccttttggtgcacgagccgttcgactctacctaagggaagtacgtgactcgcaggctaaagcacgtgggatcagctatgaaaaaaagaagcgcaagcgacctcctccgccactaccaccggctcagccggcgatttcaagtagccctaattaacattaagtcatgagtaagatgtttcaatgaactacgtttgtttacaaatttttatcaatgacgaacatgcacgagttcttttaaagtcacatgccctttcctaaacttttatttg

SEQ ID NO: 44698 - protein, 195 aa, Arabidopsis thaliana; identical to SEQ ID NO: 22865
  peptide (1)..(195): Ceres Seq. ID no. 12466197
  misc_feature (30)..(162): Pfam Name: Protein of unknown function (DUF640) Pfam Description: Protein of unknown function (DUF640)
  misc_feature (46)..(183): Homolog of NCBI NO: 18412120 NR Description: Expressed protein
  misc_feature (33)..(193): Homolog of NCBI NO: 18406012 NR Description: expressed protein
  misc_feature (34)..(179): Homolog of NCBI NO: 15237680 NR Description: putative protein; protein id: At5g58500.1
  misc_feature (8)..(194): Homolog of NCBI NO: 15229310 NR Description: unknown protein; protein id: At3g04510.1
  misc_feature (47)..(190): Homolog of NCBI NO: 15241821 NR Description: putative protein; protein id: At5g28490.1
  misc_feature (47)..(180): Homolog of NCBI NO: 18390725 NR Description: expressed protein
  misc_feature (45)..(193): Homolog of NCBI NO: 34907938 NR Description: B1088C09.17 [Oryza sativa (japonica
  misc_feature (30)..(182): Homolog of NCBI NO: 37535384 NR Description: hypothetical protein [Oryza sativa (japonica
  misc_feature (30)..(179): Homolog of NCBI NO: 38344650 NR Description: OSJNBb0072M01.12 [Oryza sativa (japonica
  misc_feature (1)..(193): Homolog of NCBI NO: 18402578 NR Description: expressed protein

SEQ ID NO: 44699 - protein, 188 aa, Arabidopsis thaliana; identical to SEQ ID NO: 22866
  peptide (1)..(188): Ceres Seq. ID no. 12466198
  misc_feature (23)..(155): Pfam Name: Protein of unknown function (DUF640) Pfam Description: Protein of unknown function (DUF640)
  misc_feature (39)..(176): Homolog of NCBI NO: 18412120 NR Description: Expressed protein
  misc_feature (26)..(186): Homolog of NCBI NO: 18406012 NR Description: expressed protein
  misc_feature (27)..(172): Homolog of NCBI NO: 15237680 NR Description: putative protein; protein id: At5g58500.1
  misc_feature (1)..(187): Homolog of NCBI NO: 15229310 NR Description: unknown protein; protein id: At3g04510.1
  misc_feature (40)..(183): Homolog of NCBI NO: 15241821 NR Description: putative protein; protein id: At5g28490.1
  misc_feature (40)..(173): Homolog of NCBI NO: 18390725 NR Description: expressed protein
  misc_feature (38)..(186): Homolog of NCBI NO: 34907938 NR Description: B1088C09.17 [Oryza sativa (japonica
  misc_feature (23)..(175): Homolog of NCBI NO: 37535384 NR Description: hypothetical protein [Oryza sativa (japonica
  misc_feature (23)..(172): Homolog of NCBI NO: 38344650 NR Description: OSJNBb0072M01.12 [Oryza sativa (japonica
  misc_feature (1)..(186): Homolog of NCBI NO: 18402578 NR Description: expressed protein

SEQ ID NO: 44700 - protein, 183 aa, Arabidopsis thaliana; identical to SEQ ID NO: 22867
  peptide (1)..(183): Ceres Seq. ID no. 12466199
  misc_feature (18)..(150): Pfam Name: Protein of unknown function (DUF640) Pfam Description: Protein of unknown function (DUF640)
  misc_feature (34)..(171): Homolog of NCBI NO: 18412120 NR Description: Expressed protein
  misc_feature (21)..(181): Homolog of NCBI NO: 18406012 NR Description: expressed protein
  misc_feature (22)..(167): Homolog of NCBI NO: 15237680 NR Description: putative protein; protein id: At5g58500.1
  misc_feature (1)..(182): Homolog of NCBI NO: 15229310 NR Description: unknown protein; protein id: At3g04510.1
  misc_feature (35)..(178): Homolog of NCBI NO: 15241821 NR Description: putative protein; protein id: At5g28490.1
  misc_feature (35)..(168): Homolog of NCBI NO: 18390725 NR Description: expressed protein
  misc_feature (33)..(181): Homolog of NCBI NO: 34907938 NR Description: B1088C09.17 [Oryza sativa (japonica
  misc_feature (18)..(170): Homolog of NCBI NO: 37535384 NR Description: hypothetical protein [Oryza sativa (japonica
  misc_feature (18)..(167): Homolog of NCBI NO: 38344650 NR Description: OSJNBb0072M01.12 [Oryza sativa (japonica
  misc_feature (1)..(181): Homolog of NCBI NO: 18402578 NR Description: expressed protein

SEQ ID NO: 44701 - DNA, 1569 bp, Arabidopsis thaliana
  misc_feature (1)..(1569): Ceres Seq. ID no. 13509244
  misc_feature: MA Experiment ID: 20000173 Result: Down-regulated in Transcription
  misc_feature: MA Experiment 20000173 PARAMETER Experiment Name: At_42deg_Heat_P Parameter: Age (day) Value: 14
  misc_feature: MA Experiment 20000173 PARAMETER Experiment Name: At_42deg_Heat_P Parameter: Organism Value: A. thaliana
  misc_feature: MA Experiment 20000173 PARAMETER Experiment Name: At_42deg_Heat_P Parameter: Plant Line Value: WS
  misc_feature: MA Experiment 20000173 PARAMETER Experiment Name: At_42deg_Heat_P Parameter: Temperature (deg C) Value: 42 vs. 22
  misc_feature: MA Experiment 20000173 PARAMETER Experiment Name: At_42deg_Heat_P Parameter: Timepoint (hr) Value: 6
  misc_feature: MA Experiment 20000173 PARAMETER Experiment Name: At_42deg_Heat_P Parameter: Tissue Value: Aerial
  misc_feature: MA Experiment ID: 20000184 Result: Down-regulated in Transcription
  misc_feature: MA Experiment 20000184 PARAMETER Experiment Name: At_Shoots__P Parameter: Age (day) Value: 7
  misc_feature: MA Experiment 20000184 PARAMETER Experiment Name: At_Shoots__P Parameter: Tissue Value: Shoots vs. Whole Plant
  misc_feature: MA Experiment ID: 20000286 Result: Up-regulated in Transcription
  misc_feature: MA Experiment 20000286 PARAMETER Experiment Name: At_Open_Flower_P Parameter: Age (day) Value: 21
  misc_feature: MA Experiment 20000286 PARAMETER Experiment Name: At_Open_Flower_P Parameter: Plant Line Value: WS
  misc_feature: MA Experiment 20000286 PARAMETER Experiment Name: At_Open_Flower_P Parameter: Tissue Value: Half Open vs. Whole Plant
  misc_feature: MA Experiment ID: 20001451 Result: Down-regulated in Transcription
  misc_feature: MA Experiment 20001451 PARAMETER Experiment Name: At_Far-red-induction_P Parameter: Age (day) Value: 7
  misc_feature: MA Experiment 20001451 PARAMETER Experiment Name: At_Far-red-induction_P Parameter: Light Value: Far-red vs. White
  misc_feature: MA Experiment 20001451 PARAMETER Experiment Name: At_Far-red-induction_P Parameter: Organism Value: A. thaliana
  misc_feature: MA Experiment 20001451 PARAMETER Experiment Name: At_Far-red-induction_P Parameter: Plant Line Value: Columbia
  misc_feature: MA Experiment 20001451 PARAMETER Experiment Name: At_Far-red-induction_P Parameter: Timepoint (hr) Value: 24
  misc_feature: MA Experiment 20001451 PARAMETER Experiment Name: At_Far-red-induction_P Parameter: Tissue Value: Whole Plant
  misc_feature: MA Experiment ID: 20001557 Result: Up-regulated in Transcription
  misc_feature: MA Experiment 20001557 PARAMETER Experiment Name: At_Drought_Soil_Dry_P Parameter: Age (day) Value: 27
  misc_feature: MA Experiment 20001557 PARAMETER Experiment Name: At_Drought_Soil_Dry_P Parameter: Organism Value: A. thaliana
  misc_feature: MA Experiment 20001557 PARAMETER Experiment Name: At_Drought_Soil_Dry_P Parameter: Plant Line Value: WS
  misc_feature: MA Experiment 20001557 PARAMETER Experiment Name: At_Drought_Soil_Dry_P Parameter: Post Timepoint (hr) Value: 3
  misc_feature: MA Experiment 20001557 PARAMETER Experiment Name: At_Drought_Soil_Dry_P Parameter: Post-Treatment Value: Re-Water vs. No Drought
  misc_feature: MA Experiment 20001557 PARAMETER Experiment Name: At_Drought_Soil_Dry_P Parameter: Timepoint (day) Value: 13
  misc_feature: MA Experiment 20001557 PARAMETER Experiment Name: At_Drought_Soil_Dry_P Parameter: Treatment Value: Drought vs. No Drought
gattttggccttctttctgatatttatttatctccgaaacttttgcttcttaagtctgtctctctcttctatcagattccacactaatcggaaaaaatggcacagaagcttaacttgcttaatctcgccgtccctccggtcacccaccgctctaacttcccttccaccttcaccttcggcgtcgccacttccgcttaccagattgaaggaggttggaatgaaggtaaaaagggaccaagtatatgggataagttcactcatatcgaagggaagattcttgatggaagtaacggcgatgttgctgtggatcattaccatagatacaaggaagatgttgatcttataggacaattaggattcggtgcttacagattttctatatcttggtctcgaattttccctgatggcctgggaactgaagtcaatgaagaaggcattgctttctacaacgatcttattaatacacttcttgaaaaaggtattcagccgtatgtaactctgtaccattgggatctcccatcacatctccaggaagcaatcggaggttggacaaataggaaaattgtcgattattttggcctctatgcagatgcttgttttgccaattttggtgatagagtgaagcactggatcacattaaatgaacctcttcagacctcggtgaatggacactgtattggtatatttgcacctggaagaaatgagaagcccttgatcgaaccatatttggtctcacatcatcaggttctggcccatgcaactgctgtatccatatatagaagcaagtacaaggaaagtcaaggtggacaaatcggtttgtcagttgattgtgaatgggcagagccaaactctgagaaaccagaagacaaggttgctgcggataggcgaattgactttcaacttggatggttcttggatcctttgttttttggagactatcctgcaagtatgcgccagaaacttggagacaatcttcctagatttactccggaagaaaaggagtttatgcttcaaaactcatgggacttccttggcctgaaccactatacgtcgaggttgatttctcatgtctcaaacaaagaagctgagagtaacttttaccaagcacaagaattggagaggattgttgaactggaaaatggagatttgataggcgaaagggctgcttcggattggctttatgctgtgccttggggaatccgaaagacattgaattacatgagcaaaaaatataaccaccctccaatatttatcactgaaaatggtatggatgatgaagatgatggatcggcctctattcatgatatgcttgacgataaacgtagagttgactatttcaagagttaccttgccaacgtctcccaggctattgaagacggagtggacataaagggatactttgcgtggtcgctgctggacaacttcgagtgggcgcaagggtacaccaagagatttggtttggtatatgtagactacaagaacggtttaacccgtcacccaaaatcatctgcttactggttcatgaaatttctgaaaggtgatgaagaaaacaaaggtaagaaggaatga

SEQ ID NO: 44702 - protein, 490 aa, Arabidopsis thaliana
  peptide (1)..(490): Ceres Seq. ID no. 13509245
  misc_feature (18)..(479): Homolog of NCBI NO: 37532728 NR Description: putative beta-glucosidase
  misc_feature (16)..(488): Homolog of NCBI NO: 15778638 NR Description: prunasin hydrolase isoform PH I precursor [Prunus
  misc_feature (16)..(488): Homolog of NCBI NO: 7435446 NR Description: beta-glucosidase (EC 3.2.1.21) precursor,
  misc_feature (14)..(486): Homolog of NCBI NO: 6979913 NR Description: prunasin hydrolase isoform PHA precursor [Prunus
  misc_feature (14)..(486): Homolog of NCBI NO: 15778431 NR Description: prunasin hydrolase isoform PH A precursor [Prunus
  misc_feature (18)..(479): Homolog of NCBI NO: 21537259 NR Description: beta-glucosidase, putative [Arabidopsis thaliana]
  misc_feature (18)..(479): Homolog of NCBI NO: 15222734 NR Description: glycosyl hydrolase family 1 [Arabidopsis
  misc_feature (18)..(480): Homolog of NCBI NO: 22658440 NR Description: beta-glucosidase [Oryza sativa (japonica
  misc_feature (59)..(486): Homolog of NCBI NO: 34907636 NR Description: putative beta-glucosidase
  misc_feature (1)..(490): Homolog of NCBI NO: 22327412 NR Description: glycosyl hydrolase family 1 [Arabidopsis
MAQKLNLLNLAVPPVTHRSNFPSTFTFGVATSAYQIEGGWNEGKKGPSIWDKFTHIEGKILDGSNGDVAVDHYHRYKEDVDLIGQLGFGAYRFSISWSRIFPDGLGTEVNEEGIAFYNDLINTLLEKGIQPYVTLYHWDLPSHLQEAIGGWTNRKIVDYFGLYADACFANFGDRVKHWITLNEPLQTSVNGHCIGIFAPGRNEKPLIEPYLVSHHQVLAHATAVSIYRSKYKESQGGQIGLSVDCEWAEPNSEKPEDKVAADRRIDFQLGWFLDPLFFGDYPASMRQKLGDNLPRFTPEEKEFMLQNSWDFLGLNHYTSRLISHVSNKEAESNFYQAQELERIVELENGDLIGERAASDWLYAVPWGIRKTLNYMSKKYNHPPIFITENGMDDEDDGSASIHDMLDDKRRVDYFKSYLANVSQAIEDGVDIKGYFAWSLLDNFEWAQGYTKRFGLVYVDYKNGLTRHPKSSAYWFMKFLKGDEENKGKKE

SEQ ID NO: 44703 - DNA, 1837 bp, Arabidopsis thaliana
  misc_feature (1)..(1837): Ceres Seq. ID no. 13509647
  misc_feature: MA Experiment ID: 108435 Result: Up-regulated in Transcription
  misc_feature: MA Experiment 108435 PARAMETER Experiment Name: At_stm_Mutants_cDNA_P Parameter: Plant Line Value: wt Landsburg vs stm
  misc_feature: MA Experiment 108435 PARAMETER Experiment Name: At_stm_Mutants_cDNA_P Parameter: Tissue Value: Shoot Apical Meristem Region
  misc_feature: MA Experiment ID: 108461 Result: Up-regulated in Transcription
  misc_feature: MA Experiment 108461 PARAMETER Experiment Name: At_Germinating_Seeds_cDNA_P Parameter: Age (day) Value: 1 vs. 0
  misc_feature: MA Experiment 108461 PARAMETER Experiment Name: At_Germinating_Seeds_cDNA_P Parameter: Tissue Value: Germinating Seeds
  misc_feature: MA Experiment ID: 108462 Result: Up-regulated in Transcription
  misc_feature: MA Experiment 108462 PARAMETER Experiment Name: At_Germinating_Seeds_cDNA_P Parameter: Age (day) Value: 2 vs. 0
  misc_feature: MA Experiment 108462 PARAMETER Experiment Name: At_Germinating_Seeds_cDNA_P Parameter: Tissue Value: Germinating Seeds
  misc_feature: MA Experiment ID: 108489 Result: Down-regulated in Transcription
  misc_feature: MA Experiment ID: 20000069 Result: Down-regulated in Transcription
  misc_feature: MA Experiment 20000069 PARAMETER Experiment Name: At_100uM_ABA_Mutants_cDNA_P Parameter: Plant Line Value: CS23
  misc_feature: MA Experiment 20000069 PARAMETER Experiment Name: At_100uM_ABA_Mutants_cDNA_P Parameter: Timepoint (hr) Value: 6
  misc_feature: MA Experiment 20000069 PARAMETER Experiment Name: At_100uM_ABA_Mutants_cDNA_P Parameter: Tissue Value: Aerial
  misc_feature: MA Experiment 20000069 PARAMETER Experiment Name: At_100uM_ABA_Mutants_cDNA_P Parameter: Treatment Value: 100uM ABA vs. No Treatment
  misc_feature: MA Experiment ID: 20000070 Result: Down-regulated in Transcription
  misc_feature: MA Experiment 20000070 PARAMETER Experiment Name: At_100uM_ABA_Mutants_cDNA_P Parameter: Plant Line Value: CS24
  misc_feature: MA Experiment 20000070 PARAMETER Experiment Name: At_100uM_ABA_Mutants_cDNA_P Parameter: Timepoint (hr) Value: 6
  misc_feature: MA Experiment 20000070 PARAMETER Experiment Name: At_100uM_ABA_Mutants_cDNA_P Parameter: Tissue Value: Aerial
  misc_feature: MA Experiment 20000070 PARAMETER Experiment Name: At_100uM_ABA_Mutants_cDNA_P Parameter: Treatment Value: 100uM ABA vs. No Treatment
  misc_feature: MA Experiment ID: 20000071 Result: Down-regulated in Transcription
  misc_feature: MA Experiment 20000071 PARAMETER Experiment Name: At_100uM_ABA_Mutants_cDNA_P Parameter: Plant Line Value: CS8104
  misc_feature: MA Experiment 20000071 PARAMETER Experiment Name: At_100uM_ABA_Mutants_cDNA_P Parameter: Timepoint (hr) Value: 6
  misc_feature: MA Experiment 20000071 PARAMETER Experiment Name: At_100uM_ABA_Mutants_cDNA_P Parameter: Tissue Value: Aerial
  misc_feature: MA Experiment 20000071 PARAMETER Experiment Name: At_100uM_ABA_Mutants_cDNA_P Parameter: Treatment Value: 100uM ABA vs. No Treatment
  misc_feature: MA Experiment ID: 20000072 Result: Down-regulated in Transcription
  misc_feature: MA Experiment 20000072 PARAMETER Experiment Name: At_100uM_ABA_Mutants_cDNA_P Parameter: Plant Line Value: CS8105
  misc_feature: MA Experiment 20000072 PARAMETER Experiment Name: At_100uM_ABA_Mutants_cDNA_P Parameter: Timepoint (hr) Value: 6
  misc_feature: MA Experiment 20000072 PARAMETER Experiment Name: At_100uM_ABA_Mutants_cDNA_P Parameter: Tissue Value: Aerial
  misc_feature: MA Experiment 20000072 PARAMETER Experiment Name: At_100uM_ABA_Mutants_cDNA_P Parameter: Treatment Value: 100uM ABA vs. No Treatment
  misc_feature: MA Experiment ID: 20000087 Result: Down-regulated in Transcription
  misc_feature: MA Experiment 20000087 PARAMETER Experiment Name: At_100uM_ABA_Mutants_cDNA_P Parameter: Plant Line Value: WS
  misc_feature: MA Experiment 20000087 PARAMETER Experiment Name: At_100uM_ABA_Mutants_cDNA_P Parameter: Timepoint (hr) Value: 6
  misc_feature: MA Experiment 20000087 PARAMETER Experiment Name: At_100uM_ABA_Mutants_cDNA_P Parameter: Tissue Value: Aerial
  misc_feature: MA Experiment 20000087 PARAMETER Experiment Name: At_100uM_ABA_Mutants_cDNA_P Parameter: Treatment Value: 100uM ABA vs. No Treatment
  misc_feature: MA Experiment ID: 20000088 Result: Down-regulated in Transcription
  misc_feature: MA Experiment 20000088 PARAMETER Experiment Name: At_100uM_ABA_Mutants_cDNA_P Parameter: Plant Line Value: Landsberg
  misc_feature: MA Experiment 20000088 PARAMETER Experiment Name: At_100uM_ABA_Mutants_cDNA_P Parameter: Timepoint (hr) Value: 6
  misc_feature: MA Experiment 20000088 PARAMETER Experiment Name: At_100uM_ABA_Mutants_cDNA_P Parameter: Tissue Value: Aerial
  misc_feature: MA Experiment 20000088 PARAMETER Experiment Name: At_100uM_ABA_Mutants_cDNA_P Parameter: Treatment Value: 100uM ABA vs. No Treatment
  misc_feature: MA Experiment ID: 20000089 Result: Down-regulated in Transcription
  misc_feature: MA Experiment ID: 20000113 Result: Up-regulated in Transcription
  misc_feature: MA Experiment 20000113 PARAMETER Experiment Name: At_42deg_Heat_cDNA_P Parameter: Temperature (deg C) Value: 42 vs. 22
  misc_feature: MA Experiment 20000113 PARAMETER Experiment Name: At_42deg_Heat_cDNA_P Parameter: Timepoint (hr) Value: 8
  misc_feature: MA Experiment 20000113 PARAMETER Experiment Name: At_42deg_Heat_cDNA_P Parameter: Tissue Value: Aerial
  misc_feature: MA Experiment ID: 20000117 Result: Down-regulated in Transcription
  misc_feature: MA Experiment 20000117 PARAMETER Experiment Name: At_100uM_ABA_Mutants_cDNA_P Parameter: Plant Line Value: Columbia
  misc_feature: MA Experiment 20000117 PARAMETER Experiment Name: At_100uM_ABA_Mutants_cDNA_P Parameter: Timepoint (hr) Value: 6
  misc_feature: MA Experiment 20000117 PARAMETER Experiment Name: At_100uM_ABA_Mutants_cDNA_P Parameter: Tissue Value: Aerial
  misc_feature: MA Experiment 20000117 PARAMETER Experiment Name: At_100uM_ABA_Mutants_cDNA_P Parameter: Treatment Value: 100uM ABA vs. No Treatment
  misc_feature: MA Experiment ID: 20000234 Result: Up-regulated in Transcription
  misc_feature: MA Experiment 20000234 PARAMETER Experiment Name: At_Siliques_P Parameter: Age (day) Value: 21
  misc_feature: MA Experiment 20000234 PARAMETER Experiment Name: At_Siliques_P Parameter: Organism Value: A. thaliana
  misc_feature: MA Experiment 20000234 PARAMETER Experiment Name: At_Siliques_P Parameter: Plant Line Value: WS
  misc_feature: MA Experiment 20000234 PARAMETER Experiment Name: At_Siliques_P Parameter: Tissue Value: Less Than 5mm Siliques vs. Whole Plant
  misc_feature: MA Experiment ID: 20000235 Result: Up-regulated in Transcription
  misc_feature: MA Experiment 20000235 PARAMETER Experiment Name: At_Siliques_P Parameter: Age (day) Value: 21
  misc_feature: MA Experiment 20000235 PARAMETER Experiment Name: At_Siliques_P Parameter: Organism Value: A. thaliana
  misc_feature: MA Experiment 20000235 PARAMETER Experiment Name: At_Siliques_P Parameter: Plant Line Value: WS
  misc_feature: MA Experiment 20000235 PARAMETER Experiment Name: At_Siliques_P Parameter: Tissue Value: 5-10mm Siliques vs. Whole Plant
  misc_feature: MA Experiment ID: 20000264 Result: Up-regulated in Transcription
  misc_feature: MA Experiment 20000264 PARAMETER Experiment Name: At_Open_Flower_P Parameter: Age (day) Value: 21
  misc_feature: MA Experiment 20000264 PARAMETER Experiment Name: At_Open_Flower_P Parameter: Plant Line Value: WS
  misc_feature: MA Experiment 20000264 PARAMETER Experiment Name: At_Open_Flower_P Parameter: Tissue Value: Open Flower vs. Whole Plant
  misc_feature: MA Experiment ID: 20000265 Result: Up-regulated in Transcription
  misc_feature: MA Experiment 20000265 PARAMETER Experiment Name: At_Open_Flower_P Parameter: Age (day) Value: 21
  misc_feature: MA Experiment 20000265 PARAMETER Experiment Name: At_Open_Flower_P Parameter: Plant Line Value: WS
  misc_feature: MA Experiment 20000265 PARAMETER Experiment Name: At_Open_Flower_P Parameter: Tissue Value: Closed Flower vs. Whole Plant
  misc_feature: MA Experiment ID: 20000267 Result: Up-regulated in Transcription
  misc_feature: MA Experiment 20000267 PARAMETER Experiment Name: At_Drought_P Parameter: Age (day) Value: 7
  misc_feature: MA Experiment 20000267 PARAMETER Experiment Name: At_Drought_P Parameter: Organism Value: A. thaliana
  misc_feature: MA Experiment 20000267 PARAMETER Experiment Name: At_Drought_P Parameter: Plant Line Value: WS
  misc_feature: MA Experiment 20000267 PARAMETER Experiment Name: At_Drought_P Parameter: Timepoint (hr) Value: 6
  misc_feature: MA Experiment 20000267 PARAMETER Experiment Name: At_Drought_P Parameter: Tissue Value: Whole Plant
  misc_feature: MA Experiment 20000267 PARAMETER Experiment Name: At_Drought_P Parameter: Treatment Value: Drought vs. No Drought
  misc_feature: MA Experiment ID: 20000286 Result: Up-regulated in Transcription
  misc_feature: MA Experiment 20000286 PARAMETER Experiment Name: At_Open_Flower_P Parameter: Age (day) Value: 21
  misc_feature: MA Experiment 20000286 PARAMETER Experiment Name: At_Open_Flower_P Parameter: Plant Line Value: WS
  misc_feature: MA Experiment 20000286 PARAMETER Experiment Name: At_Open_Flower_P Parameter: Tissue Value: Half Open vs. Whole Plant
  misc_feature: MA Experiment ID: 20000308 Result: Up-regulated in Transcription
  misc_feature: MA Experiment 20000308 PARAMETER Experiment Name: At_100mM_NaCl__P Parameter: Age (day) Value: 17
  misc_feature: MA Experiment 20000308 PARAMETER Experiment Name: At_100mM_NaCl__P Parameter: Organism Value: A. thaliana
  misc_feature: MA Experiment 20000308 PARAMETER Experiment Name: At_100mM_NaCl__P Parameter: Plant Line Value: WS
  misc_feature: MA Experiment 20000308 PARAMETER Experiment Name: At_100mM_NaCl__P Parameter: Timepoint (hr) Value: 72
  misc_feature: MA Experiment 20000308 PARAMETER Experiment Name: At_100mM_NaCl__P Parameter: Tissue Value: Whole Plant
  misc_feature: MA Experiment 20000308 PARAMETER Experiment Name: At_100mM_NaCl__P Parameter: Treatment Value: 100mM NaCl vs. No Treatment
  misc_feature: MA Experiment ID: 20000436 Result: Up-regulated in Transcription
  misc_feature: MA Experiment 20000436 PARAMETER Experiment Name: At_Drought_P Parameter: Age (day) Value: 7
  misc_feature: MA Experiment 20000436 PARAMETER Experiment Name: At_Drought_P Parameter: Organism Value: A. thaliana
  misc_feature: MA Experiment 20000436 PARAMETER Experiment Name: At_Drought_P Parameter: Plant Line Value: WS
  misc_feature: MA Experiment 20000436 PARAMETER Experiment Name: At_Drought_P Parameter: Timepoint (hr) Value: 12
  misc_feature: MA Experiment 20000436 PARAMETER Experiment Name: At_Drought_P Parameter: Tissue Value: Whole Plant
  misc_feature: MA Experiment 20000436 PARAMETER Experiment Name: At_Drought_P Parameter: Treatment Value: Drought vs. No Drought
  misc_feature: MA Experiment ID: 20000438 Result: Down-regulated in Transcription
  misc_feature: MA Experiment 20000438 PARAMETER Experiment Name: At_Shoots__P Parameter: Age (day) Value: 14
  misc_feature: MA Experiment 20000438 PARAMETER Experiment Name: At_Shoots__P Parameter: Tissue Value: Shoots vs. Whole Plant
  misc_feature: MA Experiment ID: 20000439 Result: Down-regulated in Transcription
  misc_feature: MA Experiment 20000439 PARAMETER Experiment Name: At_Roots__P Parameter: Age (day) Value: 14 vs. 21
  misc_feature: MA Experiment 20000439 PARAMETER Experiment Name: At_Roots__P Parameter: Organism Value: A. thaliana
  misc_feature: MA Experiment 20000439 PARAMETER Experiment Name: At_Roots__P Parameter: Tissue Value: Roots vs. Whole Plant
  misc_feature: MA Experiment ID: 20000441 Result: Down-regulated in Transcription
  misc_feature: MA Experiment 20000441 PARAMETER Experiment Name: At_1uM_BR-BRZ__P Parameter: Tissue Value: Shoot Apices
  misc_feature: MA Experiment 20000441 PARAMETER Experiment Name: At_1uM_BR-BRZ__P Parameter: Treatment Value: 1uM BR vs. No Treatment
  misc_feature: MA Experiment ID: 20000443 Result: Down-regulated in Transcription
  misc_feature: MA Experiment 20000443 PARAMETER Experiment Name: At_1uM_BR-BRZ__P Parameter: Tissue Value: Shoot Apices
  misc_feature: MA Experiment 20000443 PARAMETER Experiment Name: At_1uM_BR-BRZ__P Parameter: Treatment Value: 1uM BRZ vs. No Treatment
  misc_feature: MA Experiment ID: 20000451 Result: Up-regulated in Transcription
  misc_feature: MA Experiment 20000451 PARAMETER Experiment Name: At_CS6879_Shoots-Roots_P Parameter: Age (day) Value: 14
  misc_feature: MA Experiment 20000451 PARAMETER Experiment Name: At_CS6879_Shoots-Roots_P Parameter: Organism Value: A. thaliana
  misc_feature: MA Experiment 20000451 PARAMETER Experiment Name: At_CS6879_Shoots-Roots_P Parameter: Plant Line Value: CS6879 vs. WS
  misc_feature: MA Experiment 20000451 PARAMETER Experiment Name: At_CS6879_Shoots-Roots_P Parameter: Tissue Value: Roots
  misc_feature: MA Experiment ID: 20001556 Result: Up-regulated in Transcription
  misc_feature: MA Experiment 20001556 PARAMETER Experiment Name: At_Drought_Soil_Dry_P Parameter: Age (day) Value: 26
  misc_feature: MA Experiment 20001556 PARAMETER Experiment Name: At_Drought_Soil_Dry_P Parameter: Organism Value: A. thaliana
  misc_feature: MA Experiment 20001556 PARAMETER Experiment Name: At_Drought_Soil_Dry_P Parameter: Plant Line Value: WS
  misc_feature: MA Experiment 20001556 PARAMETER Experiment Name: At_Drought_Soil_Dry_P Parameter: Post Timepoint (hr) Value: None
  misc_feature: MA Experiment 20001556 PARAMETER Experiment Name: At_Drought_Soil_Dry_P Parameter: Post-Treatment Value: None
  misc_feature: MA Experiment 20001556 PARAMETER Experiment Name: At_Drought_Soil_Dry_P Parameter: Timepoint (day) Value: 12
  misc_feature: MA Experiment 20001556 PARAMETER Experiment Name: At_Drought_Soil_Dry_P Parameter: Treatment Value: Drought vs. No Drought
  misc_feature: MA Experiment ID: 20001557 Result: Up-regulated in Transcription
  misc_feature: MA Experiment 20001557 PARAMETER Experiment Name: At_Drought_Soil_Dry_P Parameter: Age (day) Value: 27
  misc_feature: MA Experiment 20001557 PARAMETER Experiment Name: At_Drought_Soil_Dry_P Parameter: Organism Value: A. thaliana
  misc_feature: MA Experiment 20001557 PARAMETER Experiment Name: At_Drought_Soil_Dry_P Parameter: Plant Line Value: WS
  misc_feature: MA Experiment 20001557 PARAMETER Experiment Name: At_Drought_Soil_Dry_P Parameter: Post Timepoint (hr) Value: 3
  misc_feature: MA Experiment 20001557 PARAMETER Experiment Name: At_Drought_Soil_Dry_P Parameter: Post-Treatment Value: Re-Water vs. No Drought
  misc_feature: MA Experiment 20001557 PARAMETER Experiment Name: At_Drought_Soil_Dry_P Parameter: Timepoint (day) Value: 13
  misc_feature: MA Experiment 20001557 PARAMETER Experiment Name: At_Drought_Soil_Dry_P Parameter: Treatment Value: Drought vs. No Drought
  misc_feature: MA Experiment ID: 20001757 Result: Down-regulated in Transcription
  misc_feature: MA Experiment 20001757 PARAMETER Experiment Name: At_50mM_NH4NO3_L-to-H_P Parameter: Timepoint (hr) Value: 6
  misc_feature: MA Experiment 20001757 PARAMETER Experiment Name: At_50mM_NH4NO3_L-to-H_P Parameter: Tissue Value: Leaf
  misc_feature: MA Experiment 20001757 PARAMETER Experiment Name: At_50mM_NH4NO3_L-to-H_P Parameter: Treatment Value: 50mM NH4NO3 vs 100mM Mannitol
accattcaaacccaacactatggcaactctatttctcacaatcctcctagccactgtcctcttcctcatcctccgtatcttctctcaccgtcgcaaccgcagccacaacaaccgtcttccaccggggccaaacccatggcccatcatcggaaacctccctcacatgggcactaagcctcatcgaaccctttccgccatggttactacttacggccctatcctccacctccgactagggttcgtagacgtcgtggtcgccgcttctaaatccgtggccgagcagttcttgaaaatacacgacgccaatttcgctagccgaccaccaaactcaggagctaaacacatggcatataactatcaagatcttgtctttgcaccttacggacaccgatggagactgttgagaaagattagttctgttcatctattttcagctaaagctctcgaagatttcaaacatgttcgacaggaagaggttggaacgctaacgcgggagctagtgcgtgttggcacgaaacccgtgaatttaggccagttggtgaacatgtgtgtagtcaacgctctaggacgagagatgatcggacggcgattgttcggcgccgacgccgatcataaagctgacgagtttcgatcaatggtgacggaaatgatggctctcgccggagtattcaacatcggagacttcgtgccgtcacttgattggttagatttacaaggcgtcgctggtaaaatgaaacggcttcacaagagattcgacgcttttctatcgtcgattttgaaagagcacgaaatgaacggtcaagatcaaaagcatacagatatgcttagcactttaatctcccttaaaggaactgatcttgacggtgacggaggaagcttaacggatactgagattaaagccttgctattgaacatgttcacagctggaactgacacgtcagcaagtacggtggactgggctatagctgaacttatccgtcacccggatataatggttaaagcccaagaagaacttgatattgttgtgggccgtgacaggcctgttaatgaatcagacatcgctcagcttccttaccttcaggcggttatcaaagagaatttcaggcttcatccaccaacaccactctcgttaccacacatcgcgtcagagagctgtgagatcaacggctaccatatcccgaaaggatcgactctattgacgaacatatgggccatagcccgtgacccggatcaatggtccgacccgttagcatttaaacccgagagattcttacccggtggtgaaaaatccggcgttgatgtgaaaggaagcgatttcgagctaataccgttcggagctgggaggagaatctgtgccggtttaagtttagggttacgtacgattcagtttcttacggcgacgttggttcaaggatttgattgggaattagctggaggagttacgccggagaagctgaatatggaggagagttatgggcttacactgcaaagagcggttcctttggtggtacatcctaagccaaggttggctccgaacgtttatggactcgggtcgggttaaaatttaactttgcttcttggacaaggtatatggcttgcacgaaaataaagttttaaaacagcgtagtttgatccggagttagctttatgtaagaacgtgtaacgccaaatcaagtcattattaaatattgtgagttgtttgtaacctatatataaatcttgaagaggaagatttcagaaatcttgaatatgttttaggaaaaacatttttttttttacagtagcgcaagttgaattaaaacctattccttacagtaccaaatgcattaaaaattct

SEQ ID NO: 44704 - protein, 519 aa, Arabidopsis thaliana
  peptide (1)..(519): Ceres Seq. ID no. 13509648
  misc_feature (40)..(504): Pfam Name: Cytochrome P450 Pfam Description: Cytochrome P450
  misc_feature (16)..(514): Homolog of NCBI NO: 12231914 NR Description: flavonoid 3'-hydroxylase [Pelargonium x hortorum]
  misc_feature (10)..(514): Homolog of NCBI NO: 12231880 NR Description: putative flavonoid 3'-hydroxylase [Callistephus
  misc_feature (7)..(514): Homolog of NCBI NO: 27151498 NR Description: Flavonoid 3'-monooxygenase (Flavonoid
  misc_feature (7)..(519): Homolog of NCBI NO: 12231886 NR Description: flavonoid 3'-hydroxylase [Matthiola incana]
  misc_feature (7)..(519): Homolog of NCBI NO: 15241483 NR Description: cytochrome P450 75A5 / flavonoid 3'-monooxygenase
PFKPNTMATLFLTILLATVLFLILRIFSHRRNRSHNNRLPPGPNPWPIIGNLPHMGTKPHRTLSAMVTTYGPILHLRLGFVDVVVAASKSVAEQFLKIHDANFASRPPNSGAKHMAYNYQDLVFAPYGHRWRLLRKISSVHLFSAKALEDFKHVRQEEVGTLTRELVRVGTKPVNLGQLVNMCVVNALGREMIGRRLFGADADHKADEFRSMVTEMMALAGVFNIGDFVPSLDWLDLQGVAGKMKRLHKRFDAFLSSILKEHEMNGQDQKHTDMLSTLISLKGTDLDGDGGSLTDTEIKALLLNMFTAGTDTSASTVDWAIAELIRHPDIMVKAQEELDIVVGRDRPVNESDIAQLPYLQAVIKENFRLHPPTPLSLPHIASESCEINGYHIPKGSTLLTNIWAIARDPDQWSDPLAFKPERFLPGGEKSGVDVKGSDFELIPFGAGRRICAGLSLGLRTIQFLTATLVQGFDWELAGGVTPEKLNMEESYGLTLQRAVPLVVHPKPRLAPNVYGLGSG

SEQ ID NO: 44705 - protein, 513 aa, Arabidopsis thaliana
  peptide (1)..(513): Ceres Seq. ID no. 13509649
  misc_feature (34)..(498): Pfam Name: Cytochrome P450 Pfam Description: Cytochrome P450
  misc_feature (10)..(508): Homolog of NCBI NO: 12231914 NR Description: flavonoid 3'-hydroxylase [Pelargonium x hortorum]
  misc_feature (4)..(508): Homolog of NCBI NO: 12231880 NR Description: putative flavonoid 3'-hydroxylase [Callistephus
  misc_feature (1)..(508): Homolog of NCBI NO: 27151498 NR Description: Flavonoid 3'-monooxygenase (Flavonoid
  misc_feature (1)..(513): Homolog of NCBI NO: 12231886 NR Description: flavonoid 3'-hydroxylase [Matthiola incana]
  misc_feature (1)..(513): Homolog of NCBI NO: 15241483 NR Description: cytochrome P450 75A5 / flavonoid 3'-monooxygenase
MATLFLTILLATVLFLILRIFSHRRNRSHNNRLPPGPNPWPIIGNLPHMGTKPHRTLSAMVTTYGPILHLRLGFVDVVVAASKSVAEQFLKIHDANFASRPPNSGAKHMAYNYQDLVFAPYGHRWRLLRKISSVHLFSAKALEDFKHVRQEEVGTLTRELVRVGTKPVNLGQLVNMCVVNALGREMIGRRLFGADADHKADEFRSMVTEMMALAGVFNIGDFVPSLDWLDLQGVAGKMKRLHKRFDAFLSSILKEHEMNGQDQKHTDMLSTLISLKGTDLDGDGGSLTDTEIKALLLNMFTAGTDTSASTVDWAIAELIRHPDIMVKAQEELDIVVGRDRPVNESDIAQLPYLQAVIKENFRLHPPTPLSLPHIASESCEINGYHIPKGSTLLTNIWAIARDPDQWSDPLAFKPERFLPGGEKSGVDVKGSDFELIPFGAGRRICAGLSLGLRTIQFLTATLVQGFDWELAGGVTPEKLNMEESYGLTLQRAVPLVVHPKPRLAPNVYGLGSG

SEQ ID NO: 44706 - protein, 465 aa, Arabidopsis thaliana
  peptide (1)..(465): Ceres Seq. ID no. 13509650
  misc_feature (1)..(450): Pfam Name: Cytochrome P450 Pfam Description: Cytochrome P450
  misc_feature (1)..(460): Homolog of NCBI NO: 12231914 NR Description: flavonoid 3'-hydroxylase [Pelargonium x hortorum]
  misc_feature (1)..(460): Homolog of NCBI NO: 12231880 NR Description: putative flavonoid 3'-hydroxylase [Callistephus
  misc_feature (1)..(460): Homolog of NCBI NO: 27151498 NR Description: Flavonoid 3'-monooxygenase (Flavonoid
  misc_feature (1)..(465): Homolog of NCBI NO: 12231886 NR Description: flavonoid 3'-hydroxylase [Matthiola incana]
  misc_feature (1)..(465): Homolog of NCBI NO: 15241483 NR Description: cytochrome P450 75A5 / flavonoid 3'-monooxygenase
MGTKPHRTLSAMVTTYGPILHLRLGFVDVVVAASKSVAEQFLKIHDANFASRPPNSGAKHMAYNYQDLVFAPYGHRWRLLRKISSVHLFSAKALEDFKHVRQEEVGTLTRELVRVGTKPVNLGQLVNMCVVNALGREMIGRRLFGADADHKADEFRSMVTEMMALAGVFNIGDFVPSLDWLDLQGVAGKMKRLHKRFDAFLSSILKEHEMNGQDQKHTDMLSTLISLKGTDLDGDGGSLTDTEIKALLLNMFTAGTDTSASTVDWAIAELIRHPDIMVKAQEELDIVVGRDRPVNESDIAQLPYLQAVIKENFRLHPPTPLSLPHIASESCEINGYHIPKGSTLLTNIWAIARDPDQWSDPLAFKPERFLPGGEKSGVDVKGSDFELIPFGAGRRICAGLSLGLRTIQFLTATLVQGFDWELAGGVTPEKLNMEESYGLTLQRAVPLVVHPKPRLAPNVYGLGSG

SEQ ID NO: 44707 - DNA, 2011 bp, Arabidopsis thaliana
  misc_feature (1)..(2011): Ceres Seq. ID no. 13509603
  misc_feature: MA Experiment ID: 20000184 Result: Down-regulated in Transcription
  misc_feature: MA Experiment 20000184 PARAMETER Experiment Name: At_Shoots__P Parameter: Age (day) Value: 7
  misc_feature: MA Experiment 20000184 PARAMETER Experiment Name: At_Shoots__P Parameter: Tissue Value: Shoots vs. Whole Plant
  misc_feature: MA Experiment ID: 20000265 Result: Down-regulated in Transcription
  misc_feature: MA Experiment 20000265 PARAMETER Experiment Name: At_Open_Flower_P Parameter: Age (day) Value: 21
  misc_feature: MA Experiment 20000265 PARAMETER Experiment Name: At_Open_Flower_P Parameter: Plant Line Value: WS
  misc_feature: MA Experiment 20000265 PARAMETER Experiment Name: At_Open_Flower_P Parameter: Tissue Value: Closed Flower vs. Whole Plant
  misc_feature: MA Experiment ID: 20001247 Result: Up-regulated in Transcription
  misc_feature: MA Experiment 20001247 PARAMETER Experiment Name: At_Far-red-induction_P Parameter: Age (day) Value: 7
  misc_feature: MA Experiment 20001247 PARAMETER Experiment Name: At_Far-red-induction_P Parameter: Light Value: Far-red vs. White
  misc_feature: MA Experiment 20001247 PARAMETER Experiment Name: At_Far-red-induction_P Parameter: Organism Value: A. thaliana
  misc_feature: MA Experiment 20001247 PARAMETER Experiment Name: At_Far-red-induction_P Parameter: Plant Line Value: Columbia
  misc_feature: MA Experiment 20001247 PARAMETER Experiment Name: At_Far-red-induction_P Parameter: Timepoint (hr) Value: 1
  misc_feature: MA Experiment 20001247 PARAMETER Experiment Name: At_Far-red-induction_P Parameter: Tissue Value: Whole Plant
  misc_feature: MA Experiment ID: 20001557 Result: Up-regulated in Transcription
  misc_feature: MA Experiment 20001557 PARAMETER Experiment Name: At_Drought_Soil_Dry_P Parameter: Age (day) Value: 27
  misc_feature: MA Experiment 20001557 PARAMETER Experiment Name: At_Drought_Soil_Dry_P Parameter: Organism Value: A. thaliana
  misc_feature: MA Experiment 20001557 PARAMETER Experiment Name: At_Drought_Soil_Dry_P Parameter: Plant Line Value: WS
  misc_feature: MA Experiment 20001557 PARAMETER Experiment Name: At_Drought_Soil_Dry_P Parameter: Post Timepoint (hr) Value: 3
  misc_feature: MA Experiment 20001557 PARAMETER Experiment Name: At_Drought_Soil_Dry_P Parameter: Post-Treatment Value: Re-Water vs. No Drought
  misc_feature: MA Experiment 20001557 PARAMETER Experiment Name: At_Drought_Soil_Dry_P Parameter: Timepoint (day) Value: 13
  misc_feature: MA Experiment 20001557 PARAMETER Experiment Name: At_Drought_Soil_Dry_P Parameter: Treatment Value: Drought vs. No Drought
  misc_feature: MA Experiment ID: 20001558 Result: Up-regulated in Transcription
  misc_feature: MA Experiment 20001558 PARAMETER Experiment Name: At_Drought_Soil_Dry_P Parameter: Age (day) Value: 27
  misc_feature: MA Experiment 20001558 PARAMETER Experiment Name: At_Drought_Soil_Dry_P Parameter: Organism Value: A. thaliana
  misc_feature: MA Experiment 20001558 PARAMETER Experiment Name: At_Drought_Soil_Dry_P Parameter: Plant Line Value: WS
  misc_feature: MA Experiment 20001558 PARAMETER Experiment Name: At_Drought_Soil_Dry_P Parameter: Post Timepoint (hr) Value: 6
  misc_feature: MA Experiment 20001558 PARAMETER Experiment Name: At_Drought_Soil_Dry_P Parameter: Post-Treatment Value: Re-Water vs. No Drought
  misc_feature: MA Experiment 20001558 PARAMETER Experiment Name: At_Drought_Soil_Dry_P Parameter: Timepoint (day) Value: 13
  misc_feature: MA Experiment 20001558 PARAMETER Experiment Name: At_Drought_Soil_Dry_P Parameter: Treatment Value: Drought vs. No Drought
  misc_feature: MA Experiment ID: 20001560 Result: Up-regulated in Transcription
  misc_feature: MA Experiment 20001560 PARAMETER Experiment Name: At_Drought_Soil_Dry_P Parameter: Age (day) Value: 28
  misc_feature: MA Experiment 20001560 PARAMETER Experiment Name: At_Drought_Soil_Dry_P Parameter: Organism Value: A. thaliana
  misc_feature: MA Experiment 20001560 PARAMETER Experiment Name: At_Drought_Soil_Dry_P Parameter: Plant Line Value: WS
  misc_feature: MA Experiment 20001560 PARAMETER Experiment Name: At_Drought_Soil_Dry_P Parameter: Post Timepoint (hr) Value: None
  misc_feature: MA Experiment 20001560 PARAMETER Experiment Name: At_Drought_Soil_Dry_P Parameter: Post-Treatment Value: None
  misc_feature: MA Experiment 20001560 PARAMETER Experiment Name: At_Drought_Soil_Dry_P Parameter: Timepoint (day) Value: 14
  misc_feature: MA Experiment 20001560 PARAMETER Experiment Name: At_Drought_Soil_Dry_P Parameter: Treatment Value: Drought vs. No Drought
  misc_feature: MA Experiment ID: 20001906 Result: Down-regulated in Transcription
  misc_feature: MA Experiment 20001906 PARAMETER Experiment Name: At_Drought_Reproduction_P Parameter: Age (day) Value: 35
  misc_feature: MA Experiment 20001906 PARAMETER Experiment Name: At_Drought_Reproduction_P Parameter: Organism Value: A. thaliana
  misc_feature: MA Experiment 20001906 PARAMETER Experiment Name: At_Drought_Reproduction_P Parameter: Plant Line Value: WS
  misc_feature: MA Experiment 20001906 PARAMETER Experiment Name: At_Drought_Reproduction_P Parameter: Timepoint (day) Value: 5
  misc_feature: MA Experiment 20001906 PARAMETER Experiment Name: At_Drought_Reproduction_P Parameter: Tissue Value: Siliques
  misc_feature: MA Experiment 20001906 PARAMETER Experiment Name: At_Drought_Reproduction_P Parameter: Treatment Value: Drought vs. No Drought
gatctcgtttcagtgactcctgcaaaccgtccactccatgtggattgcacaaaaagttctataaagaaaatatagcttttagactttggtcctagattcaactaatctctttttctatttcttctgtgttcttctctgaagcttccattgtgtaggacttatgctcttttctcctacttagggaaagtgcattaattcgtatctatctaggcacagagattgttgataacttatcgtactttaaatggaaaattctatgaacaacagaggacatggacacaatcaagaacatgcagacaacttgccagaatcaaagagacagaagcttcctgctttggcaagtgtcatagtggaagctgtcaaggtagatagtctgcagaggctatgctcgtctttggaaccattatttcgaagaattgtcagtgaagaggtggaacgtgccatatcaaggttggagaactcgaaatctacttcaagatctacagaaccgaataagattcaaggcctcgatggaagaaatctgcaacttcggttcagaacacgaatgcctcctcatttattcacaggtgggaaagtcgagggagagcaaggctcagccattcacgtggttcttatagatgcaaacaccggaaatgtaatccaaacaggagaagaatcaatgacaaagctgaatattgtcgtgttagatggagacttcaatgatgaagacgacaaagattggacgagagaacattttgagagctttgaagtgaaggaacgcgaaggaaaacgtcccatcttgactggtgacagacatgtgataattaaagaaggtgtaggaactcttggaaaacttactttcactgacaattcgagctggattaggagcagaaagtttagacttggtgttaagcctgcaacgggatttcacatccgtgaagctaaaacagaaccatttgctgttaaagatcacagaggagaactatacaagaaacattatccaccggttttacatgatgaagtctggagattggataaaatagcgaaagatggagcgctacacaagaagctactaaaatctaacattgtgactgttgaagacttcctacagatactcatgaaggatccgcagaaactaagaagcttacttgggagtggaatgtcaaatagaatgtgggataacacggtagagcacgcaaagacttgtgtcttaggtgggaaactttacgcctattacacagatcaaacacaccagacagctgttgtctttaatcatatatatgaatttcaaggcctaattgccaatggccacttcttgtcttcggaatctcttaaccatgaccaaaagatttctgcagacactttggtgaagactgcttacgagaactggcataaagtggttgagtatggcggtaagctcttgaattgcttaccagttgctaagaagggaataaaaagcttgccagagccaaaaatggctcagaaccatcaaacgcagcagaaggctctgcaatgccaacagactgtgaatggctactcatcagatcctcagcatctgatagagtatccttttgtccaacaaccttgctatcagttacgagactacacatcgatggagagttcttcagtttcaggctcatataatggaggccttgaagatattttcacggaggaaattcgagcgaggagttctgagatgctcgagacggataacatgcagagattgctcaagacatttgggatatcaggcgggtttggtaacagggatgagtccatttacggtttcagtgatcagtacgaagctcagatagacaagggttatatgagagaaggaggtagaggcgcagggaaagctgtagtgggatggcttaagctcaaagctgcattgagatggggtatctttatacgcaagaaagctgcagagaggaggcctcaaattgtggagatcgactaagaaagtactacaaaaaaattccgagagcttttcttttgtataaataaacttgaagcaattacttttttaaagagaatc

SEQ ID NO: 44708 - protein, 562 aa, Arabidopsis thaliana
  peptide (1)..(562): Ceres Seq. ID no. 13509604
  misc_feature (59)..(428): Homolog of NCBI NO: 25354646 NR Description: probable calmodulin-binding protein
  misc_feature (465)..(561): Homolog of NCBI NO: 30687005 NR Description: calmodulin-binding protein [Arabidopsis thaliana]
  misc_feature (14)..(387): Homolog of NCBI NO: 30687005 NR Description: calmodulin-binding protein [Arabidopsis thaliana]
  misc_feature (285)..(562): Homolog of NCBI NO: 17065560 NR Description: putative calmodulin-binding protein [Arabidopsis
  misc_feature (384)..(562): Homolog of NCBI NO: 15242785 NR Description: calmodulin-binding protein [Arabidopsis thaliana]
  misc_feature (3)..(426): Homolog of NCBI NO: 15242785 NR Description: calmodulin-binding protein [Arabidopsis thaliana]
  misc_feature (462)..(562): Homolog of NCBI NO: 15224117 NR Description: calmodulin-binding protein [Arabidopsis thaliana]
  misc_feature (101)..(444): Homolog of NCBI NO: 15224117 NR Description: calmodulin-binding protein [Arabidopsis thaliana]
  misc_feature (105)..(562): Homolog of NCBI NO: 25354643 NR Description: probable calmodulin-binding protein
  misc_feature (1)..(562): Homolog of NCBI NO: 22329041 NR Description: calmodulin-binding protein [Arabidopsis thaliana]
MENSMNNRGHGHNQEHADNLPESKRQKLPALASVIVEAVKVDSLQRLCSSLEPLFRRIVSEEVERAISRLENSKSTSRSTEPNKIQGLDGRNLQLRFRTRMPPHLFTGGKVEGEQGSAIHVVLIDANTGNVIQTGEESMTKLNIVVLDGDFNDEDDKDWTREHFESFEVKEREGKRPILTGDRHVIIKEGVGTLGKLTFTDNSSWIRSRKFRLGVKPATGFHIREAKTEPFAVKDHRGELYKKHYPPVLHDEVWRLDKIAKDGALHKKLLKSNIVTVEDFLQILMKDPQKLRSLLGSGMSNRMWDNTVEHAKTCVLGGKLYAYYTDQTHQTAVVFNHIYEFQGLIANGHFLSSESLNHDQKISADTLVKTAYENWHKVVEYGGKLLNCLPVAKKGIKSLPEPKMAQNHQTQQKALQCQQTVNGYSSDPQHLIEYPFVQQPCYQLRDYTSMESSSVSGSYNGGLEDIFTEEIRARSSEMLETDNMQRLLKTFGISGGFGNRDESIYGFSDQYEAQIDKGYMREGGRGAGKAVVGWLKLKAALRWGIFIRKKAAERRPQIVEID

SEQ ID NO: 44709 - protein, 558 aa, Arabidopsis thaliana
  peptide (1)..(558): Ceres Seq. ID no. 13509605
  misc_feature (55)..(424): Homolog of NCBI NO: 25354646 NR Description: probable calmodulin-binding protein
  misc_feature (461)..(557): Homolog of NCBI NO: 30687005 NR Description: calmodulin-binding protein [Arabidopsis thaliana]
  misc_feature (10)..(383): Homolog of NCBI NO: 30687005 NR Description: calmodulin-binding protein [Arabidopsis thaliana]
  misc_feature (281)..(558): Homolog of NCBI NO: 17065560 NR Description: putative calmodulin-binding protein [Arabidopsis
  misc_feature (380)..(558): Homolog of NCBI NO: 15242785 NR Description: calmodulin-binding protein [Arabidopsis thaliana]
  misc_feature (1)..(422): Homolog of NCBI NO: 15242785 NR Description: calmodulin-binding protein [Arabidopsis thaliana]
  misc_feature (458)..(558): Homolog of NCBI NO: 15224117 NR Description: calmodulin-binding protein [Arabidopsis thaliana]
  misc_feature (97)..(440): Homolog of NCBI NO: 15224117 NR Description: calmodulin-binding protein [Arabidopsis thaliana]
  misc_feature (101)..(558): Homolog of NCBI NO: 25354643 NR Description: probable calmodulin-binding protein
  misc_feature (1)..(558): Homolog of NCBI NO: 22329041 NR Description: calmodulin-binding protein [Arabidopsis thaliana]
MNNRGHGHNQEHADNLPESKRQKLPALASVIVEAVKVDSLQRLCSSLEPLFRRIVSEEVERAISRLENSKSTSRSTEPNKIQGLDGRNLQLRFRTRMPPHLFTGGKVEGEQGSAIHVVLIDANTGNVIQTGEESMTKLNIVVLDGDFNDEDDKDWTREHFESFEVKEREGKRPILTGDRHVIIKEGVGTLGKLTFTDNSSWIRSRKFRLGVKPATGFHIREAKTEPFAVKDHRGELYKKHYPPVLHDEVWRLDKIAKDGALHKKLLKSNIVTVEDFLQILMKDPQKLRSLLGSGMSNRMWDNTVEHAKTCVLGGKLYAYYTDQTHQTAVVFNHIYEFQGLIANGHFLSSESLNHDQKISADTLVKTAYENWHKVVEYGGKLLNCLPVAKKGIKSLPEPKMAQNHQTQQKALQCQQTVNGYSSDPQHLIEYPFVQQPCYQLRDYTSMESSSVSGSYNGGLEDIFTEEIRARSSEMLETDNMQRLLKTFGISGGFGNRDESIYGFSDQYEAQIDKGYMREGGRGAGKAVVGWLKLKAALRWGIFIRKKAAERRPQIVEID

SEQ ID NO: 44710 - protein, 462 aa, Arabidopsis thaliana
  peptide (1)..(462): Ceres Seq. ID no. 13509606
  misc_feature (1)..(328): Homolog of NCBI NO: 25354646 NR Description: probable calmodulin-binding protein
  misc_feature (365)..(461): Homolog of NCBI NO: 30687005 NR Description: calmodulin-binding protein [Arabidopsis thaliana]
  misc_feature (1)..(287): Homolog of NCBI NO: 30687005 NR Description: calmodulin-binding protein [Arabidopsis thaliana]
  misc_feature (185)..(462): Homolog of NCBI NO: 17065560 NR Description: putative calmodulin-binding protein [Arabidopsis
  misc_feature (284)..(462): Homolog of NCBI NO: 15242785 NR Description: calmodulin-binding protein [Arabidopsis thaliana]
  misc_feature (1)..(326): Homolog of NCBI NO: 15242785 NR Description: calmodulin-binding protein [Arabidopsis thaliana]
  misc_feature (362)..(462): Homolog of NCBI NO: 15224117 NR Description: calmodulin-binding protein [Arabidopsis thaliana]
  misc_feature (1)..(344): Homolog of NCBI NO: 15224117 NR Description: calmodulin-binding protein [Arabidopsis thaliana]
  misc_feature (5)..(462): Homolog of NCBI NO: 25354643 NR Description: probable calmodulin-binding protein
  misc_feature (1)..(462): Homolog of NCBI NO: 22329041 NR Description: calmodulin-binding protein [Arabidopsis thaliana]
MPPHLFTGGKVEGEQGSAIHVVLIDANTGNVIQTGEESMTKLNIVVLDGDFNDEDDKDWTREHFESFEVKEREGKRPILTGDRHVIIKEGVGTLGKLTFTDNSSWIRSRKFRLGVKPATGFHIREAKTEPFAVKDHRGELYKKHYPPVLHDEVWRLDKIAKDGALHKKLLKSNIVTVEDFLQILMKDPQKLRSLLGSGMSNRMWDNTVEHAKTCVLGGKLYAYYTDQTHQTAVVFNHIYEFQGLIANGHFLSSESLNHDQKISADTLVKTAYENWHKVVEYGGKLLNCLPVAKKGIKSLPEPKMAQNHQTQQKALQCQQTVNGYSSDPQHLIEYPFVQQPCYQLRDYTSMESSSVSGSYNGGLEDIFTEEIRARSSEMLETDNMQRLLKTFGISGGFGNRDESIYGFSDQYEAQIDKGYMREGGRGAGKAVVGWLKLKAALRWGIFIRKKAAERRPQIVEID

SEQ ID NO: 44711 - DNA, 763 bp, Arabidopsis thaliana
  misc_feature (1)..(763): Ceres Seq. ID no. 13646298
  misc_feature: MA Experiment ID: 20000171 Result: Down-regulated in Transcription
  misc_feature: MA Experiment 20000171 PARAMETER Experiment Name: At_42deg_Heat_P Parameter: Age (day) Value: 14
  misc_feature: MA Experiment 20000171 PARAMETER Experiment Name: At_42deg_Heat_P Parameter: Organism Value: A. thaliana
  misc_feature: MA Experiment 20000171 PARAMETER Experiment Name: At_42deg_Heat_P Parameter: Plant Line Value: WS
  misc_feature: MA Experiment 20000171 PARAMETER Experiment Name: At_42deg_Heat_P Parameter: Temperature (deg C) Value: 42 vs. 22
  misc_feature: MA Experiment 20000171 PARAMETER Experiment Name: At_42deg_Heat_P Parameter: Timepoint (hr) Value: 1
  misc_feature: MA Experiment 20000171 PARAMETER Experiment Name: At_42deg_Heat_P Parameter: Tissue Value: Aerial
  misc_feature: MA Experiment ID: 20000173 Result: Down-regulated in Transcription
  misc_feature: MA Experiment 20000173 PARAMETER Experiment Name: At_42deg_Heat_P Parameter: Age (day) Value: 14
  misc_feature: MA Experiment 20000173 PARAMETER Experiment Name: At_42deg_Heat_P Parameter: Organism Value: A. thaliana
  misc_feature: MA Experiment 20000173 PARAMETER Experiment Name: At_42deg_Heat_P Parameter: Plant Line Value: WS
  misc_feature: MA Experiment 20000173 PARAMETER Experiment Name: At_42deg_Heat_P Parameter: Temperature (deg C) Value: 42 vs. 22
  misc_feature: MA Experiment 20000173 PARAMETER Experiment Name: At_42deg_Heat_P Parameter: Timepoint (hr) Value: 6
  misc_feature: MA Experiment 20000173 PARAMETER Experiment Name: At_42deg_Heat_P Parameter: Tissue Value: Aerial
  misc_feature: MA Experiment ID: 20000437 Result: Down-regulated in Transcription
  misc_feature: MA Experiment 20000437 PARAMETER Experiment Name: At_Drought_P Parameter: Age (day) Value: 8
  misc_feature: MA Experiment 20000437 PARAMETER Experiment Name: At_Drought_P Parameter: Organism Value: A. thaliana
  misc_feature: MA Experiment 20000437 PARAMETER Experiment Name: At_Drought_P Parameter: Plant Line Value: WS
  misc_feature: MA Experiment 20000437 PARAMETER Experiment Name: At_Drought_P Parameter: Timepoint (hr) Value: 24
  misc_feature: MA Experiment 20000437 PARAMETER Experiment Name: At_Drought_P Parameter: Tissue Value: Whole Plant
  misc_feature: MA Experiment 20000437 PARAMETER Experiment Name: At_Drought_P Parameter: Treatment Value: Drought vs. No Drought
  misc_feature: MA Experiment ID: 20001248 Result: Up-regulated in Transcription
  misc_feature: MA Experiment 20001248 PARAMETER Experiment Name: At_Far-red-induction_P Parameter: Age (day) Value: 7
  misc_feature: MA Experiment 20001248 PARAMETER Experiment Name: At_Far-red-induction_P Parameter: Light Value: Far-red vs. White
  misc_feature: MA Experiment 20001248 PARAMETER Experiment Name: At_Far-red-induction_P Parameter: Organism Value: A. thaliana
  misc_feature: MA Experiment 20001248 PARAMETER Experiment Name: At_Far-red-induction_P Parameter: Plant Line Value: Columbia
  misc_feature: MA Experiment 20001248 PARAMETER Experiment Name: At_Far-red-induction_P Parameter: Timepoint (hr) Value: 4
  misc_feature: MA Experiment 20001248 PARAMETER Experiment Name: At_Far-red-induction_P Parameter: Tissue Value: Whole Plant
  misc_feature: MA Experiment ID: 20001451 Result: Up-regulated in Transcription
  misc_feature: MA Experiment 20001451 PARAMETER Experiment Name: At_Far-red-induction_P Parameter: Age (day) Value: 7
  misc_feature: MA Experiment 20001451 PARAMETER Experiment Name: At_Far-red-induction_P Parameter: Light Value: Far-red vs. White
  misc_feature: MA Experiment 20001451 PARAMETER Experiment Name: At_Far-red-induction_P Parameter: Organism Value: A. thaliana
  misc_feature: MA Experiment 20001451 PARAMETER Experiment Name: At_Far-red-induction_P Parameter: Plant Line Value: Columbia
  misc_feature: MA Experiment 20001451 PARAMETER Experiment Name: At_Far-red-induction_P Parameter: Timepoint (hr) Value: 24
  misc_feature: MA Experiment 20001451 PARAMETER Experiment Name: At_Far-red-induction_P Parameter: Tissue Value: Whole Plant
atagacagacacacccaaaccctagatctaaccccagccgtcagatcagattgatcgggcaatcgcttctagaccgttggaatcaagcaatggtagagcagcggtacgaggatggctctcgtctcgtcgccgggtgtattccgtttaggtatgtaaattctgacaaagatggtaattctgaatctgggaaagtgattcaagtgttgatgatcagctcgtctagtggaccgggacttttgtttcccaagggaggatgggagaatgatgagacagtcagggaggctgcagcgagggaagcagtggaagaagcaggagtccgtgggattcttatggattttttggggaattatgagttcaagagcaaatcacaccaagatgagtttagcccagaaggtttatgtaaagcggcaatgtacgcgttgtatgtgaaagaagagctagcgacgtggccggaacatgagacgagaacacggaaatggctgacaattgaagaagcggtagagagttgcagtcacccttggatgaaggacgcattggtggaaggattctgtaaatggcataaggagaagatggttaaaggagaggagataactggtgaacattgaagcaaatgtgcataaacctctgagcgttggtttcattcctttcgattttgtttttacctttttgtttttgtttttgaagtcttatgcatggataatctcttgtgactgcgaaacgtaatagtttcgaagatttaaagttcaattattgccctattttc

SEQ ID NO: 44712 - protein, 200 aa, Arabidopsis thaliana
  peptide (1)..(200): Ceres Seq. ID no. 13646299
  misc_feature (39)..(186): Pfam Name: NUDIX domain Pfam Description: NUDIX domain
  misc_feature (7)..(182): Homolog of NCBI NO: 25367539 NR Description: unknown protein [imported] - Arabidopsis thaliana
  misc_feature (7)..(182): Homolog of NCBI NO: 22330598 NR Description: MutT/nudix family protein [Arabidopsis thaliana]
  misc_feature (41)..(178): Homolog of NCBI NO: 31747031 NR Description: MutT-like protein [Cucumis sativus]
  misc_feature (5)..(182): Homolog of NCBI NO: 15221055 NR Description: MutT/nudix family protein [Arabidopsis thaliana]
  misc_feature (33)..(200): Homolog of NCBI NO: 15231598 NR Description: MutT/nudix family protein [Arabidopsis thaliana]
  misc_feature (33)..(200): Homolog of NCBI NO: 25518008 NR Description: F13K23.14 protein - Arabidopsis thaliana
  misc_feature (33)..(200): Homolog of NCBI NO: 18391450 NR Description: MutT/nudix family protein [Arabidopsis thaliana]
  misc_feature (32)..(195): Homolog of NCBI NO: 34900054 NR Description: MutT-like protein~contains ESTs
  misc_feature (32)..(195): Homolog of NCBI NO: 38175436 NR Description: MutT-like protein [Oryza sativa (japonica
  misc_feature (31)..(200): Homolog of NCBI NO: 18399682 NR Description: MutT/nudix family protein [Arabidopsis thaliana]
RQTHPNPRSNPSRQIRLIGQSLLDRWNQAMVEQRYEDGSRLVAGCIPFRYVNSDKDGNSESGKVIQVLMISSSSGPGLLFPKGGWENDETVREAAAREAVEEAGVRGILMDFLGNYEFKSKSHQDEFSPEGLCKAAMYALYVKEELATWPEHETRTRKWLTIEEAVESCSHPWMKDALVEGFCKWHKEKMVKGEEITGEH

SEQ ID NO: 44713 - protein, 171 aa, Arabidopsis thaliana
  peptide (1)..(171): Ceres Seq. ID no. 13646300
  misc_feature (10)..(157): Pfam Name: NUDIX domain Pfam Description: NUDIX domain
  misc_feature (1)..(153): Homolog of NCBI NO: 25367539 NR Description: unknown protein [imported] - Arabidopsis thaliana
  misc_feature (1)..(153): Homolog of NCBI NO: 22330598 NR Description: MutT/nudix family protein [Arabidopsis thaliana]
  misc_feature (12)..(149): Homolog of NCBI NO: 31747031 NR Description: MutT-like protein [Cucumis sativus]
  misc_feature (1)..(153): Homolog of NCBI NO: 15221055 NR Description: MutT/nudix family protein [Arabidopsis thaliana]
  misc_feature (4)..(171): Homolog of NCBI NO: 15231598 NR Description: MutT/nudix family protein [Arabidopsis thaliana]
  misc_feature (4)..(171): Homolog of NCBI NO: 25518008 NR Description: F13K23.14 protein - Arabidopsis thaliana
  misc_feature (4)..(171): Homolog of NCBI NO: 18391450 NR Description: MutT/nudix family protein [Arabidopsis thaliana]
  misc_feature (3)..(166): Homolog of NCBI NO: 34900054 NR Description: MutT-like protein~contains ESTs
  misc_feature (3)..(166): Homolog of NCBI NO: 38175436 NR Description: MutT-like protein [Oryza sativa (japonica
  misc_feature (2)..(171): Homolog of NCBI NO: 18399682 NR Description: MutT/nudix family protein [Arabidopsis thaliana]
MVEQRYEDGSRLVAGCIPFRYVNSDKDGNSESGKVIQVLMISSSSGPGLLFPKGGWENDETVREAAAREAVEEAGVRGILMDFLGNYEFKSKSHQDEFSPEGLCKAAMYALYVKEELATWPEHETRTRKWLTIEEAVESCSHPWMKDALVEGFCKWHKEKMVKGEEITGEH

SEQ ID NO: 44714 - protein, 132 aa, Arabidopsis thaliana
  peptide (1)..(132): Ceres Seq. ID no. 13646301
  misc_feature (1)..(118): Pfam Name: NUDIX domain Pfam Description: NUDIX domain
  misc_feature (1)..(114): Homolog of NCBI NO: 25367539 NR Description: unknown protein [imported] - Arabidopsis thaliana
  misc_feature (1)..(114): Homolog of NCBI NO: 22330598 NR Description: MutT/nudix family protein [Arabidopsis thaliana]
  misc_feature (1)..(110): Homolog of NCBI NO: 31747031 NR Description: MutT-like protein [Cucumis sativus]
  misc_feature (1)..(114): Homolog of NCBI NO: 15221055 NR Description: MutT/nudix family protein [Arabidopsis thaliana]
  misc_feature (1)..(132): Homolog of NCBI NO: 15231598 NR Description: MutT/nudix family protein [Arabidopsis thaliana]
  misc_feature (1)..(132): Homolog of NCBI NO: 25518008 NR Description: F13K23.14 protein - Arabidopsis thaliana
  misc_feature (1)..(132): Homolog of NCBI NO: 18391450 NR Description: MutT/nudix family protein [Arabidopsis thaliana]
  misc_feature (1)..(127): Homolog of NCBI NO: 34900054 NR Description: MutT-like protein~contains ESTs
  misc_feature (1)..(127): Homolog of NCBI NO: 38175436 NR Description: MutT-like protein [Oryza sativa (japonica
  misc_feature (1)..(132): Homolog of NCBI NO: 18399682 NR Description: MutT/nudix family protein [Arabidopsis thaliana]
MISSSSGPGLLFPKGGWENDETVREAAAREAVEEAGVRGILMDFLGNYEFKSKSHQDEFSPEGLCKAAMYALYVKEELATWPEHETRTRKWLTIEEAVESCSHPWMKDALVEGFCKWHKEKMVKGEEITGEH

SEQ ID NO: 44715 - DNA, 1606 bp, Arabidopsis thaliana
  misc_feature (1)..(1606): Ceres Seq. ID no. 12488577
  misc_feature: MA Experiment ID: 20000166 Result: Up-regulated in Transcription
  misc_feature: MA Experiment 20000166 PARAMETER Experiment Name: At_100uM_ABA_P Parameter: Age (day) Value: 14
  misc_feature: MA Experiment 20000166 PARAMETER Experiment Name: At_100uM_ABA_P Parameter: Organism Value: A. thaliana
  misc_feature: MA Experiment 20000166 PARAMETER Experiment Name: At_100uM_ABA_P Parameter: Plant Line Value: WS
  misc_feature: MA Experiment 20000166 PARAMETER Experiment Name: At_100uM_ABA_P Parameter: Timepoint (hr) Value: 1
  misc_feature: MA Experiment 20000166 PARAMETER Experiment Name: At_100uM_ABA_P Parameter: Tissue Value: Aerial
  misc_feature: MA Experiment 20000166 PARAMETER Experiment Name: At_100uM_ABA_P Parameter: Treatment Value: 100uM ABA vs. No Treatment
  misc_feature: MA Experiment ID: 20000169 Result: Up-regulated in Transcription
  misc_feature: MA Experiment 20000169 PARAMETER Experiment Name: At_100uM_ABA_P Parameter: Age (day) Value: 14
  misc_feature: MA Experiment 20000169 PARAMETER Experiment Name: At_100uM_ABA_P Parameter: Organism Value: A. thaliana
  misc_feature: MA Experiment 20000169 PARAMETER Experiment Name: At_100uM_ABA_P Parameter: Plant Line Value: WS
  misc_feature: MA Experiment 20000169 PARAMETER Experiment Name: At_100uM_ABA_P Parameter: Timepoint (hr) Value: 6
  misc_feature: MA Experiment 20000169 PARAMETER Experiment Name: At_100uM_ABA_P Parameter: Tissue Value: Aerial
  misc_feature: MA Experiment 20000169 PARAMETER Experiment Name: At_100uM_ABA_P Parameter: Treatment Value: 100uM ABA vs. No Treatment
  misc_feature: MA Experiment ID: 20000180 Result: Down-regulated in Transcription
  misc_feature: MA Experiment 20000180 PARAMETER Experiment Name: At_Germinating_Seeds_P Parameter: Age (hr) Value: 24 vs. 0
  misc_feature: MA Experiment 20000180 PARAMETER Experiment Name: At_Germinating_Seeds_P Parameter: Tissue Value: Germinating Seeds
  misc_feature: MA Experiment ID: 20000185 Result: Down-regulated in Transcription
  misc_feature: MA Experiment 20000185 PARAMETER Experiment Name: At_Roots__P Parameter: Age (day) Value: 7 vs. 21
  misc_feature: MA Experiment 20000185 PARAMETER Experiment Name: At_Roots__P Parameter: Organism Value: A. thaliana
  misc_feature: MA Experiment 20000185 PARAMETER Experiment Name: At_Roots__P Parameter: Tissue Value: Roots vs. Whole Plant
  misc_feature: MA Experiment ID: 20000234 Result: Down-regulated in Transcription
  misc_feature: MA Experiment 20000234 PARAMETER Experiment Name: At_Siliques_P Parameter: Age (day) Value: 21
  misc_feature: MA Experiment 20000234 PARAMETER Experiment Name: At_Siliques_P Parameter: Organism Value: A. thaliana
  misc_feature: MA Experiment 20000234 PARAMETER Experiment Name: At_Siliques_P Parameter: Plant Line Value: WS
  misc_feature: MA Experiment 20000234 PARAMETER Experiment Name: At_Siliques_P Parameter: Tissue Value: Less Than 5mm Siliques vs. Whole Plant
  misc_feature: MA Experiment ID: 20000267 Result: Up-regulated in Transcription
  misc_feature: MA Experiment 20000267 PARAMETER Experiment Name: At_Drought_P Parameter: Age (day) Value: 7
  misc_feature: MA Experiment 20000267 PARAMETER Experiment Name: At_Drought_P Parameter: Organism Value: A. thaliana
  misc_feature: MA Experiment 20000267 PARAMETER Experiment Name: At_Drought_P Parameter: Plant Line Value: WS
  misc_feature: MA Experiment 20000267 PARAMETER Experiment Name: At_Drought_P Parameter: Timepoint (hr) Value: 6
  misc_feature: MA Experiment 20000267 PARAMETER Experiment Name: At_Drought_P Parameter: Tissue Value: Whole Plant
  misc_feature: MA Experiment 20000267 PARAMETER Experiment Name: At_Drought_P Parameter: Treatment Value: Drought vs. No Drought
  misc_feature: MA Experiment ID: 20000268 Result: Up-regulated in Transcription
  misc_feature: MA Experiment 20000268 PARAMETER Experiment Name: At_100mM_NaCl__P Parameter: Age (day) Value: 14
  misc_feature: MA Experiment 20000268 PARAMETER Experiment Name: At_100mM_NaCl__P Parameter: Organism Value: A. thaliana
  misc_feature: MA Experiment 20000268 PARAMETER Experiment Name: At_100mM_NaCl__P Parameter: Plant Line Value: WS
  misc_feature: MA Experiment 20000268 PARAMETER Experiment Name: At_100mM_NaCl__P Parameter: Timepoint (hr) Value: 6
  misc_feature: MA Experiment 20000268 PARAMETER Experiment Name: At_100mM_NaCl__P Parameter: Tissue Value: Whole Plant
  misc_feature: MA Experiment 20000268 PARAMETER Experiment Name: At_100mM_NaCl__P Parameter: Treatment Value: 100mM NaCl vs. No Treatment
  misc_feature: MA Experiment ID: 20000436 Result: Up-regulated in Transcription
  misc_feature: MA Experiment 20000436 PARAMETER Experiment Name: At_Drought_P Parameter: Age (day) Value: 7
  misc_feature: MA Experiment 20000436 PARAMETER Experiment Name: At_Drought_P Parameter: Organism Value: A. thaliana
  misc_feature: MA Experiment 20000436 PARAMETER Experiment Name: At_Drought_P Parameter: Plant Line Value: WS
  misc_feature: MA Experiment 20000436 PARAMETER Experiment Name: At_Drought_P Parameter: Timepoint (hr) Value: 12
  misc_feature: MA Experiment 20000436 PARAMETER Experiment Name: At_Drought_P Parameter: Tissue Value: Whole Plant
  misc_feature: MA Experiment 20000436 PARAMETER Experiment Name: At_Drought_P Parameter: Treatment Value: Drought vs. No Drought
  misc_feature: MA Experiment ID: 20000437 Result: Up-regulated in Transcription
  misc_feature: MA Experiment 20000437 PARAMETER Experiment Name: At_Drought_P Parameter: Age (day) Value: 8
  misc_feature: MA Experiment 20000437 PARAMETER Experiment Name: At_Drought_P Parameter: Organism Value: A. thaliana
  misc_feature: MA Experiment 20000437 PARAMETER Experiment Name: At_Drought_P Parameter: Plant Line Value: WS
  misc_feature: MA Experiment 20000437 PARAMETER Experiment Name: At_Drought_P Parameter: Timepoint (hr) Value: 24
  misc_feature: MA Experiment 20000437 PARAMETER Experiment Name: At_Drought_P Parameter: Tissue Value: Whole Plant
  misc_feature: MA Experiment 20000437 PARAMETER Experiment Name: At_Drought_P Parameter: Treatment Value: Drought vs. No Drought
  misc_feature: MA Experiment ID: 20000439 Result: Down-regulated in Transcription
  misc_feature: MA Experiment 20000439 PARAMETER Experiment Name: At_Roots__P Parameter: Age (day) Value: 14 vs. 21
  misc_feature: MA Experiment 20000439 PARAMETER Experiment Name: At_Roots__P Parameter: Organism Value: A. thaliana
  misc_feature: MA Experiment 20000439 PARAMETER Experiment Name: At_Roots__P Parameter: Tissue Value: Roots vs. Whole Plant
  misc_feature: MA Experiment ID: 20000453 Result: Up-regulated in Transcription
  misc_feature: MA Experiment 20000453 PARAMETER Experiment Name: At_100uM_ABA_P Parameter: Age (day) Value: 15
  misc_feature: MA Experiment 20000453 PARAMETER Experiment Name: At_100uM_ABA_P Parameter: Organism Value: A. thaliana
  misc_feature: MA Experiment 20000453 PARAMETER Experiment Name: At_100uM_ABA_P Parameter: Plant Line Value: WS
  misc_feature: MA Experiment 20000453 PARAMETER Experiment Name: At_100uM_ABA_P Parameter: Timepoint (hr) Value: 24
  misc_feature: MA Experiment 20000453 PARAMETER Experiment Name: At_100uM_ABA_P Parameter: Tissue Value: Aerial
  misc_feature: MA Experiment 20000453 PARAMETER Experiment Name: At_100uM_ABA_P Parameter: Treatment Value: 100uM ABA vs. No Treatment
  misc_feature: MA Experiment ID: 20000455 Result: Up-regulated in Transcription
  misc_feature: MA Experiment 20000455 PARAMETER Experiment Name: At_100uM_ABA_P Parameter: Age (day) Value: 16
  misc_feature: MA Experiment 20000455 PARAMETER Experiment Name: At_100uM_ABA_P Parameter: Organism Value: A. thaliana
  misc_feature: MA Experiment 20000455 PARAMETER Experiment Name: At_100uM_ABA_P Parameter: Plant Line Value: WS
  misc_feature: MA Experiment 20000455 PARAMETER Experiment Name: At_100uM_ABA_P Parameter: Timepoint (hr) Value: 48
  misc_feature: MA Experiment 20000455 PARAMETER Experiment Name: At_100uM_ABA_P Parameter: Tissue Value: Aerial
  misc_feature: MA Experiment 20000455 PARAMETER Experiment Name: At_100uM_ABA_P Parameter: Treatment Value: 100uM ABA vs. No Treatment
  misc_feature: MA Experiment ID: 20000573 Result: Down-regulated in Transcription
  misc_feature: MA Experiment 20000573 PARAMETER Experiment Name: At_100uM_ABA_Mutants__P Parameter: Organism Value: A. thaliana
  misc_feature: MA Experiment 20000573 PARAMETER Experiment Name: At_100uM_ABA_Mutants__P Parameter: Plant Line Value: CS22 vs. Ler wt
  misc_feature: MA Experiment 20000573 PARAMETER Experiment Name: At_100uM_ABA_Mutants__P Parameter: Timepoint (hr) Value: N/A
  misc_feature: MA Experiment 20000573 PARAMETER Experiment Name: At_100uM_ABA_Mutants__P Parameter: Tissue Value: Whole Plant
  misc_feature: MA Experiment 20000573 PARAMETER Experiment Name: At_100uM_ABA_Mutants__P Parameter: Treatment Value: None
  misc_feature: MA Experiment ID: 20000574 Result: Down-regulated in Transcription
  misc_feature: MA Experiment 20000574 PARAMETER Experiment Name: At_100uM_ABA_Mutants__P Parameter: Organism Value: A. thaliana
  misc_feature: MA Experiment 20000574 PARAMETER Experiment Name: At_100uM_ABA_Mutants__P Parameter: Plant Line Value: CS23 vs. Ler wt
  misc_feature: MA Experiment 20000574 PARAMETER Experiment Name: At_100uM_ABA_Mutants__P Parameter: Timepoint (hr) Value: N/A
  misc_feature: MA Experiment 20000574 PARAMETER Experiment Name: At_100uM_ABA_Mutants__P Parameter: Tissue Value: Whole Plant
  misc_feature: MA Experiment 20000574 PARAMETER Experiment Name: At_100uM_ABA_Mutants__P Parameter: Treatment Value: None
  misc_feature: MA Experiment ID: 20000575 Result: Up-regulated in Transcription
  misc_feature: MA Experiment 20000575 PARAMETER Experiment Name: At_100uM_ABA_Mutants__P Parameter: Organism Value: A. thaliana
  misc_feature: MA Experiment 20000575 PARAMETER Experiment Name: At_100uM_ABA_Mutants__P Parameter: Plant Line Value: CS22
  misc_feature: MA Experiment 20000575 PARAMETER Experiment Name: At_100uM_ABA_Mutants__P Parameter: Timepoint (hr) Value: 6
  misc_feature: MA Experiment 20000575 PARAMETER Experiment Name: At_100uM_ABA_Mutants__P Parameter: Tissue Value: Whole Plant
  misc_feature: MA Experiment 20000575 PARAMETER Experiment Name: At_100uM_ABA_Mutants__P Parameter: Treatment Value: 1uM ABA vs. No Treatment
  misc_feature: MA Experiment ID: 20000576 Result: Up-regulated in Transcription
  misc_feature: MA Experiment 20000576 PARAMETER Experiment Name: At_100uM_ABA_Mutants__P Parameter: Organism Value: A. thaliana
  misc_feature: MA Experiment 20000576 PARAMETER Experiment Name: At_100uM_ABA_Mutants__P Parameter: Plant Line Value: CS23
  misc_feature: MA Experiment 20000576 PARAMETER Experiment Name: At_100uM_ABA_Mutants__P Parameter: Timepoint (hr) Value: 6
  misc_feature: MA Experiment 20000576 PARAMETER Experiment Name: At_100uM_ABA_Mutants__P Parameter: Tissue Value: Whole Plant
  misc_feature: MA Experiment 20000576 PARAMETER Experiment Name: At_100uM_ABA_Mutants__P Parameter: Treatment Value: 1uM ABA vs. No Treatment
  misc_feature: MA Experiment ID: 20001248 Result: Down-regulated in Transcription
  misc_feature: MA Experiment 20001248 PARAMETER Experiment Name: At_Far-red-induction_P Parameter: Age (day) Value: 7
  misc_feature: MA Experiment 20001248 PARAMETER Experiment Name: At_Far-red-induction_P Parameter: Light Value: Far-red vs. White
  misc_feature: MA Experiment 20001248 PARAMETER Experiment Name: At_Far-red-induction_P Parameter: Organism Value: A. thaliana
  misc_feature: MA Experiment 20001248 PARAMETER Experiment Name: At_Far-red-induction_P Parameter: Plant Line Value: Columbia
  misc_feature: MA Experiment 20001248 PARAMETER Experiment Name: At_Far-red-induction_P Parameter: Timepoint (hr) Value: 4
  misc_feature: MA Experiment 20001248 PARAMETER Experiment Name: At_Far-red-induction_P Parameter: Tissue Value: Whole Plant
  misc_feature: MA Experiment ID: 20001554 Result: Up-regulated in Transcription
  misc_feature: MA Experiment 20001554 PARAMETER Experiment Name: At_Drought_Soil_Dry_P Parameter: Age (day) Value: 21
  misc_feature: MA Experiment 20001554 PARAMETER Experiment Name: At_Drought_Soil_Dry_P Parameter: Organism Value: A. thaliana
  misc_feature: MA Experiment 20001554 PARAMETER Experiment Name: At_Drought_Soil_Dry_P Parameter: Plant Line Value: WS
  misc_feature: MA Experiment 20001554 PARAMETER Experiment Name: At_Drought_Soil_Dry_P Parameter: Post Timepoint (hr) Value: None
  misc_feature: MA Experiment 20001554 PARAMETER Experiment Name: At_Drought_Soil_Dry_P Parameter: Post-Treatment Value: None
  misc_feature: MA Experiment 20001554 PARAMETER Experiment Name: At_Drought_Soil_Dry_P Parameter: Timepoint (day) Value: 7
  misc_feature: MA Experiment 20001554 PARAMETER Experiment Name: At_Drought_Soil_Dry_P Parameter: Treatment Value: Drought vs. No Drought
  misc_feature: MA Experiment ID: 20001555 Result: Up-regulated in Transcription
  misc_feature: MA Experiment 20001555 PARAMETER Experiment Name: At_Drought_Soil_Dry_P Parameter: Age (day) Value: 24
  misc_feature: MA Experiment 20001555 PARAMETER Experiment Name: At_Drought_Soil_Dry_P Parameter: Organism Value: A. thaliana
  misc_feature: MA Experiment 20001555 PARAMETER Experiment Name: At_Drought_Soil_Dry_P Parameter: Plant Line Value: WS
  misc_feature: MA Experiment 20001555 PARAMETER Experiment Name: At_Drought_Soil_Dry_P Parameter: Post Timepoint (hr) Value: None
  misc_feature: MA Experiment 20001555 PARAMETER Experiment Name: At_Drought_Soil_Dry_P Parameter: Post-Treatment Value: None
  misc_feature: MA Experiment 20001555 PARAMETER Experiment Name: At_Drought_Soil_Dry_P Parameter: Timepoint (day) Value: 10
  misc_feature: MA Experiment 20001555 PARAMETER Experiment Name: At_Drought_Soil_Dry_P Parameter: Treatment Value: Drought vs. No Drought
  misc_feature: MA Experiment ID: 20001559 Result: Up-regulated in Transcription
  misc_feature: MA Experiment 20001559 PARAMETER Experiment Name: At_Drought_Soil_Dry_P Parameter: Age (day) Value: 28
  misc_feature: MA Experiment 20001559 PARAMETER Experiment Name: At_Drought_Soil_Dry_P Parameter: Organism Value: A. thaliana
  misc_feature: MA Experiment 20001559 PARAMETER Experiment Name: At_Drought_Soil_Dry_P Parameter: Plant Line Value: WS
  misc_feature: MA Experiment 20001559 PARAMETER Experiment Name: At_Drought_Soil_Dry_P Parameter: Post Timepoint (hr) Value: 29
  misc_feature: MA Experiment 20001559 PARAMETER Experiment Name: At_Drought_Soil_Dry_P Parameter: Post-Treatment Value: Re-Water vs. No Drought
  misc_feature: MA Experiment 20001559 PARAMETER Experiment Name: At_Drought_Soil_Dry_P Parameter: Timepoint (day) Value: 14
  misc_feature: MA Experiment 20001559 PARAMETER Experiment Name: At_Drought_Soil_Dry_P Parameter: Treatment Value: Drought vs. No Drought
  misc_feature: MA Experiment ID: 20001904 Result: Up-regulated in Transcription
  misc_feature: MA Experiment 20001904 PARAMETER Experiment Name: At_Drought_Reproduction_P Parameter: Age (day) Value: 37
  misc_feature: MA Experiment 20001904 PARAMETER Experiment Name: At_Drought_Reproduction_P Parameter: Organism Value: A. thaliana
  misc_feature: MA Experiment 20001904 PARAMETER Experiment Name: At_Drought_Reproduction_P Parameter: Plant Line Value: WS
  misc_feature: MA Experiment 20001904 PARAMETER Experiment Name: At_Drought_Reproduction_P Parameter: Timepoint (day) Value: 7
  misc_feature: MA Experiment 20001904 PARAMETER Experiment Name: At_Drought_Reproduction_P Parameter: Tissue Value: Rosettes
  misc_feature: MA Experiment 20001904 PARAMETER Experiment Name: At_Drought_Reproduction_P Parameter: Treatment Value: Drought vs. No Drought
  misc_feature: MA Experiment ID: 20001905 Result: Up-regulated in Transcription
  misc_feature: MA Experiment 20001905 PARAMETER Experiment Name: At_Drought_Reproduction_P Parameter: Age (day) Value: 40
  misc_feature: MA Experiment 20001905 PARAMETER Experiment Name: At_Drought_Reproduction_P Parameter: Organism Value: A. thaliana
  misc_feature: MA Experiment 20001905 PARAMETER Experiment Name: At_Drought_Reproduction_P Parameter: Plant Line Value: WS
  misc_feature: MA Experiment 20001905 PARAMETER Experiment Name: At_Drought_Reproduction_P Parameter: Timepoint (day) Value: 10
  misc_feature: MA Experiment 20001905 PARAMETER Experiment Name: At_Drought_Reproduction_P Parameter: Tissue Value: Rosettes
  misc_feature: MA Experiment 20001905 PARAMETER Experiment Name: At_Drought_Reproduction_P Parameter: Treatment Value: Drought vs. No Drought
  misc_feature: MA Experiment ID: 20001910 Result: Up-regulated in Transcription
  misc_feature: MA Experiment 20001910 PARAMETER Experiment Name: At_Drought_Reproduction_P Parameter: Age (day) Value: 37
  misc_feature: MA Experiment 20001910 PARAMETER Experiment Name: At_Drought_Reproduction_P Parameter: Organism Value: A. thaliana
  misc_feature: MA Experiment 20001910 PARAMETER Experiment Name: At_Drought_Reproduction_P Parameter: Plant Line Value: WS
  misc_feature: MA Experiment 20001910 PARAMETER Experiment Name: At_Drought_Reproduction_P Parameter: Timepoint (day) Value: 7
  misc_feature: MA Experiment 20001910 PARAMETER Experiment Name: At_Drought_Reproduction_P Parameter: Tissue Value: Flowers
  misc_feature: MA Experiment 20001910 PARAMETER Experiment Name: At_Drought_Reproduction_P Parameter: Treatment Value: Drought vs. No Drought
  misc_feature: MA Experiment ID: 20001911 Result: Up-regulated in Transcription
  misc_feature: MA Experiment 20001911 PARAMETER Experiment Name: At_Drought_Reproduction_P Parameter: Age (day) Value: 40
  misc_feature: MA Experiment 20001911 PARAMETER Experiment Name: At_Drought_Reproduction_P Parameter: Organism Value: A. thaliana
  misc_feature: MA Experiment 20001911 PARAMETER Experiment Name: At_Drought_Reproduction_P Parameter: Plant Line Value: WS
  misc_feature: MA Experiment 20001911 PARAMETER Experiment Name: At_Drought_Reproduction_P Parameter: Timepoint (day) Value: 10
  misc_feature: MA Experiment 20001911 PARAMETER Experiment Name: At_Drought_Reproduction_P Parameter: Tissue Value: Flowers
  misc_feature: MA Experiment 20001911 PARAMETER Experiment Name: At_Drought_Reproduction_P Parameter: Treatment Value: Drought vs. No Drought
attgcatttcctaacgctcaacaaaatctctctctactaatatctctctctctctctctctattgttgaagaagactcataatcggagattgtttgtttttggtttgctctgtaaattggagaagttttgttagagatcaaatggctgggatttgttgcggtgttgttggagagactgaaccggcggcaccggttgattcaacttctcgagcttctcttagacggaggttagatctacttccgtcgatcaaaattgttgctgactccgccgttgctcctccgcttgaaaactgccgtaaacggcagaagcgtgagacagtagtgctctcgacgttaccgggaaatctagatctggattcgaatgtgaggagtgagaataagaaggctagatcagcggttacgaattcaaattctgttacggaagcagagagtttcttttccgatgtacctaagatcggtacgacgtcggtttgtggtagaagacgagacatggaagacgctgtctcgattcatccttcgtttcttcaacggaactctgagaatcatcatttctacggtgtctttgacggccatggctgctctcatgttgcggagaagtgcagagaacggttgcatgatatagtgaagaaggaagttgaagttatggcttccgacgagtggacagagacgatggttaagagttttcaaaaaatggataaagaagttagccaacgagagtgtaacttagttgttaatggtgctactcggagtatgaaaaattcttgtagatgtgaattgcagtctcctcagtgtgacgccgtcggatccaccgctgttgtatcggttgtcacgccggagaagatcattgtttctaattgcggtgattcacgggctgtgctttgtcgtaacggtgtagccattcctctctccgtagatcacaagccggatcgacccgatgaattgattcggatccaacaagctggtgggcgagttatatattgggatggagctagggttcttggagttcttgccatgtctagagcaattggtgataattacttgaaaccgtatgtgattccggatccggaggtaacagtgacggatcgaactgatgaggatgagtgtttgatcttggcgagtgatggactatgggatgttgtaccaaacgagacggcgtgtggcgtggctcgcatgtgccttcgaggtgctggtgcgggtgacgactcagatgcggcgcacaatgcgtgctccgatgcggcgttgctcttaacaaagttggctctagcaagacagagctccgataacgtgagcgtcgttgtggttgacttgaggaagaggaggaataatcaagcgtcgtcttaataattagtgttataattagtagtagtattagaataattgttacatagcctaattgtaattgtattctttttatttttctattttagtttttctcattttaaggtgttttttcttttctattttagttagctcttaattcaggctggggaagaaaaagagctgattaaatagtttgagtatttttcttatttttctattcaggtaatattatacatgtattcttttagtatgctcgttggaaatgtaataatctaattcagagggt

SEQ ID NO: 44716 - protein, 399 aa, Arabidopsis thaliana
  peptide (1)..(399): Ceres Seq. ID no. 12488578
  misc_feature (103)..(382): Pfam Name: Protein phosphatase 2C Pfam Description: Protein phosphatase 2C
  misc_feature (70)..(352): Homolog of NCBI NO: 21537020 NR Description: protein phosphatase 2C, putative [Arabidopsis
  misc_feature (346)..(391): Homolog of NCBI NO: 16226419 NR Description: AT5g59220/mnc17_110 [Arabidopsis thaliana]
  misc_feature (20)..(357): Homolog of NCBI NO: 16226419 NR Description: AT5g59220/mnc17_110 [Arabidopsis thaliana]
  misc_feature (352)..(398): Homolog of NCBI NO: 15222398 NR Description: protein phosphatase 2C (PP2C), putative
  misc_feature (70)..(352): Homolog of NCBI NO: 15222398 NR Description: protein phosphatase 2C (PP2C), putative
  misc_feature (1)..(347): Homolog of NCBI NO: 10432448 NR Description: protein phosphatase 2C [Nicotiana tabacum]
  misc_feature (27)..(391): Homolog of NCBI NO: 33309516 NR Description: protein phosphatase 2C [Prunus avium]
  misc_feature (1)..(391): Homolog of NCBI NO: 10432446 NR Description: protein phosphatase 2C [Nicotiana tabacum]
  misc_feature (1)..(396): Homolog of NCBI NO: 7768151 NR Description: protein phpsphatase 2C (PP2C) [Fagus sylvatica]
  misc_feature (1)..(399): Homolog of NCBI NO: 15229745 NR Description: protein phosphatase 2C (PP2C)
MAGICCGVVGETEPAAPVDSTSRASLRRRLDLLPSIKIVADSAVAPPLENCRKRQKRETVVLSTLPGNLDLDSNVRSENKKARSAVTNSNSVTEAESFFSDVPKIGTTSVCGRRRDMEDAVSIHPSFLQRNSENHHFYGVFDGHGCSHVAEKCRERLHDIVKKEVEVMASDEWTETMVKSFQKMDKEVSQRECNLVVNGATRSMKNSCRCELQSPQCDAVGSTAVVSVVTPEKIIVSNCGDSRAVLCRNGVAIPLSVDHKPDRPDELIRIQQAGGRVIYWDGARVLGVLAMSRAIGDNYLKPYVIPDPEVTVTDRTDEDECLILASDGLWDVVPNETACGVARMCLRGAGAGDDSDAAHNACSDAALLLTKLALARQSSDNVSVVVVDLRKRRNNQASS

SEQ ID NO: 44717 - protein, 283 aa, Arabidopsis thaliana
  peptide (1)..(283): Ceres Seq. ID no. 12488579
  misc_feature (1)..(266): Pfam Name: Protein phosphatase 2C Pfam Description: Protein phosphatase 2C
  misc_feature (1)..(236): Homolog of NCBI NO: 21537020 NR Description: protein phosphatase 2C, putative [Arabidopsis
  misc_feature (230)..(275): Homolog of NCBI NO: 16226419 NR Description: AT5g59220/mnc17_110 [Arabidopsis thaliana]
  misc_feature (1)..(241): Homolog of NCBI NO: 16226419 NR Description: AT5g59220/mnc17_110 [Arabidopsis thaliana]
  misc_feature (236)..(282): Homolog of NCBI NO: 15222398 NR Description: protein phosphatase 2C (PP2C), putative
  misc_feature (1)..(236): Homolog of NCBI NO: 15222398 NR Description: protein phosphatase 2C (PP2C), putative
  misc_feature (1)..(231): Homolog of NCBI NO: 10432448 NR Description: protein phosphatase 2C [Nicotiana tabacum]
  misc_feature (1)..(275): Homolog of NCBI NO: 33309516 NR Description: protein phosphatase 2C [Prunus avium]
  misc_feature (1)..(275): Homolog of NCBI NO: 10432446 NR Description: protein phosphatase 2C [Nicotiana tabacum]
  misc_feature (1)..(280): Homolog of NCBI NO: 7768151 NR Description: protein phpsphatase 2C (PP2C) [Fagus sylvatica]
  misc_feature (1)..(283): Homolog of NCBI NO: 15229745 NR Description: protein phosphatase 2C (PP2C)
MEDAVSIHPSFLQRNSENHHFYGVFDGHGCSHVAEKCRERLHDIVKKEVEVMASDEWTETMVKSFQKMDKEVSQRECNLVVNGATRSMKNSCRCELQSPQCDAVGSTAVVSVVTPEKIIVSNCGDSRAVLCRNGVAIPLSVDHKPDRPDELIRIQQAGGRVIYWDGARVLGVLAMSRAIGDNYLKPYVIPDPEVTVTDRTDEDECLILASDGLWDVVPNETACGVARMCLRGAGAGDDSDAAHNACSDAALLLTKLALARQSSDNVSVVVVDLRKRRNNQASS

SEQ ID NO: 44718 - protein, 232 aa, Arabidopsis thaliana
  peptide (1)..(232): Ceres Seq. ID no. 12488580
  misc_feature (1)..(215): Pfam Name: Protein phosphatase 2C Pfam Description: Protein phosphatase 2C
  misc_feature (1)..(185): Homolog of NCBI NO: 21537020 NR Description: protein phosphatase 2C, putative [Arabidopsis
  misc_feature (179)..(224): Homolog of NCBI NO: 16226419 NR Description: AT5g59220/mnc17_110 [Arabidopsis thaliana]
  misc_feature (1)..(190): Homolog of NCBI NO: 16226419 NR Description: AT5g59220/mnc17_110 [Arabidopsis thaliana]
  misc_feature (185)..(231): Homolog of NCBI NO: 15222398 NR Description: protein phosphatase 2C (PP2C), putative
  misc_feature (1)..(185): Homolog of NCBI NO: 15222398 NR Description: protein phosphatase 2C (PP2C), putative
  misc_feature (1)..(180): Homolog of NCBI NO: 10432448 NR Description: protein phosphatase 2C [Nicotiana tabacum]
  misc_feature (1)..(224): Homolog of NCBI NO: 33309516 NR Description: protein phosphatase 2C [Prunus avium]
  misc_feature (1)..(224): Homolog of NCBI NO: 10432446 NR Description: protein phosphatase 2C [Nicotiana tabacum]
  misc_feature (1)..(229): Homolog of NCBI NO: 7768151 NR Description: protein phpsphatase 2C (PP2C) [Fagus sylvatica]
  misc_feature (1)..(232): Homolog of NCBI NO: 15229745 NR Description: protein phosphatase 2C (PP2C)
MASDEWTETMVKSFQKMDKEVSQRECNLVVNGATRSMKNSCRCELQSPQCDAVGSTAVVSVVTPEKIIVSNCGDSRAVLCRNGVAIPLSVDHKPDRPDELIRIQQAGGRVIYWDGARVLGVLAMSRAIGDNYLKPYVIPDPEVTVTDRTDEDECLILASDGLWDVVPNETACGVARMCLRGAGAGDDSDAAHNACSDAALLLTKLALARQSSDNVSVVVVDLRKRRNNQASS

SEQ ID NO: 44719 - DNA, 1034 bp, Arabidopsis thaliana
  misc_feature (1)..(1034): Ceres Seq. ID no. 15178402
  misc_feature: MA Experiment ID: 20000227 Result: Up-regulated in Transcription
  misc_feature: MA Experiment 20000227 PARAMETER Experiment Name: At_Root-Tips-vs-Tops_P Parameter: Tissue Value: Root Tips vs. Root Tops
  misc_feature: MA Experiment ID: 20000495 Result: Up-regulated in Transcription
  misc_feature: MA Experiment 20000495 PARAMETER Experiment Name: At_Guard_Cells_P Parameter: Harvest Date Value: 8/2/2002
  misc_feature: MA Experiment 20000495 PARAMETER Experiment Name: At_Guard_Cells_P Parameter: Organism Value: A. thaliana
  misc_feature: MA Experiment 20000495 PARAMETER Experiment Name: At_Guard_Cells_P Parameter: Tissue Value: Guard Cells vs. Leaves
  misc_feature: MA Experiment ID: 20000794 Result: Down-regulated in Transcription
  misc_feature: MA Experiment 20000794 PARAMETER Experiment Name: At_Petals_P Parameter: Age (day) Value: 23-25 days
  misc_feature: MA Experiment 20000794 PARAMETER Experiment Name: At_Petals_P Parameter: Plant Line Value: WS
  misc_feature: MA Experiment 20000794 PARAMETER Experiment Name: At_Petals_P Parameter: Tissue Value: Petals vs. Whole plant
  misc_feature: MA Experiment ID: 20001458 Result: Up-regulated in Transcription
  misc_feature: MA Experiment 20001458 PARAMETER Experiment Name: At_50mM_NH4NO3_L-to-H_P Parameter: Age (day) Value: Undefined
  misc_feature: MA Experiment 20001458 PARAMETER Experiment Name: At_50mM_NH4NO3_L-to-H_P Parameter: Organism Value: Undefined
  misc_feature: MA Experiment 20001458 PARAMETER Experiment Name: At_50mM_NH4NO3_L-to-H_P Parameter: Plant Line Value: Undefined
  misc_feature: MA Experiment 20001458 PARAMETER Experiment Name: At_50mM_NH4NO3_L-to-H_P Parameter: Timepoint (hr) Value: 2
  misc_feature: MA Experiment 20001458 PARAMETER Experiment Name: At_50mM_NH4NO3_L-to-H_P Parameter: Tissue Value: Siliques
  misc_feature: MA Experiment 20001458 PARAMETER Experiment Name: At_50mM_NH4NO3_L-to-H_P Parameter: Treatment Value: 50mM NH4NO3 vs. 100mM Manitol
  misc_feature: MA Experiment ID: 20001558 Result: Up-regulated in Transcription
  misc_feature: MA Experiment 20001558 PARAMETER Experiment Name: At_Drought_Soil_Dry_P Parameter: Age (day) Value: 27
  misc_feature: MA Experiment 20001558 PARAMETER Experiment Name: At_Drought_Soil_Dry_P Parameter: Organism Value: A. thaliana
  misc_feature: MA Experiment 20001558 PARAMETER Experiment Name: At_Drought_Soil_Dry_P Parameter: Plant Line Value: WS
  misc_feature: MA Experiment 20001558 PARAMETER Experiment Name: At_Drought_Soil_Dry_P Parameter: Post Timepoint (hr) Value: 6
  misc_feature: MA Experiment 20001558 PARAMETER Experiment Name: At_Drought_Soil_Dry_P Parameter: Post-Treatment Value: Re-Water vs. No Drought
  misc_feature: MA Experiment 20001558 PARAMETER Experiment Name: At_Drought_Soil_Dry_P Parameter: Timepoint (day) Value: 13
  misc_feature: MA Experiment 20001558 PARAMETER Experiment Name: At_Drought_Soil_Dry_P Parameter: Treatment Value: Drought vs. No Drought
  misc_feature: MA Experiment ID: 20001757 Result: Up-regulated in Transcription
  misc_feature: MA Experiment 20001757 PARAMETER Experiment Name: At_50mM_NH4NO3_L-to-H_P Parameter: Timepoint (hr) Value: 6
  misc_feature: MA Experiment 20001757 PARAMETER Experiment Name: At_50mM_NH4NO3_L-to-H_P Parameter: Tissue Value: Leaf
  misc_feature: MA Experiment 20001757 PARAMETER Experiment Name: At_50mM_NH4NO3_L-to-H_P Parameter: Treatment Value: 50mM NH4NO3 vs 100mM Mannitol
aaatgaaaagccagtgaattagggctttctctcacttgttgaagccgcttcttcttcttcctcactgtagctcgtcgtcgctacaccatctagaagacccttaaccatggctgtcgggaagaacaagaggatttcaaagggtaggaaaggaggaaagaagaaggctgttgatcccttctccaagaaggattggtatgacgtgaaggctcctggttctttcacgaacaggaatgttgggaagactcttgtttccaggactcagggtaccaagattgcctctgagggactgaaacacagggtgtttgaggtttctcttgctgatctacaaaatgatgaggataatgcctacaggaagatccgtcttagagctgaagatgttcagggaaggaatgtgttgacccagttctggggtatggatttcacaaccgacaagctaaggtcattggtgaagaagtggcagactttgattgaagcccatgtcgatgtgaaaaccacagacggctacaccttgaggatgttctgcatcgccttcacaaagagacgtgctaaccaagtgaagcgtacctgttacgctcaatccagccaaatccgtcagatccgcagaaagatgagtgagattatggtgaaggaggcttcatcttgtgacctcaaggagctagtggccaagttcatcccagaggccattggaagaaagattgagaaggcaacacagggcatctacccgttgcagaatgtgttcatccgtaaagtgaagatcctaaaggctcccaagtttgaccttggaaagctcatggaggtgcatggagattacacagcagaggatgttggtgtgaaggtagacaggccagctgatgagacaatggttgaggagccaacagaaatcatcggagcttaggggattatagatttgtttgttttttcgctggcaaaaaaaaaaaaaagaacctaatgttatgtcgccattggtgtgactggttttggactcgtttttgatggatgatctttattgtttatcatgttttaccttttttatt

SEQ ID NO: 44720 - protein, 262 aa, Arabidopsis thaliana
  peptide (1)..(262): Ceres Seq. ID no. 15178403
  misc_feature (11)..(222): Pfam Name: Ribosomal S3Ae family Pfam Description: Ribosomal S3Ae family
  misc_feature (1)..(239): Homolog of NCBI NO: 1856971 NR Description: This gene is specifically expressed at the S during the cell cycle in the synchronous culture of periwinkle
  misc_feature (1)..(255): Homolog of NCBI NO: 7441116 NR Description: ribosomal protein S3a, cytosolic - rice
  misc_feature (1)..(252): Homolog of NCBI NO: 1350986 NR Description: 40S RIBOSOMAL PROTEIN S3A (CYC07 PROTEIN)
  misc_feature (1)..(262): Homolog of NCBI NO: 1350983 NR Description: 40S RIBOSOMAL PROTEIN S3A (CYC07 PROTEIN)
  misc_feature (1)..(262): Homolog of NCBI NO: 1350984 NR Description: 40S RIBOSOMAL PROTEIN S3A
  misc_feature (1)..(262): Homolog of NCBI NO: 24817254 NR Description: ribosomal protein S3a [Cicer arietinum]
  misc_feature (1)..(262): Homolog of NCBI NO: 6714564 NR Description: cyc07 [Daucus carota]
  misc_feature (1)..(262): Homolog of NCBI NO: 1350981 NR Description: 40S RIBOSOMAL PROTEIN S3A (S PHASE SPECIFIC
  misc_feature (1)..(262): Homolog of NCBI NO: 15229364 NR Description: 40S ribosomal protein S3A (RPS3aA) [Arabidopsis
  misc_feature (1)..(262): Homolog of NCBI NO: 15236171 NR Description: 40S ribosomal protein S3A (RPS3aB) [Arabidopsis
MAVGKNKRISKGRKGGKKKAVDPFSKKDWYDVKAPGSFTNRNVGKTLVSRTQGTKIASEGLKHRVFEVSLADLQNDEDNAYRKIRLRAEDVQGRNVLTQFWGMDFTTDKLRSLVKKWQTLIEAHVDVKTTDGYTLRMFCIAFTKRRANQVKRTCYAQSSQIRQIRRKMSEIMVKEASSCDLKELVAKFIPEAIGRKIEKATQGIYPLQNVFIRKVKILKAPKFDLGKLMEVHGDYTAEDVGVKVDRPADETMVEEPTEIIGA

SEQ ID NO: 44721 - protein, 160 aa, Arabidopsis thaliana
  peptide (1)..(160): Ceres Seq. ID no. 15178404
  misc_feature (1)..(120): Pfam Name: Ribosomal S3Ae family Pfam Description: Ribosomal S3Ae family
  misc_feature (1)..(137): Homolog of NCBI NO: 1856971 NR Description: This gene is specifically expressed at the S during the cell cycle in the synchronous culture of periwinkle
  misc_feature (1)..(153): Homolog of NCBI NO: 7441116 NR Description: ribosomal protein S3a, cytosolic - rice
  misc_feature (1)..(150): Homolog of NCBI NO: 1350986 NR Description: 40S RIBOSOMAL PROTEIN S3A (CYC07 PROTEIN)
  misc_feature (1)..(160): Homolog of NCBI NO: 1350983 NR Description: 40S RIBOSOMAL PROTEIN S3A (CYC07 PROTEIN)
  misc_feature (1)..(160): Homolog of NCBI NO: 1350984 NR Description: 40S RIBOSOMAL PROTEIN S3A
  misc_feature (1)..(160): Homolog of NCBI NO: 24817254 NR Description: ribosomal protein S3a [Cicer arietinum]
  misc_feature (1)..(160): Homolog of NCBI NO: 6714564 NR Description: cyc07 [Daucus carota]
  misc_feature (1)..(160): Homolog of NCBI NO: 1350981 NR Description: 40S RIBOSOMAL PROTEIN S3A (S PHASE SPECIFIC
  misc_feature (1)..(160): Homolog of NCBI NO: 15229364 NR Description: 40S ribosomal protein S3A (RPS3aA) [Arabidopsis
  misc_feature (1)..(160): Homolog of NCBI NO: 15236171 NR Description: 40S ribosomal protein S3A (RPS3aB) [Arabidopsis
MDFTTDKLRSLVKKWQTLIEAHVDVKTTDGYTLRMFCIAFTKRRANQVKRTCYAQSSQIRQIRRKMSEIMVKEASSCDLKELVAKFIPEAIGRKIEKATQGIYPLQNVFIRKVKILKAPKFDLGKLMEVHGDYTAEDVGVKVDRPADETMVEEPTEIIGA

SEQ ID NO: 44722 - DNA, 893 bp, Arabidopsis thaliana; identical to SEQ ID NO: 20800
  misc_feature (1)..(893): Ceres Seq. ID no. 12489296
  misc_feature: MA Experiment ID: 108434 Result: Down-regulated in Transcription
  misc_feature: MA Experiment 108434 PARAMETER Experiment Name: At_Root_Tips_cDNA_P Parameter: Tissue Value: Root Tips
  misc_feature: MA Experiment ID: 108462 Result: Up-regulated in Transcription
  misc_feature: MA Experiment 108462 PARAMETER Experiment Name: At_Germinating_Seeds_cDNA_P Parameter: Age (day) Value: 2 vs. 0
  misc_feature: MA Experiment 108462 PARAMETER Experiment Name: At_Germinating_Seeds_cDNA_P Parameter: Tissue Value: Germinating Seeds
  misc_feature: MA Experiment ID: 108463 Result: Up-regulated in Transcription
  misc_feature: MA Experiment 108463 PARAMETER Experiment Name: At_Germinating_Seeds_cDNA_P Parameter: Age (day) Value: 3 vs. 0
  misc_feature: MA Experiment 108463 PARAMETER Experiment Name: At_Germinating_Seeds_cDNA_P Parameter: Tissue Value: Germinating Seeds
  misc_feature: MA Experiment ID: 108464 Result: Up-regulated in Transcription
  misc_feature: MA Experiment 108464 PARAMETER Experiment Name: At_Germinating_Seeds_cDNA_P Parameter: Age (day) Value: 4 vs. 0
  misc_feature: MA Experiment 108464 PARAMETER Experiment Name: At_Germinating_Seeds_cDNA_P Parameter: Tissue Value: Germinating Seeds
  misc_feature: MA Experiment ID: 108501 Result: Down-regulated in Transcription
  misc_feature: MA Experiment 108501 PARAMETER Experiment Name: At_ap2_floral_buds_cDNA_P Parameter: Plant Line Value: ap2 (Ler.)
  misc_feature: MA Experiment 108501 PARAMETER Experiment Name: At_ap2_floral_buds_cDNA_P Parameter: Tissue Value: Closed Flower
  misc_feature: MA Experiment ID: 108577 Result: Down-regulated in Transcription
  misc_feature: MA Experiment 108577 PARAMETER Experiment Name: At_42deg_Heat_cDNA_P Parameter: Temperature (deg C) Value: 42 vs. 22
  misc_feature: MA Experiment 108577 PARAMETER Experiment Name: At_42deg_Heat_cDNA_P Parameter: Timepoint (hr) Value: 6
  misc_feature: MA Experiment 108577 PARAMETER Experiment Name: At_42deg_Heat_cDNA_P Parameter: Tissue Value: Aerial
  misc_feature: MA Experiment ID: 20000111 Result: Down-regulated in Transcription
  misc_feature: MA Experiment 20000111 PARAMETER Experiment Name: At_42deg_Heat_cDNA_P Parameter: Temperature (deg C) Value: 42 vs. 22
  misc_feature: MA Experiment 20000111 PARAMETER Experiment Name: At_42deg_Heat_cDNA_P Parameter: Timepoint (hr) Value: 6
  misc_feature: MA Experiment 20000111 PARAMETER Experiment Name: At_42deg_Heat_cDNA_P Parameter: Tissue Value: Aerial
  misc_feature: MA Experiment ID: 20000234 Result: Down-regulated in Transcription
  misc_feature: MA Experiment 20000234 PARAMETER Experiment Name: At_Siliques_P Parameter: Age (day) Value: 21
  misc_feature: MA Experiment 20000234 PARAMETER Experiment Name: At_Siliques_P Parameter: Organism Value: A. thaliana
  misc_feature: MA Experiment 20000234 PARAMETER Experiment Name: At_Siliques_P Parameter: Plant Line Value: WS
  misc_feature: MA Experiment 20000234 PARAMETER Experiment Name: At_Siliques_P Parameter: Tissue Value: Less Than 5mm Siliques vs. Whole Plant
  misc_feature: MA Experiment ID: 20000235 Result: Down-regulated in Transcription
  misc_feature: MA Experiment 20000235 PARAMETER Experiment Name: At_Siliques_P Parameter: Age (day) Value: 21
  misc_feature: MA Experiment 20000235 PARAMETER Experiment Name: At_Siliques_P Parameter: Organism Value: A. thaliana
  misc_feature: MA Experiment 20000235 PARAMETER Experiment Name: At_Siliques_P Parameter: Plant Line Value: WS
  misc_feature: MA Experiment 20000235 PARAMETER Experiment Name: At_Siliques_P Parameter: Tissue Value: 5-10mm Siliques vs. Whole Plant
  misc_feature: MA Experiment ID: 20001247 Result: Up-regulated in Transcription
  misc_feature: MA Experiment 20001247 PARAMETER Experiment Name: At_Far-red-induction_P Parameter: Age (day) Value: 7
  misc_feature: MA Experiment 20001247 PARAMETER Experiment Name: At_Far-red-induction_P Parameter: Light Value: Far-red vs. White
  misc_feature: MA Experiment 20001247 PARAMETER Experiment Name: At_Far-red-induction_P Parameter: Organism Value: A. thaliana
  misc_feature: MA Experiment 20001247 PARAMETER Experiment Name: At_Far-red-induction_P Parameter: Plant Line Value: Columbia
  misc_feature: MA Experiment 20001247 PARAMETER Experiment Name: At_Far-red-induction_P Parameter: Timepoint (hr) Value: 1
  misc_feature: MA Experiment 20001247 PARAMETER Experiment Name: At_Far-red-induction_P Parameter: Tissue Value: Whole Plant
  misc_feature: MA Experiment ID: 20001248 Result: Up-regulated in Transcription
  misc_feature: MA Experiment 20001248 PARAMETER Experiment Name: At_Far-red-induction_P Parameter: Age (day) Value: 7
  misc_feature: MA Experiment 20001248 PARAMETER Experiment Name: At_Far-red-induction_P Parameter: Light Value: Far-red vs. White
  misc_feature: MA Experiment 20001248 PARAMETER Experiment Name: At_Far-red-induction_P Parameter: Organism Value: A. thaliana
  misc_feature: MA Experiment 20001248 PARAMETER Experiment Name: At_Far-red-induction_P Parameter: Plant Line Value: Columbia
  misc_feature: MA Experiment 20001248 PARAMETER Experiment Name: At_Far-red-induction_P Parameter: Timepoint (hr) Value: 4
  misc_feature: MA Experiment 20001248 PARAMETER Experiment Name: At_Far-red-induction_P Parameter: Tissue Value: Whole Plant
  misc_feature: MA Experiment ID: 20001450 Result: Up-regulated in Transcription
  misc_feature: MA Experiment 20001450 PARAMETER Experiment Name: At_Far-red-induction_P Parameter: Age (day) Value: 7
  misc_feature: MA Experiment 20001450 PARAMETER Experiment Name: At_Far-red-induction_P Parameter: Light Value: Far-red vs. White
  misc_feature: MA Experiment 20001450 PARAMETER Experiment Name: At_Far-red-induction_P Parameter: Organism Value: A. thaliana
  misc_feature: MA Experiment 20001450 PARAMETER Experiment Name: At_Far-red-induction_P Parameter: Plant Line Value: Columbia
  misc_feature: MA Experiment 20001450 PARAMETER Experiment Name: At_Far-red-induction_P Parameter: Timepoint (hr) Value: 8
  misc_feature: MA Experiment 20001450 PARAMETER Experiment Name: At_Far-red-induction_P Parameter: Tissue Value: Whole Plant
  misc_feature: MA Experiment ID: 20001560 Result: Down-regulated in Transcription
  misc_feature: MA Experiment 20001560 PARAMETER Experiment Name: At_Drought_Soil_Dry_P Parameter: Age (day) Value: 28
  misc_feature: MA Experiment 20001560 PARAMETER Experiment Name: At_Drought_Soil_Dry_P Parameter: Organism Value: A. thaliana
  misc_feature: MA Experiment 20001560 PARAMETER Experiment Name: At_Drought_Soil_Dry_P Parameter: Plant Line Value: WS
  misc_feature: MA Experiment 20001560 PARAMETER Experiment Name: At_Drought_Soil_Dry_P Parameter: Post Timepoint (hr) Value: None
  misc_feature: MA Experiment 20001560 PARAMETER Experiment Name: At_Drought_Soil_Dry_P Parameter: Post-Treatment Value: None
  misc_feature: MA Experiment 20001560 PARAMETER Experiment Name: At_Drought_Soil_Dry_P Parameter: Timepoint (day) Value: 14
  misc_feature: MA Experiment 20001560 PARAMETER Experiment Name: At_Drought_Soil_Dry_P Parameter: Treatment Value: Drought vs. No Drought

SEQ ID NO: 44723 - protein, 163 aa, Arabidopsis thaliana; identical to SEQ ID NO: 20801
  peptide (1)..(163): Ceres Seq. ID no. 12489297
  misc_feature (2)..(58): Homolog of NCBI NO: 21592596 NR Description: unknown [Arabidopsis thaliana]
  misc_feature (2)..(82): Homolog of NCBI NO: 18414176 NR Description: Expressed protein
  misc_feature (9)..(163): Homolog of NCBI NO: 34899128 NR Description: P0496C02.30 [Oryza sativa (japonica
  misc_feature (9)..(163): Homolog of NCBI NO: 34395186 NR Description: unknown protein [Oryza sativa (japonica
  misc_feature (1)..(163): Homolog of NCBI NO: 8489786 NR Description: dehydration-induced protein ERD15 [Lycopersicon
  misc_feature (1)..(163): Homolog of NCBI NO: 21592689 NR Description: ERD15 protein [Arabidopsis thaliana]
  misc_feature (1)..(163): Homolog of NCBI NO: 15227351 NR Description: ERD15 protein
  misc_feature (2)..(58): Homolog of NCBI NO: 21592596 NR Description: unknown [Arabidopsis thaliana]
  misc_feature (2)..(82): Homolog of NCBI NO: 18414176 NR Description: Expressed protein
  misc_feature (9)..(163): Homolog of NCBI NO: 34899128 NR Description: P0496C02.30 [Oryza sativa (japonica
  misc_feature (9)..(163): Homolog of NCBI NO: 34395186 NR Description: unknown protein [Oryza sativa (japonica
  misc_feature (1)..(163): Homolog of NCBI NO: 8489786 NR Description: dehydration-induced protein ERD15 [Lycopersicon
  misc_feature (1)..(163): Homolog of NCBI NO: 21592689 NR Description: ERD15 protein [Arabidopsis thaliana]
  misc_feature (1)..(163): Homolog of NCBI NO: 15227351 NR Description: ERD15 protein

SEQ ID NO: 44724 - protein, 161 aa, Arabidopsis thaliana; identical to SEQ ID NO: 20802
  peptide (1)..(161): Ceres Seq. ID no. 12489298
  misc_feature (1)..(56): Homolog of NCBI NO: 21592596 NR Description: unknown [Arabidopsis thaliana]
  misc_feature (1)..(80): Homolog of NCBI NO: 18414176 NR Description: Expressed protein
  misc_feature (7)..(161): Homolog of NCBI NO: 34899128 NR Description: P0496C02.30 [Oryza sativa (japonica
  misc_feature (7)..(161): Homolog of NCBI NO: 34395186 NR Description: unknown protein [Oryza sativa (japonica
  misc_feature (1)..(161): Homolog of NCBI NO: 8489786 NR Description: dehydration-induced protein ERD15 [Lycopersicon
  misc_feature (1)..(161): Homolog of NCBI NO: 21592689 NR Description: ERD15 protein [Arabidopsis thaliana]
  misc_feature (1)..(161): Homolog of NCBI NO: 15227351 NR Description: ERD15 protein
  misc_feature (1)..(56): Homolog of NCBI NO: 21592596 NR Description: unknown [Arabidopsis thaliana]
  misc_feature (1)..(80): Homolog of NCBI NO: 18414176 NR Description: Expressed protein
  misc_feature (7)..(161): Homolog of NCBI NO: 34899128 NR Description: P0496C02.30 [Oryza sativa (japonica
  misc_feature (7)..(161): Homolog of NCBI NO: 34395186 NR Description: unknown protein [Oryza sativa (japonica
  misc_feature (1)..(161): Homolog of NCBI NO: 8489786 NR Description: dehydration-induced protein ERD15 [Lycopersicon
  misc_feature (1)..(161): Homolog of NCBI NO: 21592689 NR Description: ERD15 protein [Arabidopsis thaliana]
  misc_feature (1)..(161): Homolog of NCBI NO: 15227351 NR Description: ERD15 protein

SEQ ID NO: 44725 - protein, 85 aa, Arabidopsis thaliana; identical to SEQ ID NO: 20803
  peptide (1)..(85): Ceres Seq. ID no. 12489299

SEQ ID NO: 44726 - DNA, 2363 bp, Arabidopsis thaliana
  misc_feature (1)..(2363): Ceres Seq. ID no. 12455369
  misc_feature: MA Experiment ID: 20000179 Result: Down-regulated in Transcription
  misc_feature: MA Experiment 20000179 PARAMETER Experiment Name: At_Germinating_Seeds_P Parameter: Age (hr) Value: 6 vs. 0
  misc_feature: MA Experiment 20000179 PARAMETER Experiment Name: At_Germinating_Seeds_P Parameter: Tissue Value: Germinating Seeds
  misc_feature: MA Experiment ID: 20000180 Result: Down-regulated in Transcription
  misc_feature: MA Experiment 20000180 PARAMETER Experiment Name: At_Germinating_Seeds_P Parameter: Age (hr) Value: 24 vs. 0
  misc_feature: MA Experiment 20000180 PARAMETER Experiment Name: At_Germinating_Seeds_P Parameter: Tissue Value: Germinating Seeds
agggttactaatttgggaattttactgtccaaaacgaatcaaaaaaaaaatctaagctttttgttccttttgcggcttttcgtcgtcttccttgcactatcttccttctgtagcatcaattcgtttccaaggttacgtagtagaatttacgcgagagagcgagagatcaaaaaccataaccatcttaagttacaatgagctcgtatgatcgtagatttgctgatccaaattcgtatcgccaacgctctggcgccccagttggttcgtctcagccgatggatccttccgccgcaccatacaacccacggtacactggtggtggtggaggatatggaccatctccggtaatggccggtgataattccggctataatcggtacccatctttccagccacctagtggcggtttctctgttggccgcggtggtggaagaggtggatatggtcaatacggcgatagaaacggcggagggaattggggaggaggaggaggacgtggcggatcgagtaaaagagagctagatagtgtttctcttccgaagcagaattttgggaatcttgtacattttgagaagaatttctatgtggagagtcccactgtgcaagctatgacagagcaggatgttgcaatgtacagaaccgagagggatatatccgttgaaggtcgtgatgttcctaagccgatgaagatgttccaagatgctaactttccagataacattcttgaagcaattgctaaattgggatttactgagccaacacctatacaagctcagggatggccgatggcgttgaagggtagggatttgattggtattgctgagactggctctggtaagacattggcttacttgttaccagcattggttcacgttagtgcacaacctcgattaggtcaggatgatggccccattgtgttaatattagctcccacaagagaactagctgttcagattcaagaggaatcaaggaaattcgggttgaggtctggtgttagaagtacttgtatctatggtggtgctcctaaaggacctcagattcgtgatcttagaagaggtgttgagattgtaattgctacacctggtcgtttgattgatatgttggaatgtcaacacactaatttgaagagagtgacttaccttgtactggatgaggctgacagaatgttagacatgggatttgaaccccaaattagaaagattgtatctcagatccgacctgatagacaaacacttctttggagtgcaacatggccacgagaggttgaaactcttgccaggcagtttctacgagatccatataaggccattattggatcaacagatctaaaagctaaccagtctattaaccaagtaatcgagattgtaccgacgccagagaaatacaacaggctccttacactacttaaacagttaatggatgggagtaaaatcctaatttttgtggagacaaagagagggtgtgatcaagtgactagacaattgagaatggacggatggccagctcttgccatacatggtgacaagacccaatcggaaagagaccgagtcttggcagaatttaagagtggacgaagcccgataatgactgccactgatgtagcagcaaggggacttgtttcctctggtattagggaaaaaagcacatagaaagaaaaaaggagcttctttgaagaatttgtttcctgcatccatctcccgggcatggagctgattggtttttgagcagcctgggcgactgacacctgcatgcattaatagtgttataacgccgtcccaaacactccttatccctgcaagttaagatgtgaaggacattaaatgtgtggttaattatgatttcccaaatacattggaggattacatccataggattggtcgaaccgggcgtgcaggagctaaaggaatggcctttacattcttcacacatgacaatgctaagtttgcgagagagcttgtcaagatccttcaagaagctggtcaagttgtacctcctactctctccgcactagtccgatcatctggttctggttatggaggttcaggtggtggaagaaacttcaggccaagaggaggaggacgtggtggtgggtttggagataaacggtcaagatcgacttcaaactttgtacctcacggtggaaagaggacttggtaaagagaatcccatcattttgattctatgagaaaacctttaattatgatgatgatgatcagcgtttggtttcgactagaagttctttgtcgtagagaacaaacatttactatataactatttagctgatttcgctgcttcttcttcttcttcttcatgatatttctaaacattttgcctttttcttaattctatcaactaaatacact

SEQ ID NO: 44727 - protein, 484 aa, Arabidopsis thaliana
  peptide (1)..(484): Ceres Seq. ID no. 12455370
  misc_feature (178)..(387): Pfam Name: DEAD/DEAH box helicase Pfam Description: DEAD/DEAH box helicase
  misc_feature (71)..(474): Homolog of NCBI NO: 8163810 NR Description: p68 RNA helicase [Xenopus laevis]
  misc_feature (54)..(479): Homolog of NCBI NO: 6324217 NR Description: ATP-dependent RNA helicase of DEAD box family;
  misc_feature (40)..(474): Homolog of NCBI NO: 5059030 NR Description: p68 RNA helicase [Molgula occulta]
  misc_feature (35)..(480): Homolog of NCBI NO: 5059027 NR Description: p68 RNA helicase [Molgula oculata]
  misc_feature (395)..(474): Homolog of NCBI NO: 5669638 NR Description: ethylene-responsive RNA helicase [Lycopersicon
  misc_feature (84)..(357): Homolog of NCBI NO: 5669638 NR Description: ethylene-responsive RNA helicase [Lycopersicon
  misc_feature (81)..(474): Homolog of NCBI NO: 15221998 NR Description: ethylene-responsive DEAD/DEAH box RNA helicase
  misc_feature (74)..(474): Homolog of NCBI NO: 34903586 NR Description: putative ethylene-responsive RNA helicase
  misc_feature (1)..(484): Homolog of NCBI NO: 18424667 NR Description: ethylene-responsive DEAD/DEAH box RNA helicase
  misc_feature (28)..(474): Homolog of NCBI NO: 10177293 NR Description: ATP-dependent RNA helicase-like protein
MSSYDRRFADPNSYRQRSGAPVGSSQPMDPSAAPYNPRYTGGGGGYGPSPVMAGDNSGYNRYPSFQPPSGGFSVGRGGGRGGYGQYGDRNGGGNWGGGGGRGGSSKRELDSVSLPKQNFGNLVHFEKNFYVESPTVQAMTEQDVAMYRTERDISVEGRDVPKPMKMFQDANFPDNILEAIAKLGFTEPTPIQAQGWPMALKGRDLIGIAETGSGKTLAYLLPALVHVSAQPRLGQDDGPIVLILAPTRELAVQIQEESRKFGLRSGVRSTCIYGGAPKGPQIRDLRRGVEIVIATPGRLIDMLECQHTNLKRVTYLVLDEADRMLDMGFEPQIRKIVSQIRPDRQTLLWSATWPREVETLARQFLRDPYKAIIGSTDLKANQSINQVIEIVPTPEKYNRLLTLLKQLMDGSKILIFVETKRGCDQVTRQLRMDGWPALAIHGDKTQSERDRVLAEFKSGRSPIMTATDVAARGLVSSGIREKST

SEQ ID NO: 44728 - protein, 457 aa, Arabidopsis thaliana
  peptide (1)..(457): Ceres Seq. ID no. 12455371
  misc_feature (151)..(360): Pfam Name: DEAD/DEAH box helicase Pfam Description: DEAD/DEAH box helicase
  misc_feature (44)..(447): Homolog of NCBI NO: 8163810 NR Description: p68 RNA helicase [Xenopus laevis]
  misc_feature (27)..(452): Homolog of NCBI NO: 6324217 NR Description: ATP-dependent RNA helicase of DEAD box family;
  misc_feature (13)..(447): Homolog of NCBI NO: 5059030 NR Description: p68 RNA helicase [Molgula occulta]
  misc_feature (8)..(453): Homolog of NCBI NO: 5059027 NR Description: p68 RNA helicase [Molgula oculata]
  misc_feature (368)..(447): Homolog of NCBI NO: 5669638 NR Description: ethylene-responsive RNA helicase [Lycopersicon
  misc_feature (57)..(330): Homolog of NCBI NO: 5669638 NR Description: ethylene-responsive RNA helicase [Lycopersicon
  misc_feature (54)..(447): Homolog of NCBI NO: 15221998 NR Description: ethylene-responsive DEAD/DEAH box RNA helicase
  misc_feature (47)..(447): Homolog of NCBI NO: 34903586 NR Description: putative ethylene-responsive RNA helicase
  misc_feature (1)..(457): Homolog of NCBI NO: 18424667 NR Description: ethylene-responsive DEAD/DEAH box RNA helicase
  misc_feature (1)..(447): Homolog of NCBI NO: 10177293 NR Description: ATP-dependent RNA helicase-like protein
MDPSAAPYNPRYTGGGGGYGPSPVMAGDNSGYNRYPSFQPPSGGFSVGRGGGRGGYGQYGDRNGGGNWGGGGGRGGSSKRELDSVSLPKQNFGNLVHFEKNFYVESPTVQAMTEQDVAMYRTERDISVEGRDVPKPMKMFQDANFPDNILEAIAKLGFTEPTPIQAQGWPMALKGRDLIGIAETGSGKTLAYLLPALVHVSAQPRLGQDDGPIVLILAPTRELAVQIQEESRKFGLRSGVRSTCIYGGAPKGPQIRDLRRGVEIVIATPGRLIDMLECQHTNLKRVTYLVLDEADRMLDMGFEPQIRKIVSQIRPDRQTLLWSATWPREVETLARQFLRDPYKAIIGSTDLKANQSINQVIEIVPTPEKYNRLLTLLKQLMDGSKILIFVETKRGCDQVTRQLRMDGWPALAIHGDKTQSERDRVLAEFKSGRSPIMTATDVAARGLVSSGIREKST

SEQ ID NO: 44729 - protein, 433 aa, Arabidopsis thaliana
  peptide (1)..(433): Ceres Seq. ID no. 12455372
  misc_feature (127)..(336): Pfam Name: DEAD/DEAH box helicase Pfam Description: DEAD/DEAH box helicase
  misc_feature (20)..(423): Homolog of NCBI NO: 8163810 NR Description: p68 RNA helicase [Xenopus laevis]
  misc_feature (3)..(428): Homolog of NCBI NO: 6324217 NR Description: ATP-dependent RNA helicase of DEAD box family;
  misc_feature (1)..(423): Homolog of NCBI NO: 5059030 NR Description: p68 RNA helicase [Molgula occulta]
  misc_feature (1)..(429): Homolog of NCBI NO: 5059027 NR Description: p68 RNA helicase [Molgula oculata]
  misc_feature (344)..(423): Homolog of NCBI NO: 5669638 NR Description: ethylene-responsive RNA helicase [Lycopersicon
  misc_feature (33)..(306): Homolog of NCBI NO: 5669638 NR Description: ethylene-responsive RNA helicase [Lycopersicon
  misc_feature (30)..(423): Homolog of NCBI NO: 15221998 NR Description: ethylene-responsive DEAD/DEAH box RNA helicase
  misc_feature (23)..(423): Homolog of NCBI NO: 34903586 NR Description: putative ethylene-responsive RNA helicase
  misc_feature (1)..(433): Homolog of NCBI NO: 18424667 NR Description: ethylene-responsive DEAD/DEAH box RNA helicase
  misc_feature (1)..(423): Homolog of NCBI NO: 10177293 NR Description: ATP-dependent RNA helicase-like protein
MAGDNSGYNRYPSFQPPSGGFSVGRGGGRGGYGQYGDRNGGGNWGGGGGRGGSSKRELDSVSLPKQNFGNLVHFEKNFYVESPTVQAMTEQDVAMYRTERDISVEGRDVPKPMKMFQDANFPDNILEAIAKLGFTEPTPIQAQGWPMALKGRDLIGIAETGSGKTLAYLLPALVHVSAQPRLGQDDGPIVLILAPTRELAVQIQEESRKFGLRSGVRSTCIYGGAPKGPQIRDLRRGVEIVIATPGRLIDMLECQHTNLKRVTYLVLDEADRMLDMGFEPQIRKIVSQIRPDRQTLLWSATWPREVETLARQFLRDPYKAIIGSTDLKANQSINQVIEIVPTPEKYNRLLTLLKQLMDGSKILIFVETKRGCDQVTRQLRMDGWPALAIHGDKTQSERDRVLAEFKSGRSPIMTATDVAARGLVSSGIREKST

SEQ ID NO: 44730 - DNA, 1352 bp, Arabidopsis thaliana
  misc_feature (1)..(1352): Ceres Seq. ID no. 13494664
  misc_feature: MA Experiment ID: 20000314 Result: Down-regulated in Transcription
  misc_feature: MA Experiment 20000314 PARAMETER Experiment Name: At_14day_Shoots-Roots_Sub_P Parameter: Age (day) Value: 14
  misc_feature: MA Experiment 20000314 PARAMETER Experiment Name: At_14day_Shoots-Roots_Sub_P Parameter: Organism Value: A. thaliana
  misc_feature: MA Experiment 20000314 PARAMETER Experiment Name: At_14day_Shoots-Roots_Sub_P Parameter: Plant Line Value: WS
  misc_feature: MA Experiment 20000314 PARAMETER Experiment Name: At_14day_Shoots-Roots_Sub_P Parameter: Tissue Value: Roots vs. Whole Plant
  misc_feature: MA Experiment ID: 20000315 Result: Up-regulated in Transcription
  misc_feature: MA Experiment 20000315 PARAMETER Experiment Name: At_14day_Shoots-Roots_Sub_P Parameter: Age (day) Value: 14
  misc_feature: MA Experiment 20000315 PARAMETER Experiment Name: At_14day_Shoots-Roots_Sub_P Parameter: Organism Value: A. thaliana
  misc_feature: MA Experiment 20000315 PARAMETER Experiment Name: At_14day_Shoots-Roots_Sub_P Parameter: Plant Line Value: WS
  misc_feature: MA Experiment 20000315 PARAMETER Experiment Name: At_14day_Shoots-Roots_Sub_P Parameter: Tissue Value: Shoots vs. Whole Plant
  misc_feature: MA Experiment ID: 20000327 Result: Down-regulated in Transcription
  misc_feature: MA Experiment 20000327 PARAMETER Experiment Name: At_42deg_Heat_Sub_P Parameter: Age (day) Value: 14
  misc_feature: MA Experiment 20000327 PARAMETER Experiment Name: At_42deg_Heat_Sub_P Parameter: Organism Value: A. thaliana
  misc_feature: MA Experiment 20000327 PARAMETER Experiment Name: At_42deg_Heat_Sub_P Parameter: Plant Line Value: WS
  misc_feature: MA Experiment 20000327 PARAMETER Experiment Name: At_42deg_Heat_Sub_P Parameter: Temperature (deg C) Value: 42 vs. 22
  misc_feature: MA Experiment 20000327 PARAMETER Experiment Name: At_42deg_Heat_Sub_P Parameter: Timepoint (hr) Value: 1
  misc_feature: MA Experiment 20000327 PARAMETER Experiment Name: At_42deg_Heat_Sub_P Parameter: Tissue Value: Aerial
  misc_feature: MA Experiment ID: 20000328 Result: Down-regulated in Transcription
  misc_feature: MA Experiment 20000328 PARAMETER Experiment Name: At_42deg_Heat_Sub_P Parameter: Age (day) Value: 14
  misc_feature: MA Experiment 20000328 PARAMETER Experiment Name: At_42deg_Heat_Sub_P Parameter: Organism Value: A. thaliana
  misc_feature: MA Experiment 20000328 PARAMETER Experiment Name: At_42deg_Heat_Sub_P Parameter: Plant Line Value: WS
  misc_feature: MA Experiment 20000328 PARAMETER Experiment Name: At_42deg_Heat_Sub_P Parameter: Temperature (deg C) Value: 42 vs. 22
  misc_feature: MA Experiment 20000328 PARAMETER Experiment Name: At_42deg_Heat_Sub_P Parameter: Timepoint (hr) Value: 6
  misc_feature: MA Experiment 20000328 PARAMETER Experiment Name: At_42deg_Heat_Sub_P Parameter: Tissue Value: Aerial
  misc_feature: MA Experiment ID: 20000329 Result: Down-regulated in Transcription
  misc_feature: MA Experiment 20000329 PARAMETER Experiment Name: At_4deg_Cold_Sub_P Parameter: Age (day) Value: 14
  misc_feature: MA Experiment 20000329 PARAMETER Experiment Name: At_4deg_Cold_Sub_P Parameter: Organism Value: A. thaliana
  misc_feature: MA Experiment 20000329 PARAMETER Experiment Name: At_4deg_Cold_Sub_P Parameter: Plant Line Value: WS
  misc_feature: MA Experiment 20000329 PARAMETER Experiment Name: At_4deg_Cold_Sub_P Parameter: Temperature (deg C) Value: 4 vs. 22
  misc_feature: MA Experiment 20000329 PARAMETER Experiment Name: At_4deg_Cold_Sub_P Parameter: Timepoint (hr) Value: 6
  misc_feature: MA Experiment 20000329 PARAMETER Experiment Name: At_4deg_Cold_Sub_P Parameter: Tissue Value: Aerial
  misc_feature: MA Experiment ID: 20000355 Result: Down-regulated in Transcription
  misc_feature: MA Experiment 20000355 PARAMETER Experiment Name: At_Siliques_Sub_P Parameter: Age (day) Value: 21
  misc_feature: MA Experiment 20000355 PARAMETER Experiment Name: At_Siliques_Sub_P Parameter: Organism Value: A. thaliana
  misc_feature: MA Experiment 20000355 PARAMETER Experiment Name: At_Siliques_Sub_P Parameter: Plant Line Value: WS
  misc_feature: MA Experiment 20000355 PARAMETER Experiment Name: At_Siliques_Sub_P Parameter: Tissue Value: Less Than 5mm Siliques vs. Whole Plant
ctcaatcattagcttcttctcttctcttctctcacagagagagtaatcacaatccaagtgagaaaaagaaaacactaaacccagatcgaaaaccatgtctattaacaacaacaacaacaacaacaacaataacaacgatggtcttatgatctcatcaaacggagctttaatcgaacaacaaccatcagtcgttgtgaagaaaccaccggcgaaagatcgacatagcaaagtcgatggaagagggagaagaatccgtatgccgattatatgtgctgctcgtgtttttcagctaacgagagagcttggtcataagtcagatggccaaacaattgaatggttacttcgtcaagcagagccttctattatagctgcaacaggaactggtacaactccagcgagtttctcaactgcttctgtctctatccgtggagccaccaattctacttctttagatcataaacccacttctttacttggtggtacgtcaccgtttatacttgggaaacgtgttagagctgatgaggatagtaataatagtcataatcatagttctgttggtaaagatgagacctttacgacaacaccagctgggttttgggctgttccggcgaggccggattttggacaagtttggagttttgctggagctccacaagagatgtttttacaacaacaacatcatcatcagcaaccattgtttgttcatcagcaacagcaacaacaagctgcaatgggtgaagcttctgctgctagagttgggaattatcttccgggtcatcttaatttgcttgcttctttatccggtggatctcccgggtcggatcgaagagaggaagatccacgttaatggtttaagcccttttaggtttgagggcaaaatttggtatatatatttattatcttctcttctctattgttgtcattgtttctctatgtgtgtgttttagtgttgttagagattgatttggtttcagaatctctgcaagtgatttgagagttttcgttagctttaagtaagttaaagacggttgtttttgattagggttaaattagggtttaagaatctgttgtttttttggagggagatcgatttcttatcggatccaagattacttttaggaaaaaagggaaaatttcagaaaccacggtggtttcttttcctcttttttttttgtgtctgttttttttttccggtgaaacagagccgtcgattaaaatttcagatatatatttaaatgttttaatatggtttgttgttgttgttgctaattgtgtaatgtgttacaacaattgtggtgaagcatttgcgtaagctgttaaccacgtttatttctaataaatgtttcgaatac

SEQ ID NO: 44731 - protein, 250 aa, Arabidopsis thaliana
  peptide (1)..(250): Ceres Seq. ID no. 13494665
  misc_feature (29)..(214): Pfam Name: TCP family transcription factor Pfam Description: TCP family transcription factor
  misc_feature (36)..(118): Homolog of NCBI NO: 20975251 NR Description: transcription factor PCF3 [Oryza sativa (japonica
  misc_feature (36)..(118): Homolog of NCBI NO: 15217857 NR Description: TCP family transcription factor, putative
  misc_feature (20)..(125): Homolog of NCBI NO: 18409345 NR Description: TCP family transcription factor, putative
  misc_feature (2)..(119): Homolog of NCBI NO: 15219640 NR Description: TCP family transcription factor, putative
  misc_feature (27)..(209): Homolog of NCBI NO: 22331641 NR Description: TCP family transcription factor, putative
  misc_feature (27)..(209): Homolog of NCBI NO: 11357581 NR Description: hypothetical protein F1P2.170 - Arabidopsis
  misc_feature (1)..(154): Homolog of NCBI NO: 15218305 NR Description: TCP family transcription factor, putative
  misc_feature (13)..(250): Homolog of NCBI NO: 15241596 NR Description: TCP family transcription factor, putative
  misc_feature (1)..(250): Homolog of NCBI NO: 26452377 NR Description: unknown protein [Arabidopsis thaliana]
  misc_feature (1)..(250): Homolog of NCBI NO: 15237274 NR Description: TCP family transcription factor, putative
MSINNNNNNNNNNNDGLMISSNGALIEQQPSVVVKKPPAKDRHSKVDGRGRRIRMPIICAARVFQLTRELGHKSDGQTIEWLLRQAEPSIIAATGTGTTPASFSTASVSIRGATNSTSLDHKPTSLLGGTSPFILGKRVRADEDSNNSHNHSSVGKDETFTTTPAGFWAVPARPDFGQVWSFAGAPQEMFLQQQHHHQQPLFVHQQQQQQAAMGEASAARVGNYLPGHLNLLASLSGGSPGSDRREEDPR

SEQ ID NO: 44732 - protein, 233 aa, Arabidopsis thaliana
  peptide (1)..(233): Ceres Seq. ID no. 13494666
  misc_feature (12)..(197): Pfam Name: TCP family transcription factor Pfam Description: TCP family transcription factor
  misc_feature (19)..(101): Homolog of NCBI NO: 20975251 NR Description: transcription factor PCF3 [Oryza sativa (japonica
  misc_feature (19)..(101): Homolog of NCBI NO: 15217857 NR Description: TCP family transcription factor, putative
  misc_feature (3)..(108): Homolog of NCBI NO: 18409345 NR Description: TCP family transcription factor, putative
  misc_feature (1)..(102): Homolog of NCBI NO: 15219640 NR Description: TCP family transcription factor, putative
  misc_feature (10)..(192): Homolog of NCBI NO: 22331641 NR Description: TCP family transcription factor, putative
  misc_feature (10)..(192): Homolog of NCBI NO: 11357581 NR Description: hypothetical protein F1P2.170 - Arabidopsis
  misc_feature (1)..(137): Homolog of NCBI NO: 15218305 NR Description: TCP family transcription factor, putative
  misc_feature (1)..(233): Homolog of NCBI NO: 15241596 NR Description: TCP family transcription factor, putative
  misc_feature (1)..(233): Homolog of NCBI NO: 26452377 NR Description: unknown protein [Arabidopsis thaliana]
  misc_feature (1)..(233): Homolog of NCBI NO: 15237274 NR Description: TCP family transcription factor, putative
MISSNGALIEQQPSVVVKKPPAKDRHSKVDGRGRRIRMPIICAARVFQLTRELGHKSDGQTIEWLLRQAEPSIIAATGTGTTPASFSTASVSIRGATNSTSLDHKPTSLLGGTSPFILGKRVRADEDSNNSHNHSSVGKDETFTTTPAGFWAVPARPDFGQVWSFAGAPQEMFLQQQHHHQQPLFVHQQQQQQAAMGEASAARVGNYLPGHLNLLASLSGGSPGSDRREEDPR

SEQ ID NO: 44733 - protein, 196 aa, Arabidopsis thaliana
  peptide (1)..(196): Ceres Seq. ID no. 13494667
  misc_feature (1)..(160): Pfam Name: TCP family transcription factor Pfam Description: TCP family transcription factor
  misc_feature (1)..(64): Homolog of NCBI NO: 20975251 NR Description: transcription factor PCF3 [Oryza sativa (japonica
  misc_feature (1)..(64): Homolog of NCBI NO: 15217857 NR Description: TCP family transcription factor, putative
  misc_feature (1)..(71): Homolog of NCBI NO: 18409345 NR Description: TCP family transcription factor, putative
  misc_feature (1)..(65): Homolog of NCBI NO: 15219640 NR Description: TCP family transcription factor, putative
  misc_feature (1)..(155): Homolog of NCBI NO: 22331641 NR Description: TCP family transcription factor, putative
  misc_feature (1)..(155): Homolog of NCBI NO: 11357581 NR Description: hypothetical protein F1P2.170 - Arabidopsis
  misc_feature (1)..(100): Homolog of NCBI NO: 15218305 NR Description: TCP family transcription factor, putative
  misc_feature (1)..(196): Homolog of NCBI NO: 15241596 NR Description: TCP family transcription factor, putative
  misc_feature (1)..(196): Homolog of NCBI NO: 26452377 NR Description: unknown protein [Arabidopsis thaliana]
  misc_feature (1)..(196): Homolog of NCBI NO: 15237274 NR Description: TCP family transcription factor, putative
MPIICAARVFQLTRELGHKSDGQTIEWLLRQAEPSIIAATGTGTTPASFSTASVSIRGATNSTSLDHKPTSLLGGTSPFILGKRVRADEDSNNSHNHSSVGKDETFTTTPAGFWAVPARPDFGQVWSFAGAPQEMFLQQQHHHQQPLFVHQQQQQQAAMGEASAARVGNYLPGHLNLLASLSGGSPGSDRREEDPR

SEQ ID NO: 44734 - DNA, 1581 bp, Arabidopsis thaliana
  misc_feature (1)..(1581): Ceres Seq. ID no. 12455365
  misc_feature: MA Experiment ID: 20001451 Result: Down-regulated in Transcription
  misc_feature: MA Experiment 20001451 PARAMETER Experiment Name: At_Far-red-induction_P Parameter: Age (day) Value: 7
  misc_feature: MA Experiment 20001451 PARAMETER Experiment Name: At_Far-red-induction_P Parameter: Light Value: Far-red vs. White
  misc_feature: MA Experiment 20001451 PARAMETER Experiment Name: At_Far-red-induction_P Parameter: Organism Value: A. thaliana
  misc_feature: MA Experiment 20001451 PARAMETER Experiment Name: At_Far-red-induction_P Parameter: Plant Line Value: Columbia
  misc_feature: MA Experiment 20001451 PARAMETER Experiment Name: At_Far-red-induction_P Parameter: Timepoint (hr) Value: 24
  misc_feature: MA Experiment 20001451 PARAMETER Experiment Name: At_Far-red-induction_P Parameter: Tissue Value: Whole Plant
aattgaaccaatcgtgattcaactacaaaattcctctttgaaccaaaaagacaaatccgaaacatgcgtgtggatacgaaagatctctagattcctccactcctcaatttctcatcttttgcttcgtcgtgactcttcttgatntcatcaataatgggttctgttatgagtttgagctgttccaagaggaaagcaacgagtcaggacgttgagtgttcaagcgaatctcgtaaaagacgaaagatatcttcagagaacgatgaagaagagtgttgtagattgattccaagtcttcctgatgagttatctatacagattcttgctaggcttcctagaatttgttactcgagtgttcggttggtttctcggaggtggagatcggctgtttcgacttctgaggtgtatagtttgaggaaagaacttgggaggactgaggagtggctctatgtgttgactaaaggtcatgaggataagcttttgtggtatgctttagatcctgtgtctactaaatggcagagattgcctccaatgccggttgttgtttatgaagaagagtctagaaagagtttatctggtttgtggaatatgattacaccgagctttaatgttggtgcgattgtgaggagctttctaggtaggagggactcctctgagcaaatgccgttttgtgggtgcgctattggtgctgttgatgggggtctttatgttattggtggactttctaggtctaaaacagtgagctgtgtttggcggtttgatccgattttgaactcttggagtgaagttagttctatgttggcgagtcgggcttattccaaaacaggtgtattgaataagaaactatatgttgttggaggggttgatcggggacggggaggtttatctcctcttcagtcagctgaggtttatgatccaagcacggatgcttggtcagaggttccgagcatgcctttctcaaaggcgcaagtgttgccaaatgcgtttttggctgacttactaaagcctattgccacaggaatgacttgctacaacggtaggttatgtgttcctcagagtttatactcttggcctttctttgttgatgttggaggagaggtttatgatcccgagacaaatctctgggttgaaatgccgtctggtatgggtgaaggttggcctgcgaggcaagcaggtacaaaactgagtgttgtggtggatggtgagttatacgcttttgatccttcttcttcgatggagaacggaaagattaaagtgtatgatcaaaaggaagatacttggaaggttgttattggggaagtccctgtgtatgacttaacagattcagaatctccttatttgcttgctgggtttcatggcaagcttcatttcattactagagaccctaatcataacgttacagtcttacgagctgatgtccccaacatcccagtctcctcatcatcatctagctccagttctgtttcaatcccacacttaaagaccaatgcacctaacaagtcagacactgttacatggaaactcattgcaaccaaggactttggtgctgctgaacttgttagctgccaagttatagatatataa

SEQ ID NO: 44735 - protein, 475 aa, Arabidopsis thaliana
  peptide (1)..(475): Ceres Seq. ID no. 12455366
  misc_feature (217)..(266): Pfam Name: Kelch motif Pfam Description: Kelch motif
  misc_feature (6)..(349): Homolog of NCBI NO: 15227057 NR Description: predicted by genefinder and genscan
  misc_feature (21)..(262): Homolog of NCBI NO: 37534254 NR Description: unknown protein [Oryza sativa (japonica
  misc_feature (28)..(310): Homolog of NCBI NO: 25405811 NR Description: unknown protein, 58496-60308 [imported] -
  misc_feature (28)..(310): Homolog of NCBI NO: 18405298 NR Description: expressed protein
  misc_feature (10)..(260): Homolog of NCBI NO: 19071626 NR Description: putative Kelch motif containing protein
  misc_feature (43)..(127): Homolog of NCBI NO: 18397351 NR Description: expressed protein
  misc_feature (180)..(265): Homolog of NCBI NO: 18397351 NR Description: expressed protein
  misc_feature (293)..(383): Homolog of NCBI NO: 18397351 NR Description: expressed protein
  misc_feature (1)..(475): Homolog of NCBI NO: 37533468 NR Description: putative kelch-containing protein
  misc_feature (1)..(475): Homolog of NCBI NO: 15219186 NR Description: hypothetical protein; protein id: At1g22040.1
MGSVMSLSCSKRKATSQDVECSSESRKRRKISSENDEEECCRLIPSLPDELSIQILARLPRICYSSVRLVSRRWRSAVSTSEVYSLRKELGRTEEWLYVLTKGHEDKLLWYALDPVSTKWQRLPPMPVVVYEEESRKSLSGLWNMITPSFNVGAIVRSFLGRRDSSEQMPFCGCAIGAVDGGLYVIGGLSRSKTVSCVWRFDPILNSWSEVSSMLASRAYSKTGVLNKKLYVVGGVDRGRGGLSPLQSAEVYDPSTDAWSEVPSMPFSKAQVLPNAFLADLLKPIATGMTCYNGRLCVPQSLYSWPFFVDVGGEVYDPETNLWVEMPSGMGEGWPARQAGTKLSVVVDGELYAFDPSSSMENGKIKVYDQKEDTWKVVIGEVPVYDLTDSESPYLLAGFHGKLHFITRDPNHNVTVLRADVPNIPVSSSSSSSSSVSIPHLKTNAPNKSDTVTWKLIATKDFGAAELVSCQVIDI

SEQ ID NO: 44736 - protein, 471 aa, Arabidopsis thaliana
  peptide (1)..(471): Ceres Seq. ID no. 12455367
  misc_feature (213)..(262): Pfam Name: Kelch motif Pfam Description: Kelch motif
  misc_feature (2)..(345): Homolog of NCBI NO: 15227057 NR Description: predicted by genefinder and genscan
  misc_feature (17)..(258): Homolog of NCBI NO: 37534254 NR Description: unknown protein [Oryza sativa (japonica
  misc_feature (24)..(306): Homolog of NCBI NO: 25405811 NR Description: unknown protein, 58496-60308 [imported] -
  misc_feature (24)..(306): Homolog of NCBI NO: 18405298 NR Description: expressed protein
  misc_feature (6)..(256): Homolog of NCBI NO: 19071626 NR Description: putative Kelch motif containing protein
  misc_feature (39)..(123): Homolog of NCBI NO: 18397351 NR Description: expressed protein
  misc_feature (176)..(261): Homolog of NCBI NO: 18397351 NR Description: expressed protein
  misc_feature (289)..(379): Homolog of NCBI NO: 18397351 NR Description: expressed protein
  misc_feature (1)..(471): Homolog of NCBI NO: 37533468 NR Description: putative kelch-containing protein
  misc_feature (1)..(471): Homolog of NCBI NO: 15219186 NR Description: hypothetical protein; protein id: At1g22040.1
MSLSCSKRKATSQDVECSSESRKRRKISSENDEEECCRLIPSLPDELSIQILARLPRICYSSVRLVSRRWRSAVSTSEVYSLRKELGRTEEWLYVLTKGHEDKLLWYALDPVSTKWQRLPPMPVVVYEEESRKSLSGLWNMITPSFNVGAIVRSFLGRRDSSEQMPFCGCAIGAVDGGLYVIGGLSRSKTVSCVWRFDPILNSWSEVSSMLASRAYSKTGVLNKKLYVVGGVDRGRGGLSPLQSAEVYDPSTDAWSEVPSMPFSKAQVLPNAFLADLLKPIATGMTCYNGRLCVPQSLYSWPFFVDVGGEVYDPETNLWVEMPSGMGEGWPARQAGTKLSVVVDGELYAFDPSSSMENGKIKVYDQKEDTWKVVIGEVPVYDLTDSESPYLLAGFHGKLHFITRDPNHNVTVLRADVPNIPVSSSSSSSSSVSIPHLKTNAPNKSDTVTWKLIATKDFGAAELVSCQVIDI

SEQ ID NO: 44737 - protein, 350 aa, Arabidopsis thaliana
  peptide (1)..(350): Ceres Seq. ID no. 12455368
  misc_feature (92)..(141): Pfam Name: Kelch motif Pfam Description: Kelch motif
  misc_feature (1)..(224): Homolog of NCBI NO: 22655058 NR Description: predicted protein [Arabidopsis thaliana]
  misc_feature (1)..(224): Homolog of NCBI NO: 15227057 NR Description: predicted by genefinder and genscan
  misc_feature (1)..(137): Homolog of NCBI NO: 37534254 NR Description: unknown protein [Oryza sativa (japonica
  misc_feature (1)..(185): Homolog of NCBI NO: 25405811 NR Description: unknown protein, 58496-60308 [imported] -
  misc_feature (1)..(185): Homolog of NCBI NO: 18405298 NR Description: expressed protein
  misc_feature (1)..(135): Homolog of NCBI NO: 19071626 NR Description: putative Kelch motif containing protein
  misc_feature (55)..(140): Homolog of NCBI NO: 18397351 NR Description: expressed protein
  misc_feature (168)..(258): Homolog of NCBI NO: 18397351 NR Description: expressed protein
  misc_feature (1)..(350): Homolog of NCBI NO: 37533468 NR Description: putative kelch-containing protein
  misc_feature (1)..(350): Homolog of NCBI NO: 15219186 NR Description: hypothetical protein; protein id: At1g22040.1
MPVVVYEEESRKSLSGLWNMITPSFNVGAIVRSFLGRRDSSEQMPFCGCAIGAVDGGLYVIGGLSRSKTVSCVWRFDPILNSWSEVSSMLASRAYSKTGVLNKKLYVVGGVDRGRGGLSPLQSAEVYDPSTDAWSEVPSMPFSKAQVLPNAFLADLLKPIATGMTCYNGRLCVPQSLYSWPFFVDVGGEVYDPETNLWVEMPSGMGEGWPARQAGTKLSVVVDGELYAFDPSSSMENGKIKVYDQKEDTWKVVIGEVPVYDLTDSESPYLLAGFHGKLHFITRDPNHNVTVLRADVPNIPVSSSSSSSSSVSIPHLKTNAPNKSDTVTWKLIATKDFGAAELVSCQVIDI

SEQ ID NO: 44738 - DNA, 687 bp, Arabidopsis thaliana; identical to SEQ ID NO: 30473
  misc_feature (1)..(687): Ceres Seq. ID no. 12580320
  misc_feature: MA Experiment ID: 108473 Result: Down-regulated in Transcription
  misc_feature: MA Experiment 108473 PARAMETER Experiment Name: At_Drought_Flowers_cDNA_P Parameter: Timepoint (hr) Value: 7 d
  misc_feature: MA Experiment 108473 PARAMETER Experiment Name: At_Drought_Flowers_cDNA_P Parameter: Tissue Value: Flower
  misc_feature: MA Experiment 108473 PARAMETER Experiment Name: At_Drought_Flowers_cDNA_P Parameter: Treatment Value: Drought vs. No Drought
  misc_feature: MA Experiment ID: 108501 Result: Down-regulated in Transcription
  misc_feature: MA Experiment 108501 PARAMETER Experiment Name: At_ap2_floral_buds_cDNA_P Parameter: Plant Line Value: ap2 (Ler.)
  misc_feature: MA Experiment 108501 PARAMETER Experiment Name: At_ap2_floral_buds_cDNA_P Parameter: Tissue Value: Closed Flower
  misc_feature: MA Experiment ID: 108569 Result: Down-regulated in Transcription
  misc_feature: MA Experiment 108569 PARAMETER Experiment Name: At_0.001%_MeJA__cDNA_P Parameter: Timepoint (hr) Value: 6
  misc_feature: MA Experiment 108569 PARAMETER Experiment Name: At_0.001%_MeJA__cDNA_P Parameter: Tissue Value: Aerial
  misc_feature: MA Experiment 108569 PARAMETER Experiment Name: At_0.001%_MeJA__cDNA_P Parameter: Treatment Value: 0.001% MeJA vs. No Treatment
  misc_feature: MA Experiment ID: 108595 Result: Up-regulated in Transcription
  misc_feature: MA Experiment 108595 PARAMETER Experiment Name: At_Ler-pi_Ovule_cDNA_P Parameter: Plant Line Value: null
  misc_feature: MA Experiment ID: 20000265 Result: Up-regulated in Transcription
  misc_feature: MA Experiment 20000265 PARAMETER Experiment Name: At_Open_Flower_P Parameter: Age (day) Value: 21
  misc_feature: MA Experiment 20000265 PARAMETER Experiment Name: At_Open_Flower_P Parameter: Plant Line Value: WS
  misc_feature: MA Experiment 20000265 PARAMETER Experiment Name: At_Open_Flower_P Parameter: Tissue Value: Closed Flower vs. Whole Plant
  misc_feature: MA Experiment ID: 20000286 Result: Up-regulated in Transcription
  misc_feature: MA Experiment 20000286 PARAMETER Experiment Name: At_Open_Flower_P Parameter: Age (day) Value: 21
  misc_feature: MA Experiment 20000286 PARAMETER Experiment Name: At_Open_Flower_P Parameter: Plant Line Value: WS
  misc_feature: MA Experiment 20000286 PARAMETER Experiment Name: At_Open_Flower_P Parameter: Tissue Value: Half Open vs. Whole Plant
  misc_feature: MA Experiment ID: 20001910 Result: Down-regulated in Transcription
  misc_feature: MA Experiment 20001910 PARAMETER Experiment Name: At_Drought_Reproduction_P Parameter: Age (day) Value: 37
  misc_feature: MA Experiment 20001910 PARAMETER Experiment Name: At_Drought_Reproduction_P Parameter: Organism Value: A. thaliana
  misc_feature: MA Experiment 20001910 PARAMETER Experiment Name: At_Drought_Reproduction_P Parameter: Plant Line Value: WS
  misc_feature: MA Experiment 20001910 PARAMETER Experiment Name: At_Drought_Reproduction_P Parameter: Timepoint (day) Value: 7
  misc_feature: MA Experiment 20001910 PARAMETER Experiment Name: At_Drought_Reproduction_P Parameter: Tissue Value: Flowers
  misc_feature: MA Experiment 20001910 PARAMETER Experiment Name: At_Drought_Reproduction_P Parameter: Treatment Value: Drought vs. No Drought

SEQ ID NO: 44739 - protein, 95 aa, Arabidopsis thaliana; identical to SEQ ID NO: 30474
  peptide (1)..(95): Ceres Seq. ID no. 12580321
  misc_feature (13)..(89): Pfam Name: Protein of unknown function, DUF538 Pfam Description: Protein of unknown function, DUF538
  misc_feature (13)..(89): Pfam Name: Protein of unknown function, DUF538 Pfam Description: Protein of unknown function, DUF538
  misc_feature (13)..(89): Pfam Name: Protein of unknown function, DUF538 Pfam Description: Protein of unknown function, DUF538
  misc_feature (48)..(88): Homolog of NCBI NO: 37536100 NR Description: hypothetical protein [Oryza sativa (japonica
  misc_feature (23)..(87): Homolog of NCBI NO: 33146557 NR Description: unknown protein [Oryza sativa (japonica
  misc_feature (23)..(89): Homolog of NCBI NO: 18405887 NR Description: expressed protein
  misc_feature (23)..(87): Homolog of NCBI NO: 34915422 NR Description: hypothetical protein~similar to Arabidopsis
  misc_feature (23)..(87): Homolog of NCBI NO: 34915426 NR Description: hypothetical protein~similar to Arabidopsis
  misc_feature (48)..(88): Homolog of NCBI NO: 37536100 NR Description: hypothetical protein [Oryza sativa (japonica
  misc_feature (23)..(89): Homolog of NCBI NO: 18405887 NR Description: expressed protein
  misc_feature (23)..(87): Homolog of NCBI NO: 34915426 NR Description: hypothetical protein~similar to Arabidopsis
  misc_feature (23)..(87): Homolog of NCBI NO: 34915422 NR Description: hypothetical protein~similar to Arabidopsis
  misc_feature (23)..(89): Homolog of NCBI NO: 18405887 NR Description: expressed protein
  misc_feature (23)..(87): Homolog of NCBI NO: 33146557 NR Description: unknown protein [Oryza sativa (japonica
  misc_feature (48)..(88): Homolog of NCBI NO: 37536100 NR Description: hypothetical protein [Oryza sativa (japonica
  misc_feature (9)..(89): Homolog of NCBI NO: 15220641 NR Description: unknown protein; protein id: At1g30020.1
  misc_feature (9)..(89): Homolog of NCBI NO: 18422648 NR Description: expressed protein
  misc_feature (23)..(87): Homolog of NCBI NO: 34903866 NR Description: unnamed protein product [Oryza sativa (japonica
  misc_feature (23)..(89): Homolog of NCBI NO: 18391006 NR Description: expressed protein
  misc_feature (23)..(87): Homolog of NCBI NO: 34915376 NR Description: hypothetical protein~similar to Oryza sativa
  misc_feature (9)..(89): Homolog of NCBI NO: 15220641 NR Description: unknown protein; protein id: At1g30020.1
  misc_feature (9)..(89): Homolog of NCBI NO: 18422648 NR Description: expressed protein
  misc_feature (23)..(87): Homolog of NCBI NO: 34903866 NR Description: unnamed protein product [Oryza sativa (japonica
  misc_feature (23)..(89): Homolog of NCBI NO: 18391006 NR Description: expressed protein
  misc_feature (23)..(87): Homolog of NCBI NO: 34915376 NR Description: hypothetical protein~similar to Oryza sativa
  misc_feature (23)..(87): Homolog of NCBI NO: 34915426 NR Description: hypothetical protein~similar to Arabidopsis
  misc_feature (23)..(87): Homolog of NCBI NO: 34915422 NR Description: hypothetical protein~similar to Arabidopsis
  misc_feature (23)..(87): Homolog of NCBI NO: 33146557 NR Description: unknown protein [Oryza sativa (japonica
  misc_feature (23)..(87): Homolog of NCBI NO: 34915376 NR Description: hypothetical protein~similar to Oryza sativa
  misc_feature (23)..(89): Homolog of NCBI NO: 18391006 NR Description: expressed protein
  misc_feature (23)..(87): Homolog of NCBI NO: 34903866 NR Description: unnamed protein product [Oryza sativa (japonica
  misc_feature (9)..(89): Homolog of NCBI NO: 18422648 NR Description: expressed protein
  misc_feature (9)..(89): Homolog of NCBI NO: 15220641 NR Description: unknown protein; protein id: At1g30020.1

SEQ ID NO: 44740 - protein, 87 aa, Arabidopsis thaliana; identical to SEQ ID NO: 30475
  peptide (1)..(87): Ceres Seq. ID no. 12580322
  misc_feature (5)..(81): Pfam Name: Protein of unknown function, DUF538 Pfam Description: Protein of unknown function, DUF538
  misc_feature (5)..(81): Pfam Name: Protein of unknown function, DUF538 Pfam Description: Protein of unknown function, DUF538
  misc_feature (5)..(81): Pfam Name: Protein of unknown function, DUF538 Pfam Description: Protein of unknown function, DUF538
  misc_feature (40)..(80): Homolog of NCBI NO: 37536100 NR Description: hypothetical protein [Oryza sativa (japonica
  misc_feature (15)..(79): Homolog of NCBI NO: 33146557 NR Description: unknown protein [Oryza sativa (japonica
  misc_feature (15)..(81): Homolog of NCBI NO: 18405887 NR Description: expressed protein
  misc_feature (15)..(79): Homolog of NCBI NO: 34915422 NR Description: hypothetical protein~similar to Arabidopsis
  misc_feature (15)..(79): Homolog of NCBI NO: 34915426 NR Description: hypothetical protein~similar to Arabidopsis
  misc_feature (40)..(80): Homolog of NCBI NO: 37536100 NR Description: hypothetical protein [Oryza sativa (japonica
  misc_feature (15)..(81): Homolog of NCBI NO: 18405887 NR Description: expressed protein
  misc_feature (15)..(79): Homolog of NCBI NO: 34915426 NR Description: hypothetical protein~similar to Arabidopsis
  misc_feature (15)..(79): Homolog of NCBI NO: 34915422 NR Description: hypothetical protein~similar to Arabidopsis
  misc_feature (15)..(81): Homolog of NCBI NO: 18405887 NR Description: expressed protein
  misc_feature (15)..(79): Homolog of NCBI NO: 33146557 NR Description: unknown protein [Oryza sativa (japonica
  misc_feature (40)..(80): Homolog of NCBI NO: 37536100 NR Description: hypothetical protein [Oryza sativa (japonica
  misc_feature (1)..(81): Homolog of NCBI NO: 15220641 NR Description: unknown protein; protein id: At1g30020.1
  misc_feature (1)..(81): Homolog of NCBI NO: 18422648 NR Description: expressed protein
  misc_feature (15)..(79): Homolog of NCBI NO: 34903866 NR Description: unnamed protein product [Oryza sativa (japonica
  misc_feature (15)..(81): Homolog of NCBI NO: 18391006 NR Description: expressed protein
  misc_feature (15)..(79): Homolog of NCBI NO: 34915376 NR Description: hypothetical protein~similar to Oryza sativa
  misc_feature (1)..(81): Homolog of NCBI NO: 15220641 NR Description: unknown protein; protein id: At1g30020.1
  misc_feature (1)..(81): Homolog of NCBI NO: 18422648 NR Description: expressed protein
  misc_feature (15)..(79): Homolog of NCBI NO: 34903866 NR Description: unnamed protein product [Oryza sativa (japonica
  misc_feature (15)..(81): Homolog of NCBI NO: 18391006 NR Description: expressed protein
  misc_feature (15)..(79): Homolog of NCBI NO: 34915376 NR Description: hypothetical protein~similar to Oryza sativa
  misc_feature (15)..(79): Homolog of NCBI NO: 34915426 NR Description: hypothetical protein~similar to Arabidopsis
  misc_feature (15)..(79): Homolog of NCBI NO: 34915422 NR Description: hypothetical protein~similar to Arabidopsis
  misc_feature (15)..(79): Homolog of NCBI NO: 33146557 NR Description: unknown protein [Oryza sativa (japonica
  misc_feature (15)..(79): Homolog of NCBI NO: 34915376 NR Description: hypothetical protein~similar to Oryza sativa
  misc_feature (15)..(81): Homolog of NCBI NO: 18391006 NR Description: expressed protein
  misc_feature (15)..(79): Homolog of NCBI NO: 34903866 NR Description: unnamed protein product [Oryza sativa (japonica
  misc_feature (1)..(81): Homolog of NCBI NO: 18422648 NR Description: expressed protein
  misc_feature (1)..(81): Homolog of NCBI NO: 15220641 NR Description: unknown protein; protein id: At1g30020.1

SEQ ID NO: 44741 - protein, 82 aa, Arabidopsis thaliana; identical to SEQ ID NO: 30476
  peptide (1)..(82): Ceres Seq. ID no. 12580323
  misc_feature (1)..(76): Pfam Name: Protein of unknown function, DUF538 Pfam Description: Protein of unknown function, DUF538
  misc_feature (1)..(76): Pfam Name: Protein of unknown function, DUF538 Pfam Description: Protein of unknown function, DUF538
  misc_feature (1)..(76): Pfam Name: Protein of unknown function, DUF538 Pfam Description: Protein of unknown function, DUF538
  misc_feature (35)..(75): Homolog of NCBI NO: 37536100 NR Description: hypothetical protein [Oryza sativa (japonica
  misc_feature (10)..(74): Homolog of NCBI NO: 33146557 NR Description: unknown protein [Oryza sativa (japonica
  misc_feature (10)..(76): Homolog of NCBI NO: 18405887 NR Description: expressed protein
  misc_feature (10)..(74): Homolog of NCBI NO: 34915422 NR Description: hypothetical protein~similar to Arabidopsis
  misc_feature (10)..(74): Homolog of NCBI NO: 34915426 NR Description: hypothetical protein~similar to Arabidopsis
  misc_feature (35)..(75): Homolog of NCBI NO: 37536100 NR Description: hypothetical protein [Oryza sativa (japonica
  misc_feature (10)..(76): Homolog of NCBI NO: 18405887 NR Description: expressed protein
  misc_feature (10)..(74): Homolog of NCBI NO: 34915426 NR Description: hypothetical protein~similar to Arabidopsis
  misc_feature (10)..(74): Homolog of NCBI NO: 34915422 NR Description: hypothetical protein~similar to Arabidopsis
  misc_feature (10)..(76): Homolog of NCBI NO: 18405887 NR Description: expressed protein
  misc_feature (10)..(74): Homolog of NCBI NO: 33146557 NR Description: unknown protein [Oryza sativa (japonica
  misc_feature (35)..(75): Homolog of NCBI NO: 37536100 NR Description: hypothetical protein [Oryza sativa (japonica
  misc_feature (1)..(76): Homolog of NCBI NO: 15220641 NR Description: unknown protein; protein id: At1g30020.1
  misc_feature (1)..(76): Homolog of NCBI NO: 18422648 NR Description: expressed protein
  misc_feature (10)..(74): Homolog of NCBI NO: 34903866 NR Description: unnamed protein product [Oryza sativa (japonica
  misc_feature (10)..(76): Homolog of NCBI NO: 18391006 NR Description: expressed protein
  misc_feature (10)..(74): Homolog of NCBI NO: 34915376 NR Description: hypothetical protein~similar to Oryza sativa
  misc_feature (1)..(76): Homolog of NCBI NO: 15220641 NR Description: unknown protein; protein id: At1g30020.1
  misc_feature (1)..(76): Homolog of NCBI NO: 18422648 NR Description: expressed protein
  misc_feature (10)..(74): Homolog of NCBI NO: 34903866 NR Description: unnamed protein product [Oryza sativa (japonica
  misc_feature (10)..(76): Homolog of NCBI NO: 18391006 NR Description: expressed protein
  misc_feature (10)..(74): Homolog of NCBI NO: 34915376 NR Description: hypothetical protein~similar to Oryza sativa
  misc_feature (10)..(74): Homolog of NCBI NO: 34915426 NR Description: hypothetical protein~similar to Arabidopsis
  misc_feature (10)..(74): Homolog of NCBI NO: 34915422 NR Description: hypothetical protein~similar to Arabidopsis
  misc_feature (10)..(74): Homolog of NCBI NO: 33146557 NR Description: unknown protein [Oryza sativa (japonica
  misc_feature (10)..(74): Homolog of NCBI NO: 34915376 NR Description: hypothetical protein~similar to Oryza sativa
  misc_feature (10)..(76): Homolog of NCBI NO: 18391006 NR Description: expressed protein
  misc_feature (10)..(74): Homolog of NCBI NO: 34903866 NR Description: unnamed protein product [Oryza sativa (japonica
  misc_feature (1)..(76): Homolog of NCBI NO: 18422648 NR Description: expressed protein
  misc_feature (1)..(76): Homolog of NCBI NO: 15220641 NR Description: unknown protein; protein id: At1g30020.1

SEQ ID NO: 44742 - DNA, 1194 bp, Arabidopsis thaliana
  misc_feature (1)..(1194): Ceres Seq. ID no. 13509620
  misc_feature: MA Experiment ID: 20000179 Result: Up-regulated in Transcription
  misc_feature: MA Experiment 20000179 PARAMETER Experiment Name: At_Germinating_Seeds_P Parameter: Age (hr) Value: 6 vs. 0
  misc_feature: MA Experiment 20000179 PARAMETER Experiment Name: At_Germinating_Seeds_P Parameter: Tissue Value: Germinating Seeds
  misc_feature: MA Experiment ID: 20000180 Result: Up-regulated in Transcription
  misc_feature: MA Experiment 20000180 PARAMETER Experiment Name: At_Germinating_Seeds_P Parameter: Age (hr) Value: 24 vs. 0
  misc_feature: MA Experiment 20000180 PARAMETER Experiment Name: At_Germinating_Seeds_P Parameter: Tissue Value: Germinating Seeds
  misc_feature: MA Experiment ID: 20000184 Result: Down-regulated in Transcription
  misc_feature: MA Experiment 20000184 PARAMETER Experiment Name: At_Shoots__P Parameter: Age (day) Value: 7
  misc_feature: MA Experiment 20000184 PARAMETER Experiment Name: At_Shoots__P Parameter: Tissue Value: Shoots vs. Whole Plant
  misc_feature: MA Experiment ID: 20000185 Result: Down-regulated in Transcription
  misc_feature: MA Experiment 20000185 PARAMETER Experiment Name: At_Roots__P Parameter: Age (day) Value: 7 vs. 21
  misc_feature: MA Experiment 20000185 PARAMETER Experiment Name: At_Roots__P Parameter: Organism Value: A. thaliana
  misc_feature: MA Experiment 20000185 PARAMETER Experiment Name: At_Roots__P Parameter: Tissue Value: Roots vs. Whole Plant
  misc_feature: MA Experiment ID: 20000439 Result: Down-regulated in Transcription
  misc_feature: MA Experiment 20000439 PARAMETER Experiment Name: At_Roots__P Parameter: Age (day) Value: 14 vs. 21
  misc_feature: MA Experiment 20000439 PARAMETER Experiment Name: At_Roots__P Parameter: Organism Value: A. thaliana
  misc_feature: MA Experiment 20000439 PARAMETER Experiment Name: At_Roots__P Parameter: Tissue Value: Roots vs. Whole Plant
  misc_feature: MA Experiment ID: 20001451 Result: Down-regulated in Transcription
  misc_feature: MA Experiment 20001451 PARAMETER Experiment Name: At_Far-red-induction_P Parameter: Age (day) Value: 7
  misc_feature: MA Experiment 20001451 PARAMETER Experiment Name: At_Far-red-induction_P Parameter: Light Value: Far-red vs. White
  misc_feature: MA Experiment 20001451 PARAMETER Experiment Name: At_Far-red-induction_P Parameter: Organism Value: A. thaliana
  misc_feature: MA Experiment 20001451 PARAMETER Experiment Name: At_Far-red-induction_P Parameter: Plant Line Value: Columbia
  misc_feature: MA Experiment 20001451 PARAMETER Experiment Name: At_Far-red-induction_P Parameter: Timepoint (hr) Value: 24
  misc_feature: MA Experiment 20001451 PARAMETER Experiment Name: At_Far-red-induction_P Parameter: Tissue Value: Whole Plant
  misc_feature: MA Experiment ID: 20001557 Result: Down-regulated in Transcription
  misc_feature: MA Experiment 20001557 PARAMETER Experiment Name: At_Drought_Soil_Dry_P Parameter: Age (day) Value: 27
  misc_feature: MA Experiment 20001557 PARAMETER Experiment Name: At_Drought_Soil_Dry_P Parameter: Organism Value: A. thaliana
  misc_feature: MA Experiment 20001557 PARAMETER Experiment Name: At_Drought_Soil_Dry_P Parameter: Plant Line Value: WS
  misc_feature: MA Experiment 20001557 PARAMETER Experiment Name: At_Drought_Soil_Dry_P Parameter: Post Timepoint (hr) Value: 3
  misc_feature: MA Experiment 20001557 PARAMETER Experiment Name: At_Drought_Soil_Dry_P Parameter: Post-Treatment Value: Re-Water vs. No Drought
  misc_feature: MA Experiment 20001557 PARAMETER Experiment Name: At_Drought_Soil_Dry_P Parameter: Timepoint (day) Value: 13
  misc_feature: MA Experiment 20001557 PARAMETER Experiment Name: At_Drought_Soil_Dry_P Parameter: Treatment Value: Drought vs. No Drought
  misc_feature: MA Experiment ID: 20001905 Result: Down-regulated in Transcription
  misc_feature: MA Experiment 20001905 PARAMETER Experiment Name: At_Drought_Reproduction_P Parameter: Age (day) Value: 40
  misc_feature: MA Experiment 20001905 PARAMETER Experiment Name: At_Drought_Reproduction_P Parameter: Organism Value: A. thaliana
  misc_feature: MA Experiment 20001905 PARAMETER Experiment Name: At_Drought_Reproduction_P Parameter: Plant Line Value: WS
  misc_feature: MA Experiment 20001905 PARAMETER Experiment Name: At_Drought_Reproduction_P Parameter: Timepoint (day) Value: 10
  misc_feature: MA Experiment 20001905 PARAMETER Experiment Name: At_Drought_Reproduction_P Parameter: Tissue Value: Rosettes
  misc_feature: MA Experiment 20001905 PARAMETER Experiment Name: At_Drought_Reproduction_P Parameter: Treatment Value: Drought vs. No Drought
atggctgtgactctgagattaacgaattctttagcattttccagtcatcctctaacgtcgtccgtactgttccgaggaagcaaatcgatcggtactattactaagatagcatcaacaatcaggacggtaaaaatggcggcttttgctgggtctgactcagaaacaacgtcgtctacctcgagagttatcgattctcatctccacatttgggcttctcctcaagaggccgagacatatccttattttcctggccaagaacctactttgactggtgatgtcaatttcttgcttaagaacatggaagaggcaagagtagatggagctctcattgtgcaacccataaatcacaagtttgaccattctttagtaacaagtgttctgaagagatacccatcaaagtttgtcggttgttgccttgctaatcctgcagaagatggcagtggaattacgcaccttgagaatcttgttttagagagtaattatcgtgctgttcggtttaatccctacttgtggccatcgggtcagaagatgacaaatgctgttggtaaagccttgttctctaaagcaggggagctttgtgtgcctgttggcttcatgtgcatgaagggtctagatcttcacattgcagaaattgaggaactttgcacagaatttccaaagacaactgttttactagatcacgctggattctgcaaagtaccagaaagtggtgaggcaaagcttgcttattctcaactcatgaagctgtctagatttccacaggtatatgtgaaattcagtgctctattcaggatctcaagaaccggcttcccgtatcaggacctatcgcctctcctatctcaacttgtgtcccattttggggcaaatcgtgtcatgtggggcagtgacttcccatttgttgttcttgaatgtggatataaagaagctaaagaagctgtgactatcattgcaaaagaagcatccttgtcaagttctgagatggactggattctgggaaagactctgatgcagctcttccctggacaatgggttcttccttgagaggcttgtcagaagtaataggttgcatgcggatgagataatgaagcaagcaatggaagttgtatcattaaagatacttaactctagcctatatattaccaaacactagatgtataccaatttagtaaatcaacaaaaatnttatgtgttgat

SEQ ID NO: 44743 - protein, 346 aa, Arabidopsis thaliana
  peptide (1)..(346): Ceres Seq. ID no. 13509621
  misc_feature (62)..(339): Pfam Name: Amidohydrolase Pfam Description: Amidohydrolase
  misc_feature (62)..(306): Homolog of NCBI NO: 23108180 NR Description: hypothetical protein [Novosphingobium
  misc_feature (56)..(300): Homolog of NCBI NO: 27377369 NR Description: blr2258 [Bradyrhizobium japonicum]
  misc_feature (1)..(124): Homolog of NCBI NO: 25370786 NR Description: hypothetical protein At2g35450 [imported] -
  misc_feature (177)..(346): Homolog of NCBI NO: 25370785 NR Description: hypothetical protein At2g35440 [imported] -
  misc_feature (45)..(346): Homolog of NCBI NO: 34146876 NR Description: At2g35450 [Arabidopsis thaliana]
  misc_feature (45)..(346): Homolog of NCBI NO: 30686415 NR Description: expressed protein [Arabidopsis thaliana]
MAVTLRLTNSLAFSSHPLTSSVLFRGSKSIGTITKIASTIRTVKMAAFAGSDSETTSSTSRVIDSHLHIWASPQEAETYPYFPGQEPTLTGDVNFLLKNMEEARVDGALIVQPINHKFDHSLVTSVLKRYPSKFVGCCLANPAEDGSGITHLENLVLESNYRAVRFNPYLWPSGQKMTNAVGKALFSKAGELCVPVGFMCMKGLDLHIAEIEELCTEFPKTTVLLDHAGFCKVPESGEAKLAYSQLMKLSRFPQVYVKFSALFRISRTGFPYQDLSPLLSQLVSHFGANRVMWGSDFPFVVLECGYKEAKEAVTIIAKEASLSSSEMDWILGKTLMQLFPGQWVLP

SEQ ID NO: 44744 - protein, 302 aa, Arabidopsis thaliana
  peptide (1)..(302): Ceres Seq. ID no. 13509622
  misc_feature (18)..(295): Pfam Name: Amidohydrolase Pfam Description: Amidohydrolase
  misc_feature (18)..(262): Homolog of NCBI NO: 23108180 NR Description: hypothetical protein [Novosphingobium
  misc_feature (12)..(256): Homolog of NCBI NO: 27377369 NR Description: blr2258 [Bradyrhizobium japonicum]
  misc_feature (1)..(80): Homolog of NCBI NO: 25370786 NR Description: hypothetical protein At2g35450 [imported] -
  misc_feature (133)..(302): Homolog of NCBI NO: 25370785 NR Description: hypothetical protein At2g35440 [imported] -
  misc_feature (1)..(302): Homolog of NCBI NO: 34146876 NR Description: At2g35450 [Arabidopsis thaliana]
  misc_feature (1)..(302): Homolog of NCBI NO: 30686415 NR Description: expressed protein [Arabidopsis thaliana]
MAAFAGSDSETTSSTSRVIDSHLHIWASPQEAETYPYFPGQEPTLTGDVNFLLKNMEEARVDGALIVQPINHKFDHSLVTSVLKRYPSKFVGCCLANPAEDGSGITHLENLVLESNYRAVRFNPYLWPSGQKMTNAVGKALFSKAGELCVPVGFMCMKGLDLHIAEIEELCTEFPKTTVLLDHAGFCKVPESGEAKLAYSQLMKLSRFPQVYVKFSALFRISRTGFPYQDLSPLLSQLVSHFGANRVMWGSDFPFVVLECGYKEAKEAVTIIAKEASLSSSEMDWILGKTLMQLFPGQWVLP

SEQ ID NO: 44745 - protein, 247 aa, Arabidopsis thaliana
  peptide (1)..(247): Ceres Seq. ID no. 13509623
  misc_feature (1)..(240): Pfam Name: Amidohydrolase Pfam Description: Amidohydrolase
  misc_feature (1)..(207): Homolog of NCBI NO: 23108180 NR Description: hypothetical protein [Novosphingobium
  misc_feature (1)..(201): Homolog of NCBI NO: 27377369 NR Description: blr2258 [Bradyrhizobium japonicum]
  misc_feature (1)..(25): Homolog of NCBI NO: 25370786 NR Description: hypothetical protein At2g35450 [imported] -
  misc_feature (78)..(247): Homolog of NCBI NO: 25370785 NR Description: hypothetical protein At2g35440 [imported] -
  misc_feature (1)..(247): Homolog of NCBI NO: 34146876 NR Description: At2g35450 [Arabidopsis thaliana]
  misc_feature (1)..(247): Homolog of NCBI NO: 30686415 NR Description: expressed protein [Arabidopsis thaliana]
MEEARVDGALIVQPINHKFDHSLVTSVLKRYPSKFVGCCLANPAEDGSGITHLENLVLESNYRAVRFNPYLWPSGQKMTNAVGKALFSKAGELCVPVGFMCMKGLDLHIAEIEELCTEFPKTTVLLDHAGFCKVPESGEAKLAYSQLMKLSRFPQVYVKFSALFRISRTGFPYQDLSPLLSQLVSHFGANRVMWGSDFPFVVLECGYKEAKEAVTIIAKEASLSSSEMDWILGKTLMQLFPGQWVLP

SEQ ID NO: 44746 - DNA, 1476 bp, Arabidopsis thaliana
  misc_feature (1)..(1476): Ceres Seq. ID no. 12489029
  misc_feature: MA Experiment ID: 20001905 Result: Up-regulated in Transcription
  misc_feature: MA Experiment 20001905 PARAMETER Experiment Name: At_Drought_Reproduction_P Parameter: Age (day) Value: 40
  misc_feature: MA Experiment 20001905 PARAMETER Experiment Name: At_Drought_Reproduction_P Parameter: Organism Value: A. thaliana
  misc_feature: MA Experiment 20001905 PARAMETER Experiment Name: At_Drought_Reproduction_P Parameter: Plant Line Value: WS
  misc_feature: MA Experiment 20001905 PARAMETER Experiment Name: At_Drought_Reproduction_P Parameter: Timepoint (day) Value: 10
  misc_feature: MA Experiment 20001905 PARAMETER Experiment Name: At_Drought_Reproduction_P Parameter: Tissue Value: Rosettes
  misc_feature: MA Experiment 20001905 PARAMETER Experiment Name: At_Drought_Reproduction_P Parameter: Treatment Value: Drought vs. No Drought
aacggtggaaacagccttccctcttccctagtctcccacgcttctgtttcgcattttcccccattttctccggcgacggccaatcatcatcaaccgccggcgaaaacctcagattcgtgaatctgattcattcattccgtgattaagatgggtgtagattactacaatatactaaaggtgaatcacaacgcgacggaggatgatctcaagaaagcttacaagcgtctcgccatgatttggcatcccgataagaatccatcgacgcgtcgagacgaagctgaagccaaattcaaacggatctccgaagcttacgatgttctctctgatcctcagaaacgtcagatctacgatctttacggcgaggaaggtcttaaatctggcaaaatccctaattcttcttcatcggaggcttcttcttcttcttcttcttcctcctcgagatatcctcactttcatcagcacaggccgcagcatccgcctaacgcttcgtcgtttcgttttaaccctagagacgcggaggacatctatgctgagttctttggatctgaaaatggtggaggaagcaataatgctggtgggagaggaaacagagcgtttaggaatggtcatttcaacaccggtggtgccaatggttatagcggtgagatgaggaaagttccagctatggagaatccattgcctgtgagtttggaggatctgtataaaggtgtggtgaagaagatgcggataactagaaatgtctatgatgcttctgggagaatgatggtagaggcggagatattgcctatagaaataaaacctggttggaagaaaggaacaaagctgacatttcctaagaaaggcaatgaagagcctggaatcataccagcagatattgtattcgtggttgaagagaagccacatcctgtttacaagagagatgggaacgatcttttggtcagtcaggagataactctacttgaagctttaactggtaagactgtcaatctgatcacgcttgatggaaggactctcatgatcccattgacggagatcattaaacctgatcatgagattgttgttccaaacgaaggaatgcctatctctaaagaacctggaaaaaagggtaacttgaaactgaagcttagtgtgaaatacccgtcgaggctcacatcggatcagaaattcgagctaaagagagttcttggtggggtctcatgaggaagtcattgatgaatgtagatagcaaaagtagaggagatgatagattgtgaatggtaggagggattcttctaaggaggcttggatttgagagccgaagaaccaacacaagctttgcttctgtctttttacttctcttgtttgaaattagacctttttcccctttgtttaattatttcattgatttgatttgatttcgctgccttctaatgtttagagagtgtgtactccaaggtatgctttgttacctatttatcttatttgataaaaatttct

SEQ ID NO: 44747 - protein, 350 aa, Arabidopsis thaliana
  peptide (1)..(350): Ceres Seq. ID no. 12489030
  misc_feature (224)..(346): Pfam Name: DnaJ C terminal region Pfam Description: DnaJ C terminal region
  misc_feature (1)..(347): Homolog of NCBI NO: 11863723 NR Description: DnaJ like protein [Lycopersicon esculentum]
  misc_feature (1)..(94): Homolog of NCBI NO: 15231987 NR Description: putative heat shock protein
  misc_feature (114)..(345): Homolog of NCBI NO: 15231987 NR Description: putative heat shock protein
  misc_feature (1)..(94): Homolog of NCBI NO: 21618097 NR Description: putative heat shock protein [Arabidopsis thaliana]
  misc_feature (114)..(345): Homolog of NCBI NO: 21618097 NR Description: putative heat shock protein [Arabidopsis thaliana]
  misc_feature (1)..(347): Homolog of NCBI NO: 6179940 NR Description: DnaJ-like protein [Nicotiana tabacum]
  misc_feature (1)..(348): Homolog of NCBI NO: 21593202 NR Description: putative heat-shock protein [Arabidopsis thaliana]
  misc_feature (1)..(348): Homolog of NCBI NO: 15218515 NR Description: putative heat-shock protein
  misc_feature (1)..(347): Homolog of NCBI NO: 15225377 NR Description: putative heat shock protein
  misc_feature (1)..(350): Homolog of NCBI NO: 15228294 NR Description: heat shock protein-like protein; protein id:
MGVDYYNILKVNHNATEDDLKKAYKRLAMIWHPDKNPSTRRDEAEAKFKRISEAYDVLSDPQKRQIYDLYGEEGLKSGKIPNSSSSEASSSSSSSSSRYPHFHQHRPQHPPNASSFRFNPRDAEDIYAEFFGSENGGGSNNAGGRGNRAFRNGHFNTGGANGYSGEMRKVPAMENPLPVSLEDLYKGVVKKMRITRNVYDASGRMMVEAEILPIEIKPGWKKGTKLTFPKKGNEEPGIIPADIVFVVEEKPHPVYKRDGNDLLVSQEITLLEALTGKTVNLITLDGRTLMIPLTEIIKPDHEIVVPNEGMPISKEPGKKGNLKLKLSVKYPSRLTSDQKFELKRVLGGVS

SEQ ID NO: 44748 - protein, 322 aa, Arabidopsis thaliana
  peptide (1)..(322): Ceres Seq. ID no. 12489031
  misc_feature (196)..(318): Pfam Name: DnaJ C terminal region Pfam Description: DnaJ C terminal region
  misc_feature (1)..(319): Homolog of NCBI NO: 11863723 NR Description: DnaJ like protein [Lycopersicon esculentum]
  misc_feature (1)..(66): Homolog of NCBI NO: 15231987 NR Description: putative heat shock protein
  misc_feature (86)..(317): Homolog of NCBI NO: 15231987 NR Description: putative heat shock protein
  misc_feature (1)..(66): Homolog of NCBI NO: 21618097 NR Description: putative heat shock protein [Arabidopsis thaliana]
  misc_feature (86)..(317): Homolog of NCBI NO: 21618097 NR Description: putative heat shock protein [Arabidopsis thaliana]
  misc_feature (1)..(319): Homolog of NCBI NO: 6179940 NR Description: DnaJ-like protein [Nicotiana tabacum]
  misc_feature (1)..(320): Homolog of NCBI NO: 21593202 NR Description: putative heat-shock protein [Arabidopsis thaliana]
  misc_feature (1)..(320): Homolog of NCBI NO: 15218515 NR Description: putative heat-shock protein
  misc_feature (1)..(319): Homolog of NCBI NO: 15225377 NR Description: putative heat shock protein
  misc_feature (1)..(322): Homolog of NCBI NO: 15228294 NR Description: heat shock protein-like protein; protein id:
MIWHPDKNPSTRRDEAEAKFKRISEAYDVLSDPQKRQIYDLYGEEGLKSGKIPNSSSSEASSSSSSSSSRYPHFHQHRPQHPPNASSFRFNPRDAEDIYAEFFGSENGGGSNNAGGRGNRAFRNGHFNTGGANGYSGEMRKVPAMENPLPVSLEDLYKGVVKKMRITRNVYDASGRMMVEAEILPIEIKPGWKKGTKLTFPKKGNEEPGIIPADIVFVVEEKPHPVYKRDGNDLLVSQEITLLEALTGKTVNLITLDGRTLMIPLTEIIKPDHEIVVPNEGMPISKEPGKKGNLKLKLSVKYPSRLTSDQKFELKRVLGGVS

SEQ ID NO: 44749 - protein, 184 aa, Arabidopsis thaliana
  peptide (1)..(184): Ceres Seq. ID no. 12489032
  misc_feature (58)..(180): Pfam Name: DnaJ C terminal region Pfam Description: DnaJ C terminal region
  misc_feature (1)..(181): Homolog of NCBI NO: 15225376 NR Description: putative heat shock protein; protein id:
  misc_feature (1)..(182): Homolog of NCBI NO: 34905276 NR Description: putative heat shock protein
  misc_feature (1)..(181): Homolog of NCBI NO: 11863723 NR Description: DnaJ like protein [Lycopersicon esculentum]
  misc_feature (1)..(179): Homolog of NCBI NO: 15231987 NR Description: putative heat shock protein
  misc_feature (1)..(179): Homolog of NCBI NO: 21618097 NR Description: putative heat shock protein [Arabidopsis thaliana]
  misc_feature (1)..(181): Homolog of NCBI NO: 6179940 NR Description: DnaJ-like protein [Nicotiana tabacum]
  misc_feature (1)..(182): Homolog of NCBI NO: 21593202 NR Description: putative heat-shock protein [Arabidopsis thaliana]
  misc_feature (1)..(182): Homolog of NCBI NO: 15218515 NR Description: putative heat-shock protein
  misc_feature (1)..(181): Homolog of NCBI NO: 15225377 NR Description: putative heat shock protein
  misc_feature (1)..(184): Homolog of NCBI NO: 15228294 NR Description: heat shock protein-like protein; protein id:
MRKVPAMENPLPVSLEDLYKGVVKKMRITRNVYDASGRMMVEAEILPIEIKPGWKKGTKLTFPKKGNEEPGIIPADIVFVVEEKPHPVYKRDGNDLLVSQEITLLEALTGKTVNLITLDGRTLMIPLTEIIKPDHEIVVPNEGMPISKEPGKKGNLKLKLSVKYPSRLTSDQKFELKRVLGGVS

SEQ ID NO: 44750 - DNA, 1547 bp, Arabidopsis thaliana
  misc_feature (1)..(1547): Ceres Seq. ID no. 13509870
  misc_feature: MA Experiment ID: 20000264 Result: Up-regulated in Transcription
  misc_feature: MA Experiment 20000264 PARAMETER Experiment Name: At_Open_Flower_P Parameter: Age (day) Value: 21
  misc_feature: MA Experiment 20000264 PARAMETER Experiment Name: At_Open_Flower_P Parameter: Plant Line Value: WS
  misc_feature: MA Experiment 20000264 PARAMETER Experiment Name: At_Open_Flower_P Parameter: Tissue Value: Open Flower vs. Whole Plant
  misc_feature: MA Experiment ID: 20000265 Result: Up-regulated in Transcription
  misc_feature: MA Experiment 20000265 PARAMETER Experiment Name: At_Open_Flower_P Parameter: Age (day) Value: 21
  misc_feature: MA Experiment 20000265 PARAMETER Experiment Name: At_Open_Flower_P Parameter: Plant Line Value: WS
  misc_feature: MA Experiment 20000265 PARAMETER Experiment Name: At_Open_Flower_P Parameter: Tissue Value: Closed Flower vs. Whole Plant
  misc_feature: MA Experiment ID: 20000437 Result: Down-regulated in Transcription
  misc_feature: MA Experiment 20000437 PARAMETER Experiment Name: At_Drought_P Parameter: Age (day) Value: 8
  misc_feature: MA Experiment 20000437 PARAMETER Experiment Name: At_Drought_P Parameter: Organism Value: A. thaliana
  misc_feature: MA Experiment 20000437 PARAMETER Experiment Name: At_Drought_P Parameter: Plant Line Value: WS
  misc_feature: MA Experiment 20000437 PARAMETER Experiment Name: At_Drought_P Parameter: Timepoint (hr) Value: 24
  misc_feature: MA Experiment 20000437 PARAMETER Experiment Name: At_Drought_P Parameter: Tissue Value: Whole Plant
  misc_feature: MA Experiment 20000437 PARAMETER Experiment Name: At_Drought_P Parameter: Treatment Value: Drought vs. No Drought
atgagctcgtcgtctaaaattgattcagagaagccagttatggtttccgagtcactattttctaccaagactcctatcaaaaccgttaaaaggcagatcttttcttcgtccccaaaacctgaatctgttataaaattgcccgaaaggttcgagattttggaggaatttttcaatggtttggatactgcaattaggctgcttaaattaaagggttcgtcaacgacatacgctaatatatgtcccaagatcgagtatcttactaatcggatcttctcgtatgatcatttggctcagatgaagcatatttatccggaagctattgaactaaagagagttttgaagtttgttgaagacacttgttgtatgaaacctaggcttcatattaaattaaataccgatgcaattgtagttgaggataccatttgtggaactaaatacatggaacttagaaaggtgtttcactcaaagcttgtagattttcgcaaagctcatcctaaggacgaaattccgaaagaactgcttcctgaaccattcaattctcctcaaagggatagttattcaggtatagtaagcgtaggcttaggagaacctaaacttgaagttggagggtttgatgttcatatggaggagatagagcaagaagaacaagatgttaacaaagtcattcctgattctactttgtcacacatagaatcaagaatagttgaaaccccagtcaaagatttatccactccctccaaagacttgtccacgccaatccggctcatgagtgctacaccgacgttgcagctatctaaaagatgtattgagttgactccagagggtggtgatgataactctcttagatcaacaaatagtctagcaaggggtccatctcgcagtctgaattttgatacttttgaggaagatgcaattgagaaagatgatattggtaacgaatctgatgataaaggaatcaactatgaagaagatggccttctccagtcagtaaaaggtccatctcgcagtttgaattttgacactcttgaggaagaaacaattgtgaaagatgacattagtaacgaatctggtgatgaaaaaagcaactatgaaggtgataatgcttctgatgatgatagcctccttcagtcaatgatagagagaccaaagactgaacccgagaagcacaatttgccacagcttgttaatttgattcatagagtgtttcactcaacaaatcggacagtcatcacgaaggaggagcttctttacaagattattgcaaaccaaatcaatataactgatagaagggaagtggaagaacaattaagtctgatgttgcaattggtcccggattggatatctgaaacaaaagcatcttctggggatcttcttgttcgcatcaataaaatgtcgactgccgaaacagtacgtgcaagacttgaagaagcaacttcacatgacatttcacttatctactgaaaaaccataaagctgaaacttttttttgtgtgttttcatcctcttcaccaattcaattatcattattcttcacaaatatcttcttt

SEQ ID NO: 44751 - protein, 486 aa, Arabidopsis thaliana
  peptide (1)..(486): Ceres Seq. ID no. 13509871
  misc_feature (2)..(276): Homolog of NCBI NO: 40539114 NR Description: expressed protein [Oryza sativa (japonica
  misc_feature (226)..(483): Homolog of NCBI NO: 38567811 NR Description: CDT1a protein [Arabidopsis thaliana]
  misc_feature (226)..(483): Homolog of NCBI NO: 22530894 NR Description: hypothetical protein [Arabidopsis thaliana]
  misc_feature (226)..(483): Homolog of NCBI NO: 15224645 NR Description: expressed protein [Arabidopsis thaliana]
  misc_feature (2)..(388): Homolog of NCBI NO: 22530894 NR Description: hypothetical protein [Arabidopsis thaliana]
  misc_feature (2)..(388): Homolog of NCBI NO: 15224645 NR Description: expressed protein [Arabidopsis thaliana]
  misc_feature (2)..(388): Homolog of NCBI NO: 38567811 NR Description: CDT1a protein [Arabidopsis thaliana]
  misc_feature (390)..(477): Homolog of NCBI NO: 38344618 NR Description: OSJNBb0003A12.4 [Oryza sativa (japonica
  misc_feature (26)..(341): Homolog of NCBI NO: 38344618 NR Description: OSJNBb0003A12.4 [Oryza sativa (japonica
  misc_feature (1)..(486): Homolog of NCBI NO: 15232570 NR Description: hypothetical protein [Arabidopsis thaliana]
  misc_feature (2)..(276): Homolog of NCBI NO: 40539114 NR Description: expressed protein [Oryza sativa (japonica
  misc_feature (226)..(483): Homolog of NCBI NO: 38567811 NR Description: CDT1a protein [Arabidopsis thaliana]
  misc_feature (226)..(483): Homolog of NCBI NO: 22530894 NR Description: hypothetical protein [Arabidopsis thaliana]
  misc_feature (226)..(483): Homolog of NCBI NO: 15224645 NR Description: expressed protein [Arabidopsis thaliana]
  misc_feature (2)..(388): Homolog of NCBI NO: 22530894 NR Description: hypothetical protein [Arabidopsis thaliana]
  misc_feature (2)..(388): Homolog of NCBI NO: 15224645 NR Description: expressed protein [Arabidopsis thaliana]
  misc_feature (2)..(388): Homolog of NCBI NO: 38567811 NR Description: CDT1a protein [Arabidopsis thaliana]
  misc_feature (390)..(477): Homolog of NCBI NO: 38344618 NR Description: OSJNBb0003A12.4 [Oryza sativa (japonica
  misc_feature (26)..(341): Homolog of NCBI NO: 38344618 NR Description: OSJNBb0003A12.4 [Oryza sativa (japonica
  misc_feature (1)..(486): Homolog of NCBI NO: 15232570 NR Description: hypothetical protein [Arabidopsis thaliana]
MSSSSKIDSEKPVMVSESLFSTKTPIKTVKRQIFSSSPKPESVIKLPERFEILEEFFNGLDTAIRLLKLKGSSTTYANICPKIEYLTNRIFSYDHLAQMKHIYPEAIELKRVLKFVEDTCCMKPRLHIKLNTDAIVVEDTICGTKYMELRKVFHSKLVDFRKAHPKDEIPKELLPEPFNSPQRDSYSGIVSVGLGEPKLEVGGFDVHMEEIEQEEQDVNKVIPDSTLSHIESRIVETPVKDLSTPSKDLSTPIRLMSATPTLQLSKRCIELTPEGGDDNSLRSTNSLARGPSRSLNFDTFEEDAIEKDDIGNESDDKGINYEEDGLLQSVKGPSRSLNFDTLEEETIVKDDISNESGDEKSNYEGDNASDDDSLLQSMIERPKTEPEKHNLPQLVNLIHRVFHSTNRTVITKEELLYKIIANQINITDRREVEEQLSLMLQLVPDWISETKASSGDLLVRINKMSTAETVRARLEEATSHDISLIY

SEQ ID NO: 44752 - protein, 473 aa, Arabidopsis thaliana
  peptide (1)..(473): Ceres Seq. ID no. 13509872
  misc_feature (1)..(263): Homolog of NCBI NO: 40539114 NR Description: expressed protein [Oryza sativa (japonica
  misc_feature (213)..(470): Homolog of NCBI NO: 38567811 NR Description: CDT1a protein [Arabidopsis thaliana]
  misc_feature (213)..(470): Homolog of NCBI NO: 22530894 NR Description: hypothetical protein [Arabidopsis thaliana]
  misc_feature (213)..(470): Homolog of NCBI NO: 15224645 NR Description: expressed protein [Arabidopsis thaliana]
  misc_feature (1)..(375): Homolog of NCBI NO: 22530894 NR Description: hypothetical protein [Arabidopsis thaliana]
  misc_feature (1)..(375): Homolog of NCBI NO: 15224645 NR Description: expressed protein [Arabidopsis thaliana]
  misc_feature (1)..(375): Homolog of NCBI NO: 38567811 NR Description: CDT1a protein [Arabidopsis thaliana]
  misc_feature (377)..(464): Homolog of NCBI NO: 38344618 NR Description: OSJNBb0003A12.4 [Oryza sativa (japonica
  misc_feature (13)..(328): Homolog of NCBI NO: 38344618 NR Description: OSJNBb0003A12.4 [Oryza sativa (japonica
  misc_feature (1)..(473): Homolog of NCBI NO: 15232570 NR Description: hypothetical protein [Arabidopsis thaliana]
  misc_feature (1)..(263): Homolog of NCBI NO: 40539114 NR Description: expressed protein [Oryza sativa (japonica
  misc_feature (213)..(470): Homolog of NCBI NO: 38567811 NR Description: CDT1a protein [Arabidopsis thaliana]
  misc_feature (213)..(470): Homolog of NCBI NO: 22530894 NR Description: hypothetical protein [Arabidopsis thaliana]
  misc_feature (213)..(470): Homolog of NCBI NO: 15224645 NR Description: expressed protein [Arabidopsis thaliana]
  misc_feature (1)..(375): Homolog of NCBI NO: 22530894 NR Description: hypothetical protein [Arabidopsis thaliana]
  misc_feature (1)..(375): Homolog of NCBI NO: 15224645 NR Description: expressed protein [Arabidopsis thaliana]
  misc_feature (1)..(375): Homolog of NCBI NO: 38567811 NR Description: CDT1a protein [Arabidopsis thaliana]
  misc_feature (377)..(464): Homolog of NCBI NO: 38344618 NR Description: OSJNBb0003A12.4 [Oryza sativa (japonica
  misc_feature (13)..(328): Homolog of NCBI NO: 38344618 NR Description: OSJNBb0003A12.4 [Oryza sativa (japonica
  misc_feature (1)..(473): Homolog of NCBI NO: 15232570 NR Description: hypothetical protein [Arabidopsis thaliana]
MVSESLFSTKTPIKTVKRQIFSSSPKPESVIKLPERFEILEEFFNGLDTAIRLLKLKGSSTTYANICPKIEYLTNRIFSYDHLAQMKHIYPEAIELKRVLKFVEDTCCMKPRLHIKLNTDAIVVEDTICGTKYMELRKVFHSKLVDFRKAHPKDEIPKELLPEPFNSPQRDSYSGIVSVGLGEPKLEVGGFDVHMEEIEQEEQDVNKVIPDSTLSHIESRIVETPVKDLSTPSKDLSTPIRLMSATPTLQLSKRCIELTPEGGDDNSLRSTNSLARGPSRSLNFDTFEEDAIEKDDIGNESDDKGINYEEDGLLQSVKGPSRSLNFDTLEEETIVKDDISNESGDEKSNYEGDNASDDDSLLQSMIERPKTEPEKHNLPQLVNLIHRVFHSTNRTVITKEELLYKIIANQINITDRREVEEQLSLMLQLVPDWISETKASSGDLLVRINKMSTAETVRARLEEATSHDISLIY

SEQ ID NO: 44753 - protein, 388 aa, Arabidopsis thaliana
  peptide (1)..(388): Ceres Seq. ID no. 13509873
  misc_feature (1)..(178): Homolog of NCBI NO: 40539114 NR Description: expressed protein [Oryza sativa (japonica
  misc_feature (128)..(385): Homolog of NCBI NO: 38567811 NR Description: CDT1a protein [Arabidopsis thaliana]
  misc_feature (128)..(385): Homolog of NCBI NO: 22530894 NR Description: hypothetical protein [Arabidopsis thaliana]
  misc_feature (128)..(385): Homolog of NCBI NO: 15224645 NR Description: expressed protein [Arabidopsis thaliana]
  misc_feature (1)..(290): Homolog of NCBI NO: 22530894 NR Description: hypothetical protein [Arabidopsis thaliana]
  misc_feature (1)..(290): Homolog of NCBI NO: 15224645 NR Description: expressed protein [Arabidopsis thaliana]
  misc_feature (1)..(290): Homolog of NCBI NO: 38567811 NR Description: CDT1a protein [Arabidopsis thaliana]
  misc_feature (292)..(379): Homolog of NCBI NO: 38344618 NR Description: OSJNBb0003A12.4 [Oryza sativa (japonica
  misc_feature (1)..(243): Homolog of NCBI NO: 38344618 NR Description: OSJNBb0003A12.4 [Oryza sativa (japonica
  misc_feature (1)..(388): Homolog of NCBI NO: 15232570 NR Description: hypothetical protein [Arabidopsis thaliana]
  misc_feature (1)..(178): Homolog of NCBI NO: 40539114 NR Description: expressed protein [Oryza sativa (japonica
  misc_feature (128)..(385): Homolog of NCBI NO: 38567811 NR Description: CDT1a protein [Arabidopsis thaliana]
  misc_feature (128)..(385): Homolog of NCBI NO: 22530894 NR Description: hypothetical protein [Arabidopsis thaliana]
  misc_feature (128)..(385): Homolog of NCBI NO: 15224645 NR Description: expressed protein [Arabidopsis thaliana]
  misc_feature (1)..(290): Homolog of NCBI NO: 22530894 NR Description: hypothetical protein [Arabidopsis thaliana]
  misc_feature (1)..(290): Homolog of NCBI NO: 15224645 NR Description: expressed protein [Arabidopsis thaliana]
  misc_feature (1)..(290): Homolog of NCBI NO: 38567811 NR Description: CDT1a protein [Arabidopsis thaliana]
  misc_feature (292)..(379): Homolog of NCBI NO: 38344618 NR Description: OSJNBb0003A12.4 [Oryza sativa (japonica
  misc_feature (1)..(243): Homolog of NCBI NO: 38344618 NR Description: OSJNBb0003A12.4 [Oryza sativa (japonica
  misc_feature (1)..(388): Homolog of NCBI NO: 15232570 NR Description: hypothetical protein [Arabidopsis thaliana]
MKHIYPEAIELKRVLKFVEDTCCMKPRLHIKLNTDAIVVEDTICGTKYMELRKVFHSKLVDFRKAHPKDEIPKELLPEPFNSPQRDSYSGIVSVGLGEPKLEVGGFDVHMEEIEQEEQDVNKVIPDSTLSHIESRIVETPVKDLSTPSKDLSTPIRLMSATPTLQLSKRCIELTPEGGDDNSLRSTNSLARGPSRSLNFDTFEEDAIEKDDIGNESDDKGINYEEDGLLQSVKGPSRSLNFDTLEEETIVKDDISNESGDEKSNYEGDNASDDDSLLQSMIERPKTEPEKHNLPQLVNLIHRVFHSTNRTVITKEELLYKIIANQINITDRREVEEQLSLMLQLVPDWISETKASSGDLLVRINKMSTAETVRARLEEATSHDISLIY

SEQ ID NO: 44754 - DNA, 2500 bp, Arabidopsis thaliana
  misc_feature (1)..(2500): Ceres Seq. ID no. 13503824
  misc_feature: MA Experiment ID: 20000173 Result: Down-regulated in Transcription
  misc_feature: MA Experiment 20000173 PARAMETER Experiment Name: At_42deg_Heat_P Parameter: Age (day) Value: 14
  misc_feature: MA Experiment 20000173 PARAMETER Experiment Name: At_42deg_Heat_P Parameter: Organism Value: A. thaliana
  misc_feature: MA Experiment 20000173 PARAMETER Experiment Name: At_42deg_Heat_P Parameter: Plant Line Value: WS
  misc_feature: MA Experiment 20000173 PARAMETER Experiment Name: At_42deg_Heat_P Parameter: Temperature (deg C) Value: 42 vs. 22
  misc_feature: MA Experiment 20000173 PARAMETER Experiment Name: At_42deg_Heat_P Parameter: Timepoint (hr) Value: 6
  misc_feature: MA Experiment 20000173 PARAMETER Experiment Name: At_42deg_Heat_P Parameter: Tissue Value: Aerial
  misc_feature: MA Experiment ID: 20000184 Result: Down-regulated in Transcription
  misc_feature: MA Experiment 20000184 PARAMETER Experiment Name: At_Shoots__P Parameter: Age (day) Value: 7
  misc_feature: MA Experiment 20000184 PARAMETER Experiment Name: At_Shoots__P Parameter: Tissue Value: Shoots vs. Whole Plant
  misc_feature: MA Experiment ID: 20000234 Result: Up-regulated in Transcription
  misc_feature: MA Experiment 20000234 PARAMETER Experiment Name: At_Siliques_P Parameter: Age (day) Value: 21
  misc_feature: MA Experiment 20000234 PARAMETER Experiment Name: At_Siliques_P Parameter: Organism Value: A. thaliana
  misc_feature: MA Experiment 20000234 PARAMETER Experiment Name: At_Siliques_P Parameter: Plant Line Value: WS
  misc_feature: MA Experiment 20000234 PARAMETER Experiment Name: At_Siliques_P Parameter: Tissue Value: Less Than 5mm Siliques vs. Whole Plant
  misc_feature: MA Experiment ID: 20000235 Result: Up-regulated in Transcription
  misc_feature: MA Experiment 20000235 PARAMETER Experiment Name: At_Siliques_P Parameter: Age (day) Value: 21
  misc_feature: MA Experiment 20000235 PARAMETER Experiment Name: At_Siliques_P Parameter: Organism Value: A. thaliana
  misc_feature: MA Experiment 20000235 PARAMETER Experiment Name: At_Siliques_P Parameter: Plant Line Value: WS
  misc_feature: MA Experiment 20000235 PARAMETER Experiment Name: At_Siliques_P Parameter: Tissue Value: 5-10mm Siliques vs. Whole Plant
  misc_feature: MA Experiment ID: 20000264 Result: Up-regulated in Transcription
  misc_feature: MA Experiment 20000264 PARAMETER Experiment Name: At_Open_Flower_P Parameter: Age (day) Value: 21
  misc_feature: MA Experiment 20000264 PARAMETER Experiment Name: At_Open_Flower_P Parameter: Plant Line Value: WS
  misc_feature: MA Experiment 20000264 PARAMETER Experiment Name: At_Open_Flower_P Parameter: Tissue Value: Open Flower vs. Whole Plant
  misc_feature: MA Experiment ID: 20000265 Result: Up-regulated in Transcription
  misc_feature: MA Experiment 20000265 PARAMETER Experiment Name: At_Open_Flower_P Parameter: Age (day) Value: 21
  misc_feature: MA Experiment 20000265 PARAMETER Experiment Name: At_Open_Flower_P Parameter: Plant Line Value: WS
  misc_feature: MA Experiment 20000265 PARAMETER Experiment Name: At_Open_Flower_P Parameter: Tissue Value: Closed Flower vs. Whole Plant
  misc_feature: MA Experiment ID: 20000286 Result: Up-regulated in Transcription
  misc_feature: MA Experiment 20000286 PARAMETER Experiment Name: At_Open_Flower_P Parameter: Age (day) Value: 21
  misc_feature: MA Experiment 20000286 PARAMETER Experiment Name: At_Open_Flower_P Parameter: Plant Line Value: WS
  misc_feature: MA Experiment 20000286 PARAMETER Experiment Name: At_Open_Flower_P Parameter: Tissue Value: Half Open vs. Whole Plant
  misc_feature: MA Experiment ID: 20000439 Result: Up-regulated in Transcription
  misc_feature: MA Experiment 20000439 PARAMETER Experiment Name: At_Roots__P Parameter: Age (day) Value: 14 vs. 21
  misc_feature: MA Experiment 20000439 PARAMETER Experiment Name: At_Roots__P Parameter: Organism Value: A. thaliana
  misc_feature: MA Experiment 20000439 PARAMETER Experiment Name: At_Roots__P Parameter: Tissue Value: Roots vs. Whole Plant
  misc_feature: MA Experiment ID: 20000794 Result: Up-regulated in Transcription
  misc_feature: MA Experiment 20000794 PARAMETER Experiment Name: At_Petals_P Parameter: Age (day) Value: 23-25 days
  misc_feature: MA Experiment 20000794 PARAMETER Experiment Name: At_Petals_P Parameter: Plant Line Value: WS
  misc_feature: MA Experiment 20000794 PARAMETER Experiment Name: At_Petals_P Parameter: Tissue Value: Petals vs. Whole plant
  misc_feature: MA Experiment ID: 20001451 Result: Down-regulated in Transcription
  misc_feature: MA Experiment 20001451 PARAMETER Experiment Name: At_Far-red-induction_P Parameter: Age (day) Value: 7
  misc_feature: MA Experiment 20001451 PARAMETER Experiment Name: At_Far-red-induction_P Parameter: Light Value: Far-red vs. White
  misc_feature: MA Experiment 20001451 PARAMETER Experiment Name: At_Far-red-induction_P Parameter: Organism Value: A. thaliana
  misc_feature: MA Experiment 20001451 PARAMETER Experiment Name: At_Far-red-induction_P Parameter: Plant Line Value: Columbia
  misc_feature: MA Experiment 20001451 PARAMETER Experiment Name: At_Far-red-induction_P Parameter: Timepoint (hr) Value: 24
  misc_feature: MA Experiment 20001451 PARAMETER Experiment Name: At_Far-red-induction_P Parameter: Tissue Value: Whole Plant
acagtcacggagatagatagtaagagagagctatggcggaggagcacttcgacgttctgactaaatccggtgagaagaccggtgtgtccaaacccaggggagaggttcacagagatggagattaccatcgtgctgttcatgtctggatttttgtggagactactcaacagctacttctccaacttcgatctgatgataaagattcttggcctggtcaatgggacatctctagtgctggccatatatcagctggtgatacatcgcttctatctgcacagcgggagcttgaggaagagcttggcgtaaaactcccaaaggatgcatttgaaaagatcttcgtttttctgcaggaatgtgtcacaaacgatggcaaattcataaataatgagttcaatgatgtgtatcttgttactattctgcatccaatcccattagaagcctttactcttcaaaaagaggaagtctctgctgtaaagtacgtaccttacgaagaatacagaaactttctgtctaaggaagatcctgcttatgtgccatatgatgttaatggagagtatggaaaactatttgacataatcagacagaggtgccaagtgaacactgaggcccgtagtttatctctgcagaagcaactccagagatattctccagtcaccctcgaagccaagttgacagaactttctgaagcagatcagaaagcgttgggtctaattgtgaaggctgcaaaaattatggacgatatattctatgagcaggtttggaacagcaatccagccctaagagattggctgaaggatcatgccaatgcatcaaaactggacaaactaaaatgggattacttcacgatcaacaaaagtccatggtcgtctcttgatgaaaatgaagcattcttgagtactgcggattcagctgtaaagttgcttcctggagcaacaaaagccatagctggctggaagggtcttgaatatagagcagcctttccagtgactaaaccacctggtgccaatttctatcctcccgatatggataaaatggagttcaccttatggctcaatggccttacggaagagcaaaagcatgctgcaacaggatttttcagtgttataaaaaggcgaagtgaagctaatttagatgcttctgatcatcttgccagcagcacaaagaagttaccagactctaattccgatctgtatagtattccttattcagagatatatcgacctttcctcaagaaagcttctgaattcttgcagaaagctggggacttggtcagttcgccaagtttgaagaagctactgcacagcaaagctgaagccttcctttcaaatgagtattatgagtcagacatcgcatggatggacttggattcaaagttagatattaccattggtccatatgagacgtacgaggatgaaatctttgggtataaggctacatttgaaaccttcatcggtattcgagatgataaagccacagctgatctgaaactctttggtgacaatctaaagctattggaagataatctcccgcttgagagtgtatacaaatcgacagatgtatctgctgctcctattcgggtcatccagttaatttacaattccggggatgtgaagggtcctcagactgttgcttacaatttgccaaacgatgaaaaaatcgtgaaggatagaggaacatcaatggttatgctcaagaacgtccaagaggcaaagtttgaacatattttaaagcctatagctgaaatcaccatcagcaaggaacagagaggattagttgattttgattctttcttcactcacaccatttgccatgaatgttgccatggcattggtccccataccataacccttcctggtggtcaaacctcaacagtgagaaaggaactacaagaagtccattctgcaatggaagaagcaaaggcagatatagttggtctttgggcactgaagtttctcatcactaaggggttgctttcaaagagtatggtggagagtatgtatgtttcgttcctagctggttgctttagatcgatccggtttggtctcacagaagctcatgggaaagggcaagccttgcaattcaactatttatatgaaaaaggagccttcgtgttccacgaggactctacattctcggttgatttcgctaagatcgaaggtgcagttgagagcctgagccatgagatactaactattcaaggaaaaggtgacaaaaacgcagcaacattgcttctaaataagtactgcactatcaccggaccattgaaaaccgctctggagaatctcgaacgcgttaaggtaccggtggatatatctccgacatttccattagcagaagcattgatgaactgaggaaagtttcagtttcagcaagactctggttttaacttttaataaataaataaaactcagatgatccatcatcataaaccaaatttgggatttaaaagagttatctgaatggtgttgtgttcttatcataataaagttgctacctttac

SEQ ID NO: 44755 - protein, 772 aa, Arabidopsis thaliana
  peptide (1)..(772): Ceres Seq. ID no. 13503825
  misc_feature (31)..(174): Pfam Name: NUDIX domain Pfam Description: NUDIX domain
  misc_feature (31)..(174): Pfam Name: NUDIX domain Pfam Description: NUDIX domain
  misc_feature (1)..(181): Homolog of NCBI NO: 15893737 NR Description: Hydrolase of MutT (Nudix) family [Clostridium
  misc_feature (4)..(169): Homolog of NCBI NO: 16799464 NR Description: similar to different proteins [Listeria innocua]
  misc_feature (4)..(169): Homolog of NCBI NO: 16802413 NR Description: similar to different proteins [Listeria
  misc_feature (339)..(762): Homolog of NCBI NO: 29347256 NR Description: putative dipeptidyl-peptidase III
  misc_feature (1)..(107): Homolog of NCBI NO: 26450678 NR Description: unknown protein [Arabidopsis thaliana]
  misc_feature (1)..(181): Homolog of NCBI NO: 15893737 NR Description: Hydrolase of MutT (Nudix) family [Clostridium
  misc_feature (4)..(169): Homolog of NCBI NO: 16802413 NR Description: similar to different proteins [Listeria
  misc_feature (1)..(107): Homolog of NCBI NO: 26450678 NR Description: unknown protein [Arabidopsis thaliana]
  misc_feature (358)..(772): Homolog of NCBI NO: 7715590 NR Description: F20B17.11 [Arabidopsis thaliana]
  misc_feature (22)..(213): Homolog of NCBI NO: 7715590 NR Description: F20B17.11 [Arabidopsis thaliana]
  misc_feature (1)..(22): Homolog of NCBI NO: 7715590 NR Description: F20B17.11 [Arabidopsis thaliana]
  misc_feature (212)..(530): Homolog of NCBI NO: 7715590 NR Description: F20B17.11 [Arabidopsis thaliana]
  misc_feature (442)..(772): Homolog of NCBI NO: 15912329 NR Description: At1g79690/F20B17_11 [Arabidopsis thaliana]
  misc_feature (339)..(762): Homolog of NCBI NO: 29347256 NR Description: putative dipeptidyl-peptidase III
  misc_feature (4)..(169): Homolog of NCBI NO: 16799464 NR Description: similar to different proteins [Listeria innocua]
  misc_feature (442)..(772): Homolog of NCBI NO: 15912329 NR Description: At1g79690/F20B17_11 [Arabidopsis thaliana]
  misc_feature (212)..(530): Homolog of NCBI NO: 7715590 NR Description: F20B17.11 [Arabidopsis thaliana]
  misc_feature (1)..(22): Homolog of NCBI NO: 7715590 NR Description: F20B17.11 [Arabidopsis thaliana]
  misc_feature (22)..(213): Homolog of NCBI NO: 7715590 NR Description: F20B17.11 [Arabidopsis thaliana]
  misc_feature (358)..(772): Homolog of NCBI NO: 7715590 NR Description: F20B17.11 [Arabidopsis thaliana]
MAEEHFDVLTKSGEKTGVSKPRGEVHRDGDYHRAVHVWIFVETTQQLLLQLRSDDKDSWPGQWDISSAGHISAGDTSLLSAQRELEEELGVKLPKDAFEKIFVFLQECVTNDGKFINNEFNDVYLVTILHPIPLEAFTLQKEEVSAVKYVPYEEYRNFLSKEDPAYVPYDVNGEYGKLFDIIRQRCQVNTEARSLSLQKQLQRYSPVTLEAKLTELSEADQKALGLIVKAAKIMDDIFYEQVWNSNPALRDWLKDHANASKLDKLKWDYFTINKSPWSSLDENEAFLSTADSAVKLLPGATKAIAGWKGLEYRAAFPVTKPPGANFYPPDMDKMEFTLWLNGLTEEQKHAATGFFSVIKRRSEANLDASDHLASSTKKLPDSNSDLYSIPYSEIYRPFLKKASEFLQKAGDLVSSPSLKKLLHSKAEAFLSNEYYESDIAWMDLDSKLDITIGPYETYEDEIFGYKATFETFIGIRDDKATADLKLFGDNLKLLEDNLPLESVYKSTDVSAAPIRVIQLIYNSGDVKGPQTVAYNLPNDEKIVKDRGTSMVMLKNVQEAKFEHILKPIAEITISKEQRGLVDFDSFFTHTICHECCHGIGPHTITLPGGQTSTVRKELQEVHSAMEEAKADIVGLWALKFLITKGLLSKSMVESMYVSFLAGCFRSIRFGLTEAHGKGQALQFNYLYEKGAFVFHEDSTFSVDFAKIEGAVESLSHEILTIQGKGDKNAATLLLNKYCTITGPLKTALENLERVKVPVDISPTFPLAEALMN

SEQ ID NO: 44756 - protein, 539 aa, Arabidopsis thaliana
  peptide (1)..(539): Ceres Seq. ID no. 13503826
  misc_feature (106)..(529): Homolog of NCBI NO: 29347256 NR Description: putative dipeptidyl-peptidase III
  misc_feature (209)..(539): Homolog of NCBI NO: 15912329 NR Description: At1g79690/F20B17_11 [Arabidopsis thaliana]
  misc_feature (1)..(297): Homolog of NCBI NO: 7715590 NR Description: F20B17.11 [Arabidopsis thaliana]
  misc_feature (125)..(539): Homolog of NCBI NO: 7715590 NR Description: F20B17.11 [Arabidopsis thaliana]
  misc_feature (106)..(529): Homolog of NCBI NO: 29347256 NR Description: putative dipeptidyl-peptidase III
  misc_feature (209)..(539): Homolog of NCBI NO: 15912329 NR Description: At1g79690/F20B17_11 [Arabidopsis thaliana]
  misc_feature (1)..(297): Homolog of NCBI NO: 7715590 NR Description: F20B17.11 [Arabidopsis thaliana]
  misc_feature (125)..(539): Homolog of NCBI NO: 7715590 NR Description: F20B17.11 [Arabidopsis thaliana]
MDDIFYEQVWNSNPALRDWLKDHANASKLDKLKWDYFTINKSPWSSLDENEAFLSTADSAVKLLPGATKAIAGWKGLEYRAAFPVTKPPGANFYPPDMDKMEFTLWLNGLTEEQKHAATGFFSVIKRRSEANLDASDHLASSTKKLPDSNSDLYSIPYSEIYRPFLKKASEFLQKAGDLVSSPSLKKLLHSKAEAFLSNEYYESDIAWMDLDSKLDITIGPYETYEDEIFGYKATFETFIGIRDDKATADLKLFGDNLKLLEDNLPLESVYKSTDVSAAPIRVIQLIYNSGDVKGPQTVAYNLPNDEKIVKDRGTSMVMLKNVQEAKFEHILKPIAEITISKEQRGLVDFDSFFTHTICHECCHGIGPHTITLPGGQTSTVRKELQEVHSAMEEAKADIVGLWALKFLITKGLLSKSMVESMYVSFLAGCFRSIRFGLTEAHGKGQALQFNYLYEKGAFVFHEDSTFSVDFAKIEGAVESLSHEILTIQGKGDKNAATLLLNKYCTITGPLKTALENLERVKVPVDISPTFPLAEALMN

SEQ ID NO: 44757 - protein, 442 aa, Arabidopsis thaliana
  peptide (1)..(442): Ceres Seq. ID no. 13503827
  misc_feature (9)..(432): Homolog of NCBI NO: 29347256 NR Description: putative dipeptidyl-peptidase III
  misc_feature (112)..(442): Homolog of NCBI NO: 15912329 NR Description: At1g79690/F20B17_11 [Arabidopsis thaliana]
  misc_feature (1)..(200): Homolog of NCBI NO: 7715590 NR Description: F20B17.11 [Arabidopsis thaliana]
  misc_feature (28)..(442): Homolog of NCBI NO: 7715590 NR Description: F20B17.11 [Arabidopsis thaliana]
  misc_feature (9)..(432): Homolog of NCBI NO: 29347256 NR Description: putative dipeptidyl-peptidase III
  misc_feature (112)..(442): Homolog of NCBI NO: 15912329 NR Description: At1g79690/F20B17_11 [Arabidopsis thaliana]
  misc_feature (1)..(200): Homolog of NCBI NO: 7715590 NR Description: F20B17.11 [Arabidopsis thaliana]
  misc_feature (28)..(442): Homolog of NCBI NO: 7715590 NR Description: F20B17.11 [Arabidopsis thaliana]
MDKMEFTLWLNGLTEEQKHAATGFFSVIKRRSEANLDASDHLASSTKKLPDSNSDLYSIPYSEIYRPFLKKASEFLQKAGDLVSSPSLKKLLHSKAEAFLSNEYYESDIAWMDLDSKLDITIGPYETYEDEIFGYKATFETFIGIRDDKATADLKLFGDNLKLLEDNLPLESVYKSTDVSAAPIRVIQLIYNSGDVKGPQTVAYNLPNDEKIVKDRGTSMVMLKNVQEAKFEHILKPIAEITISKEQRGLVDFDSFFTHTICHECCHGIGPHTITLPGGQTSTVRKELQEVHSAMEEAKADIVGLWALKFLITKGLLSKSMVESMYVSFLAGCFRSIRFGLTEAHGKGQALQFNYLYEKGAFVFHEDSTFSVDFAKIEGAVESLSHEILTIQGKGDKNAATLLLNKYCTITGPLKTALENLERVKVPVDISPTFPLAEALMN

SEQ ID NO: 44758 - DNA, 2045 bp, Arabidopsis thaliana
  misc_feature (1)..(2045): Ceres Seq. ID no. 13509768
  misc_feature: MA Experiment ID: 20000173 Result: Down-regulated in Transcription
  misc_feature: MA Experiment 20000173 PARAMETER Experiment Name: At_42deg_Heat_P Parameter: Age (day) Value: 14
  misc_feature: MA Experiment 20000173 PARAMETER Experiment Name: At_42deg_Heat_P Parameter: Organism Value: A. thaliana
  misc_feature: MA Experiment 20000173 PARAMETER Experiment Name: At_42deg_Heat_P Parameter: Plant Line Value: WS
  misc_feature: MA Experiment 20000173 PARAMETER Experiment Name: At_42deg_Heat_P Parameter: Temperature (deg C) Value: 42 vs. 22
  misc_feature: MA Experiment 20000173 PARAMETER Experiment Name: At_42deg_Heat_P Parameter: Timepoint (hr) Value: 6
  misc_feature: MA Experiment 20000173 PARAMETER Experiment Name: At_42deg_Heat_P Parameter: Tissue Value: Aerial
  misc_feature: MA Experiment ID: 20000214 Result: Down-regulated in Transcription
  misc_feature: MA Experiment 20000214 PARAMETER Experiment Name: At_4deg_Cold_P Parameter: Timepoint (hr) Value: 6
  misc_feature: MA Experiment ID: 20000227 Result: Down-regulated in Transcription
  misc_feature: MA Experiment 20000227 PARAMETER Experiment Name: At_Root-Tips-vs-Tops_P Parameter: Tissue Value: Root Tips vs. Root Tops
  misc_feature: MA Experiment ID: 20000234 Result: Down-regulated in Transcription
  misc_feature: MA Experiment 20000234 PARAMETER Experiment Name: At_Siliques_P Parameter: Age (day) Value: 21
  misc_feature: MA Experiment 20000234 PARAMETER Experiment Name: At_Siliques_P Parameter: Organism Value: A. thaliana
  misc_feature: MA Experiment 20000234 PARAMETER Experiment Name: At_Siliques_P Parameter: Plant Line Value: WS
  misc_feature: MA Experiment 20000234 PARAMETER Experiment Name: At_Siliques_P Parameter: Tissue Value: Less Than 5mm Siliques vs. Whole Plant
  misc_feature: MA Experiment ID: 20000264 Result: Down-regulated in Transcription
  misc_feature: MA Experiment 20000264 PARAMETER Experiment Name: At_Open_Flower_P Parameter: Age (day) Value: 21
  misc_feature: MA Experiment 20000264 PARAMETER Experiment Name: At_Open_Flower_P Parameter: Plant Line Value: WS
  misc_feature: MA Experiment 20000264 PARAMETER Experiment Name: At_Open_Flower_P Parameter: Tissue Value: Open Flower vs. Whole Plant
  misc_feature: MA Experiment ID: 20000439 Result: Down-regulated in Transcription
  misc_feature: MA Experiment 20000439 PARAMETER Experiment Name: At_Roots__P Parameter: Age (day) Value: 14 vs. 21
  misc_feature: MA Experiment 20000439 PARAMETER Experiment Name: At_Roots__P Parameter: Organism Value: A. thaliana
  misc_feature: MA Experiment 20000439 PARAMETER Experiment Name: At_Roots__P Parameter: Tissue Value: Roots vs. Whole Plant
  misc_feature: MA Experiment ID: 20000441 Result: Up-regulated in Transcription
  misc_feature: MA Experiment 20000441 PARAMETER Experiment Name: At_1uM_BR-BRZ__P Parameter: Tissue Value: Shoot Apices
  misc_feature: MA Experiment 20000441 PARAMETER Experiment Name: At_1uM_BR-BRZ__P Parameter: Treatment Value: 1uM BR vs. No Treatment
  misc_feature: MA Experiment ID: 20000576 Result: Down-regulated in Transcription
  misc_feature: MA Experiment 20000576 PARAMETER Experiment Name: At_100uM_ABA_Mutants__P Parameter: Organism Value: A. thaliana
  misc_feature: MA Experiment 20000576 PARAMETER Experiment Name: At_100uM_ABA_Mutants__P Parameter: Plant Line Value: CS23
  misc_feature: MA Experiment 20000576 PARAMETER Experiment Name: At_100uM_ABA_Mutants__P Parameter: Timepoint (hr) Value: 6
  misc_feature: MA Experiment 20000576 PARAMETER Experiment Name: At_100uM_ABA_Mutants__P Parameter: Tissue Value: Whole Plant
  misc_feature: MA Experiment 20000576 PARAMETER Experiment Name: At_100uM_ABA_Mutants__P Parameter: Treatment Value: 1uM ABA vs. No Treatment
  misc_feature: MA Experiment ID: 20000606 Result: Up-regulated in Transcription
  misc_feature: MA Experiment 20000606 PARAMETER Experiment Name: At_CS8548_Mutant_P Parameter: Age (day) Value: 14
  misc_feature: MA Experiment 20000606 PARAMETER Experiment Name: At_CS8548_Mutant_P Parameter: Plant Line Value: CS8548 vs. wt
  misc_feature: MA Experiment 20000606 PARAMETER Experiment Name: At_CS8548_Mutant_P Parameter: Tissue Value: Whole Plant
  misc_feature: MA Experiment ID: 20000794 Result: Down-regulated in Transcription
  misc_feature: MA Experiment 20000794 PARAMETER Experiment Name: At_Petals_P Parameter: Age (day) Value: 23-25 days
  misc_feature: MA Experiment 20000794 PARAMETER Experiment Name: At_Petals_P Parameter: Plant Line Value: WS
  misc_feature: MA Experiment 20000794 PARAMETER Experiment Name: At_Petals_P Parameter: Tissue Value: Petals vs. Whole plant
  misc_feature: MA Experiment ID: 20001248 Result: Up-regulated in Transcription
  misc_feature: MA Experiment 20001248 PARAMETER Experiment Name: At_Far-red-induction_P Parameter: Age (day) Value: 7
  misc_feature: MA Experiment 20001248 PARAMETER Experiment Name: At_Far-red-induction_P Parameter: Light Value: Far-red vs. White
  misc_feature: MA Experiment 20001248 PARAMETER Experiment Name: At_Far-red-induction_P Parameter: Organism Value: A. thaliana
  misc_feature: MA Experiment 20001248 PARAMETER Experiment Name: At_Far-red-induction_P Parameter: Plant Line Value: Columbia
  misc_feature: MA Experiment 20001248 PARAMETER Experiment Name: At_Far-red-induction_P Parameter: Timepoint (hr) Value: 4
  misc_feature: MA Experiment 20001248 PARAMETER Experiment Name: At_Far-red-induction_P Parameter: Tissue Value: Whole Plant
  misc_feature: MA Experiment ID: 20001450 Result: Up-regulated in Transcription
  misc_feature: MA Experiment 20001450 PARAMETER Experiment Name: At_Far-red-induction_P Parameter: Age (day) Value: 7
  misc_feature: MA Experiment 20001450 PARAMETER Experiment Name: At_Far-red-induction_P Parameter: Light Value: Far-red vs. White
  misc_feature: MA Experiment 20001450 PARAMETER Experiment Name: At_Far-red-induction_P Parameter: Organism Value: A. thaliana
  misc_feature: MA Experiment 20001450 PARAMETER Experiment Name: At_Far-red-induction_P Parameter: Plant Line Value: Columbia
  misc_feature: MA Experiment 20001450 PARAMETER Experiment Name: At_Far-red-induction_P Parameter: Timepoint (hr) Value: 8
  misc_feature: MA Experiment 20001450 PARAMETER Experiment Name: At_Far-red-induction_P Parameter: Tissue Value: Whole Plant
  misc_feature: MA Experiment ID: 20001451 Result: Up-regulated in Transcription
  misc_feature: MA Experiment 20001451 PARAMETER Experiment Name: At_Far-red-induction_P Parameter: Age (day) Value: 7
  misc_feature: MA Experiment 20001451 PARAMETER Experiment Name: At_Far-red-induction_P Parameter: Light Value: Far-red vs. White
  misc_feature: MA Experiment 20001451 PARAMETER Experiment Name: At_Far-red-induction_P Parameter: Organism Value: A. thaliana
  misc_feature: MA Experiment 20001451 PARAMETER Experiment Name: At_Far-red-induction_P Parameter: Plant Line Value: Columbia
  misc_feature: MA Experiment 20001451 PARAMETER Experiment Name: At_Far-red-induction_P Parameter: Timepoint (hr) Value: 24
  misc_feature: MA Experiment 20001451 PARAMETER Experiment Name: At_Far-red-induction_P Parameter: Tissue Value: Whole Plant
  misc_feature: MA Experiment ID: 20001554 Result: Down-regulated in Transcription
  misc_feature: MA Experiment 20001554 PARAMETER Experiment Name: At_Drought_Soil_Dry_P Parameter: Age (day) Value: 21
  misc_feature: MA Experiment 20001554 PARAMETER Experiment Name: At_Drought_Soil_Dry_P Parameter: Organism Value: A. thaliana
  misc_feature: MA Experiment 20001554 PARAMETER Experiment Name: At_Drought_Soil_Dry_P Parameter: Plant Line Value: WS
  misc_feature: MA Experiment 20001554 PARAMETER Experiment Name: At_Drought_Soil_Dry_P Parameter: Post Timepoint (hr) Value: None
  misc_feature: MA Experiment 20001554 PARAMETER Experiment Name: At_Drought_Soil_Dry_P Parameter: Post-Treatment Value: None
  misc_feature: MA Experiment 20001554 PARAMETER Experiment Name: At_Drought_Soil_Dry_P Parameter: Timepoint (day) Value: 7
  misc_feature: MA Experiment 20001554 PARAMETER Experiment Name: At_Drought_Soil_Dry_P Parameter: Treatment Value: Drought vs. No Drought
  misc_feature: MA Experiment ID: 20001555 Result: Down-regulated in Transcription
  misc_feature: MA Experiment 20001555 PARAMETER Experiment Name: At_Drought_Soil_Dry_P Parameter: Age (day) Value: 24
  misc_feature: MA Experiment 20001555 PARAMETER Experiment Name: At_Drought_Soil_Dry_P Parameter: Organism Value: A. thaliana
  misc_feature: MA Experiment 20001555 PARAMETER Experiment Name: At_Drought_Soil_Dry_P Parameter: Plant Line Value: WS
  misc_feature: MA Experiment 20001555 PARAMETER Experiment Name: At_Drought_Soil_Dry_P Parameter: Post Timepoint (hr) Value: None
  misc_feature: MA Experiment 20001555 PARAMETER Experiment Name: At_Drought_Soil_Dry_P Parameter: Post-Treatment Value: None
  misc_feature: MA Experiment 20001555 PARAMETER Experiment Name: At_Drought_Soil_Dry_P Parameter: Timepoint (day) Value: 10
  misc_feature: MA Experiment 20001555 PARAMETER Experiment Name: At_Drought_Soil_Dry_P Parameter: Treatment Value: Drought vs. No Drought
  misc_feature: MA Experiment ID: 20001556 Result: Down-regulated in Transcription
  misc_feature: MA Experiment 20001556 PARAMETER Experiment Name: At_Drought_Soil_Dry_P Parameter: Age (day) Value: 26
  misc_feature: MA Experiment 20001556 PARAMETER Experiment Name: At_Drought_Soil_Dry_P Parameter: Organism Value: A. thaliana
  misc_feature: MA Experiment 20001556 PARAMETER Experiment Name: At_Drought_Soil_Dry_P Parameter: Plant Line Value: WS
  misc_feature: MA Experiment 20001556 PARAMETER Experiment Name: At_Drought_Soil_Dry_P Parameter: Post Timepoint (hr) Value: None
  misc_feature: MA Experiment 20001556 PARAMETER Experiment Name: At_Drought_Soil_Dry_P Parameter: Post-Treatment Value: None
  misc_feature: MA Experiment 20001556 PARAMETER Experiment Name: At_Drought_Soil_Dry_P Parameter: Timepoint (day) Value: 12
  misc_feature: MA Experiment 20001556 PARAMETER Experiment Name: At_Drought_Soil_Dry_P Parameter: Treatment Value: Drought vs. No Drought
  misc_feature: MA Experiment ID: 20001557 Result: Down-regulated in Transcription
  misc_feature: MA Experiment 20001557 PARAMETER Experiment Name: At_Drought_Soil_Dry_P Parameter: Age (day) Value: 27
  misc_feature: MA Experiment 20001557 PARAMETER Experiment Name: At_Drought_Soil_Dry_P Parameter: Organism Value: A. thaliana
  misc_feature: MA Experiment 20001557 PARAMETER Experiment Name: At_Drought_Soil_Dry_P Parameter: Plant Line Value: WS
  misc_feature: MA Experiment 20001557 PARAMETER Experiment Name: At_Drought_Soil_Dry_P Parameter: Post Timepoint (hr) Value: 3
  misc_feature: MA Experiment 20001557 PARAMETER Experiment Name: At_Drought_Soil_Dry_P Parameter: Post-Treatment Value: Re-Water vs. No Drought
  misc_feature: MA Experiment 20001557 PARAMETER Experiment Name: At_Drought_Soil_Dry_P Parameter: Timepoint (day) Value: 13
  misc_feature: MA Experiment 20001557 PARAMETER Experiment Name: At_Drought_Soil_Dry_P Parameter: Treatment Value: Drought vs. No Drought
  misc_feature: MA Experiment ID: 20001558 Result: Down-regulated in Transcription
  misc_feature: MA Experiment 20001558 PARAMETER Experiment Name: At_Drought_Soil_Dry_P Parameter: Age (day) Value: 27
  misc_feature: MA Experiment 20001558 PARAMETER Experiment Name: At_Drought_Soil_Dry_P Parameter: Organism Value: A. thaliana
  misc_feature: MA Experiment 20001558 PARAMETER Experiment Name: At_Drought_Soil_Dry_P Parameter: Plant Line Value: WS
  misc_feature: MA Experiment 20001558 PARAMETER Experiment Name: At_Drought_Soil_Dry_P Parameter: Post Timepoint (hr) Value: 6
  misc_feature: MA Experiment 20001558 PARAMETER Experiment Name: At_Drought_Soil_Dry_P Parameter: Post-Treatment Value: Re-Water vs. No Drought
  misc_feature: MA Experiment 20001558 PARAMETER Experiment Name: At_Drought_Soil_Dry_P Parameter: Timepoint (day) Value: 13
  misc_feature: MA Experiment 20001558 PARAMETER Experiment Name: At_Drought_Soil_Dry_P Parameter: Treatment Value: Drought vs. No Drought
  misc_feature: MA Experiment ID: 20001904 Result: Down-regulated in Transcription
  misc_feature: MA Experiment 20001904 PARAMETER Experiment Name: At_Drought_Reproduction_P Parameter: Age (day) Value: 37
  misc_feature: MA Experiment 20001904 PARAMETER Experiment Name: At_Drought_Reproduction_P Parameter: Organism Value: A. thaliana
  misc_feature: MA Experiment 20001904 PARAMETER Experiment Name: At_Drought_Reproduction_P Parameter: Plant Line Value: WS
  misc_feature: MA Experiment 20001904 PARAMETER Experiment Name: At_Drought_Reproduction_P Parameter: Timepoint (day) Value: 7
  misc_feature: MA Experiment 20001904 PARAMETER Experiment Name: At_Drought_Reproduction_P Parameter: Tissue Value: Rosettes
  misc_feature: MA Experiment 20001904 PARAMETER Experiment Name: At_Drought_Reproduction_P Parameter: Treatment Value: Drought vs. No Drought
  misc_feature: MA Experiment ID: 20001905 Result: Down-regulated in Transcription
  misc_feature: MA Experiment 20001905 PARAMETER Experiment Name: At_Drought_Reproduction_P Parameter: Age (day) Value: 40
  misc_feature: MA Experiment 20001905 PARAMETER Experiment Name: At_Drought_Reproduction_P Parameter: Organism Value: A. thaliana
  misc_feature: MA Experiment 20001905 PARAMETER Experiment Name: At_Drought_Reproduction_P Parameter: Plant Line Value: WS
  misc_feature: MA Experiment 20001905 PARAMETER Experiment Name: At_Drought_Reproduction_P Parameter: Timepoint (day) Value: 10
  misc_feature: MA Experiment 20001905 PARAMETER Experiment Name: At_Drought_Reproduction_P Parameter: Tissue Value: Rosettes
  misc_feature: MA Experiment 20001905 PARAMETER Experiment Name: At_Drought_Reproduction_P Parameter: Treatment Value: Drought vs. No Drought
  misc_feature: MA Experiment ID: 20001906 Result: Down-regulated in Transcription
  misc_feature: MA Experiment 20001906 PARAMETER Experiment Name: At_Drought_Reproduction_P Parameter: Age (day) Value: 35
  misc_feature: MA Experiment 20001906 PARAMETER Experiment Name: At_Drought_Reproduction_P Parameter: Organism Value: A. thaliana
  misc_feature: MA Experiment 20001906 PARAMETER Experiment Name: At_Drought_Reproduction_P Parameter: Plant Line Value: WS
  misc_feature: MA Experiment 20001906 PARAMETER Experiment Name: At_Drought_Reproduction_P Parameter: Timepoint (day) Value: 5
  misc_feature: MA Experiment 20001906 PARAMETER Experiment Name: At_Drought_Reproduction_P Parameter: Tissue Value: Siliques
  misc_feature: MA Experiment 20001906 PARAMETER Experiment Name: At_Drought_Reproduction_P Parameter: Treatment Value: Drought vs. No Drought
ctctcattttcataattccattttcaggattgtctctcaatcttttattcttctcattcaccggtaatggcaaaagtctctgggaggagcaagaaaacaatcgttgacgatgaaatcagcgataaaacagcgtctgcgtctgagtctgcgtccattgccttaacatccaaacgcaaacgtaagtcgccgcctcgaaacgctcctcttcaacgcagctccccttacagaggcgtcacaaggcatagatggactgggagatacgaagcgcatttgtgggataagaacagctggaacgatacacagaccaagaaaggacgtcaagtttatctaggggcttacgacgaagaagaagcagcagcacgtgcctacgacttagcagcattgaagtactggggacgagacacactcttgaacttccctttgccgagttatgacgaagacgtcaaagaaatggaaggccaatccaagggagagtatattggatcattgagaagaaaaagtagtggattttctcgcggtgtatcaaaatacagaggcgttgcaaggcatcaccataatgggagatgggaagctagaattggaagggtgtttggtaataaatatctatatcttggaacatacggtatttcattccattatccttactttatagtaatatttttatgaaatgtgtaaattcatactttagtacaatccagttcctagcaaatccaaatcttgaaatttgggattagtataaaatgggagttattctctgttctcctgttaagtgggactctagtagacgatgacatggtatcatatcttatactacacatataaaatagaaatgatattaaaaatggtagggaacaaagaaggtcacgttatgcatgaatgtagtcaaacgaacaactctttaagttttttttttcttgacaacaactccaagaaaatttaagtcacacacatgatagatctcatagaaaattcaaaataatttgtactatttatcaataattatactatatgcttgatatatggacttattagtagtgtttatgaacctttaagagggtaatcaaatcttgttggttgggaactagatcaccaatcccatctacttactcaagctatttattactatattgttttcaactttttaagttactcatccaacttttattgacaaattcattccctttacatattatatctctcccaattattactatttttgtcttatgtatctcacacataaaattaaacacgttagcaaaattaaatccgaattattgatacgacgatgatattaatacaaattattaggtcatgtatcctgatctttgaaaaagattatacatgcaaagacaatgtttatttataaatagatcagatgacatgcatatttctgtattgatcacatgaacatgcaatatgcatactatattaggcaaatacgtgatagaaatccactttatacaaattgggaaagttgttctaagaaaaaggaaaaaaagaaaaatccatatttatacaaatgggatgaaagttctatgaaaatatggtatagtaccaaagtttttttgtttgtaacattttaaaccctgtgcacgtgcagccacgcaagaagaagcagcaatcgcctacgacatcgcggcaatagagtaccgtggacttaacgccgttaccaatttcgacgtcagccgttatctaaaccctaacgccgccgcggataaagccgattccgattctaagcccattcgaagccctagtcgcgagcccgaatcgtcggatgataacaaatctccgaaatcagaggaagtaatcgaaccatctacatcgccggaagtgattccaactcgccggagcttccccgacgatatccagacgtattttgggtgtcaagattccggcaagttagcgactgaggaagacgtaatattcgattgtttcaattcttatataaatcctggcttctataacgagtttgattatggaccttaatcgtattttctacaagttttgttttgattatctacacaatacatcaaatattatttctt

SEQ ID NO: 44759 - protein, 199 aa, Arabidopsis thaliana
  peptide (1)..(199): Ceres Seq. ID no. 13509769
  misc_feature (50)..(123): Pfam Name: AP2 domain Pfam Description: AP2 domain
  misc_feature (15)..(185): Homolog of NCBI NO: 15218529 NR Description: ovule development protein, putative [Arabidopsis
  misc_feature (17)..(185): Homolog of NCBI NO: 38492172 NR Description: ANT-like protein [Nicotiana tabacum]
  misc_feature (48)..(186): Homolog of NCBI NO: 21069053 NR Description: AP2/EREBP transcription factor BABY BOOM2
  misc_feature (48)..(186): Homolog of NCBI NO: 21069051 NR Description: AP2/EREBP transcription factor BABY BOOM1
  misc_feature (48)..(186): Homolog of NCBI NO: 21069057 NR Description: BABY BOOM [Arabidopsis thaliana]
  misc_feature (1)..(185): Homolog of NCBI NO: 25518475 NR Description: hypothetical protein T24D18.16 - Arabidopsis
  misc_feature (1)..(185): Homolog of NCBI NO: 18394319 NR Description: ovule development protein, putative [Arabidopsis
  misc_feature (1)..(199): Homolog of NCBI NO: 26449695 NR Description: unknown protein [Arabidopsis thaliana]
  misc_feature (1)..(178): Homolog of NCBI NO: 34221733 NR Description: putative AP2 domain transcription factor
  misc_feature (1)..(185): Homolog of NCBI NO: 15219975 NR Description: ovule development protein, putative [Arabidopsis
MAKVSGRSKKTIVDDEISDKTASASESASIALTSKRKRKSPPRNAPLQRSSPYRGVTRHRWTGRYEAHLWDKNSWNDTQTKKGRQVYLGAYDEEEAAARAYDLAALKYWGRDTLLNFPLPSYDEDVKEMEGQSKGEYIGSLRRKSSGFSRGVSKYRGVARHHHNGRWEARIGRVFGNKYLYLGTYGISFHYPYFIVIFL

SEQ ID NO: 44760 - DNA, 1440 bp, Arabidopsis thaliana
  misc_feature (1)..(1440): Ceres Seq. ID no. 13509005
  misc_feature: MA Experiment ID: 20000307 Result: Up-regulated in Transcription
  misc_feature: MA Experiment 20000307 PARAMETER Experiment Name: At_Germinating_Seeds_Sub_P Parameter: Age (hr) Value: 24 vs. 0
  misc_feature: MA Experiment 20000307 PARAMETER Experiment Name: At_Germinating_Seeds_Sub_P Parameter: Organism Value: A. thaliana
  misc_feature: MA Experiment 20000307 PARAMETER Experiment Name: At_Germinating_Seeds_Sub_P Parameter: Plant Line Value: WS
  misc_feature: MA Experiment 20000307 PARAMETER Experiment Name: At_Germinating_Seeds_Sub_P Parameter: Tissue Value: Germinating Seeds
  misc_feature: MA Experiment ID: 20000315 Result: Down-regulated in Transcription
  misc_feature: MA Experiment 20000315 PARAMETER Experiment Name: At_14day_Shoots-Roots_Sub_P Parameter: Age (day) Value: 14
  misc_feature: MA Experiment 20000315 PARAMETER Experiment Name: At_14day_Shoots-Roots_Sub_P Parameter: Organism Value: A. thaliana
  misc_feature: MA Experiment 20000315 PARAMETER Experiment Name: At_14day_Shoots-Roots_Sub_P Parameter: Plant Line Value: WS
  misc_feature: MA Experiment 20000315 PARAMETER Experiment Name: At_14day_Shoots-Roots_Sub_P Parameter: Tissue Value: Shoots vs. Whole Plant
  misc_feature: MA Experiment ID: 20000349 Result: Down-regulated in Transcription
  misc_feature: MA Experiment 20000349 PARAMETER Experiment Name: At_100uM_ABA_Sub_P Parameter: Age (day) Value: 14
  misc_feature: MA Experiment 20000349 PARAMETER Experiment Name: At_100uM_ABA_Sub_P Parameter: Organism Value: A. thaliana
  misc_feature: MA Experiment 20000349 PARAMETER Experiment Name: At_100uM_ABA_Sub_P Parameter: Plant Line Value: WS
  misc_feature: MA Experiment 20000349 PARAMETER Experiment Name: At_100uM_ABA_Sub_P Parameter: Timepoint (hr) Value: 6
  misc_feature: MA Experiment 20000349 PARAMETER Experiment Name: At_100uM_ABA_Sub_P Parameter: Tissue Value: Aerial
  misc_feature: MA Experiment 20000349 PARAMETER Experiment Name: At_100uM_ABA_Sub_P Parameter: Treatment Value: 100uM ABA vs. No Treatment
  misc_feature: MA Experiment ID: 20000355 Result: Down-regulated in Transcription
  misc_feature: MA Experiment 20000355 PARAMETER Experiment Name: At_Siliques_Sub_P Parameter: Age (day) Value: 21
  misc_feature: MA Experiment 20000355 PARAMETER Experiment Name: At_Siliques_Sub_P Parameter: Organism Value: A. thaliana
  misc_feature: MA Experiment 20000355 PARAMETER Experiment Name: At_Siliques_Sub_P Parameter: Plant Line Value: WS
  misc_feature: MA Experiment 20000355 PARAMETER Experiment Name: At_Siliques_Sub_P Parameter: Tissue Value: Less Than 5mm Siliques vs. Whole Plant
  misc_feature: MA Experiment ID: 20000440 Result: Down-regulated in Transcription
  misc_feature: MA Experiment 20000440 PARAMETER Experiment Name: At_Closed-Flower__Sub_P Parameter: Tissue Value: Closed Flower vs. Whole Plant
gctaacttattcaaaccaattcacatatctcctaaatctcaacgactgcactttgaagctttttgtttagattcgttcgtcgtttccattctttaagtctacttctttttttcatattttcgagcgggtcaaatggatcaagagatagagattccttccttcttcctttgtccaatctctctagatatcatgaaagatccggtgatagtttccaccggaataacctacgaccgagaaagcatcgagaagtggctcttttccggtaagaaaaactcatgtccagtcaccaaacaagtcataaccgaaactgatcttaccccaaaccacactcttcgccgtttgattcaatcttggtgtaccctcaacgcatcatatggtatagagaggatcccaactccaaaacctccgatctgtaaatcggagatcgaaaagcttatcaaagagtcgtcatcttcgcatctaaaccaagtcaaatgcctcaaacgacttcgtcaaatagtatctgagaatacaaccaacaaacggtgcttagaagccgcagaagttccggagtttttggcaaatatcgtaagcaactctgtagatacgtataactctccttcttcttcactttcttcttcgaatctcaacgacatgtgtcagtcaaacatgttggagaatcgatttgattcttcaagaagcttgatggacgaagccctaagcgtactctaccatcttgacacatcggagacagccctcaagagtcttttaaacaacaagaaaggaacaaatcttgtgaaaacgttgacgaagattatgcaacgtgggatctacgagtcaagagcctatgcggctttgcttctcaagaagctcctggaagttgcggatccaatgcagatcatattgttggaacgagaacttttcggtgaggtgattcaaatcttgcacgaccagatctctcacaaggcgacaagatcagcaatgcaaatcttggtgatcacatgtccatggggaaggaatagacacaaggcagtggaaggtggaacaatctcgatgataatcgagcttttaatggacgatactttctcatcagagagaaggaattcagagatggcgatggtggttcttgatatgttatgtcagtgcgcagaaggaagagctgagttcttgaatcacggtgccgctattgcggttgtgtctaagaagatattgagggtctcacaaataactagtgaaagggcagttagggttttgctttcggttgggaggttctgcgcgacaccctctttgttgcaggagatgttgcaattgggagttgtagcaaagctgtgtctggtacttcaagttagctgtggtaacaagactaaagaaaaggctaaagaattgcttaagcttcacgctagggtttggagggaatcaccttgtgtcccaagaaatttgtatgattcgtatcctgcttga

SEQ ID NO: 44761 - protein, 435 aa, Arabidopsis thaliana
  peptide (1)..(435): Ceres Seq. ID no. 13509006
  misc_feature (6)..(81): Pfam Name: U-box domain Pfam Description: U-box domain
  misc_feature (1)..(133): Homolog of NCBI NO: 6671940 NR Description: hypothetical protein [Arabidopsis thaliana]
  misc_feature (265)..(425): Homolog of NCBI NO: 6671940 NR Description: hypothetical protein [Arabidopsis thaliana]
  misc_feature (1)..(181): Homolog of NCBI NO: 25408431 NR Description: hypothetical protein At2g35930 [imported] -
  misc_feature (1)..(181): Homolog of NCBI NO: 30686609 NR Description: expressed protein [Arabidopsis thaliana]
  misc_feature (5)..(434): Homolog of NCBI NO: 39545718 NR Description: OSJNBa0033G16.8 [Oryza sativa (japonica
  misc_feature (6)..(148): Homolog of NCBI NO: 34908566 NR Description: P0505D12.10 [Oryza sativa (japonica
  misc_feature (186)..(435): Homolog of NCBI NO: 34908566 NR Description: P0505D12.10 [Oryza sativa (japonica
  misc_feature (117)..(434): Homolog of NCBI NO: 30686609 NR Description: expressed protein [Arabidopsis thaliana]
  misc_feature (117)..(434): Homolog of NCBI NO: 25408431 NR Description: hypothetical protein At2g35930 [imported] -
  misc_feature (1)..(435): Homolog of NCBI NO: 15231222 NR Description: expressed protein [Arabidopsis thaliana]
MDQEIEIPSFFLCPISLDIMKDPVIVSTGITYDRESIEKWLFSGKKNSCPVTKQVITETDLTPNHTLRRLIQSWCTLNASYGIERIPTPKPPICKSEIEKLIKESSSSHLNQVKCLKRLRQIVSENTTNKRCLEAAEVPEFLANIVSNSVDTYNSPSSSLSSSNLNDMCQSNMLENRFDSSRSLMDEALSVLYHLDTSETALKSLLNNKKGTNLVKTLTKIMQRGIYESRAYAALLLKKLLEVADPMQIILLERELFGEVIQILHDQISHKATRSAMQILVITCPWGRNRHKAVEGGTISMIIELLMDDTFSSERRNSEMAMVVLDMLCQCAEGRAEFLNHGAAIAVVSKKILRVSQITSERAVRVLLSVGRFCATPSLLQEMLQLGVVAKLCLVLQVSCGNKTKEKAKELLKLHARVWRESPCVPRNLYDSYPA

SEQ ID NO: 44762 - protein, 416 aa, Arabidopsis thaliana
  peptide (1)..(416): Ceres Seq. ID no. 13509007
  misc_feature (1)..(62): Pfam Name: U-box domain Pfam Description: U-box domain
  misc_feature (1)..(114): Homolog of NCBI NO: 6671940 NR Description: hypothetical protein [Arabidopsis thaliana]
  misc_feature (246)..(406): Homolog of NCBI NO: 6671940 NR Description: hypothetical protein [Arabidopsis thaliana]
  misc_feature (1)..(162): Homolog of NCBI NO: 25408431 NR Description: hypothetical protein At2g35930 [imported] -
  misc_feature (1)..(162): Homolog of NCBI NO: 30686609 NR Description: expressed protein [Arabidopsis thaliana]
  misc_feature (1)..(415): Homolog of NCBI NO: 39545718 NR Description: OSJNBa0033G16.8 [Oryza sativa (japonica
  misc_feature (1)..(129): Homolog of NCBI NO: 34908566 NR Description: P0505D12.10 [Oryza sativa (japonica
  misc_feature (167)..(416): Homolog of NCBI NO: 34908566 NR Description: P0505D12.10 [Oryza sativa (japonica
  misc_feature (98)..(415): Homolog of NCBI NO: 30686609 NR Description: expressed protein [Arabidopsis thaliana]
  misc_feature (98)..(415): Homolog of NCBI NO: 25408431 NR Description: hypothetical protein At2g35930 [imported] -
  misc_feature (1)..(416): Homolog of NCBI NO: 15231222 NR Description: expressed protein [Arabidopsis thaliana]
MKDPVIVSTGITYDRESIEKWLFSGKKNSCPVTKQVITETDLTPNHTLRRLIQSWCTLNASYGIERIPTPKPPICKSEIEKLIKESSSSHLNQVKCLKRLRQIVSENTTNKRCLEAAEVPEFLANIVSNSVDTYNSPSSSLSSSNLNDMCQSNMLENRFDSSRSLMDEALSVLYHLDTSETALKSLLNNKKGTNLVKTLTKIMQRGIYESRAYAALLLKKLLEVADPMQIILLERELFGEVIQILHDQISHKATRSAMQILVITCPWGRNRHKAVEGGTISMIIELLMDDTFSSERRNSEMAMVVLDMLCQCAEGRAEFLNHGAAIAVVSKKILRVSQITSERAVRVLLSVGRFCATPSLLQEMLQLGVVAKLCLVLQVSCGNKTKEKAKELLKLHARVWRESPCVPRNLYDSYPA

SEQ ID NO: 44763 - protein, 268 aa, Arabidopsis thaliana
  peptide (1)..(268): Ceres Seq. ID no. 13509008
  misc_feature (48)..(258): Homolog of NCBI NO: 30013683 NR Description: Avr9/Cf-9 rapidly elicited protein 74 [Nicotiana
  misc_feature (98)..(258): Homolog of NCBI NO: 18399375 NR Description: expressed protein [Arabidopsis thaliana]
  misc_feature (98)..(258): Homolog of NCBI NO: 6671940 NR Description: hypothetical protein [Arabidopsis thaliana]
  misc_feature (1)..(14): Homolog of NCBI NO: 25408431 NR Description: hypothetical protein At2g35930 [imported] -
  misc_feature (1)..(14): Homolog of NCBI NO: 30686609 NR Description: expressed protein [Arabidopsis thaliana]
  misc_feature (1)..(267): Homolog of NCBI NO: 39545718 NR Description: OSJNBa0033G16.8 [Oryza sativa (japonica
  misc_feature (19)..(268): Homolog of NCBI NO: 34908566 NR Description: P0505D12.10 [Oryza sativa (japonica
  misc_feature (1)..(267): Homolog of NCBI NO: 30686609 NR Description: expressed protein [Arabidopsis thaliana]
  misc_feature (1)..(267): Homolog of NCBI NO: 25408431 NR Description: hypothetical protein At2g35930 [imported] -
  misc_feature (1)..(268): Homolog of NCBI NO: 15231222 NR Description: expressed protein [Arabidopsis thaliana]
MCQSNMLENRFDSSRSLMDEALSVLYHLDTSETALKSLLNNKKGTNLVKTLTKIMQRGIYESRAYAALLLKKLLEVADPMQIILLERELFGEVIQILHDQISHKATRSAMQILVITCPWGRNRHKAVEGGTISMIIELLMDDTFSSERRNSEMAMVVLDMLCQCAEGRAEFLNHGAAIAVVSKKILRVSQITSERAVRVLLSVGRFCATPSLLQEMLQLGVVAKLCLVLQVSCGNKTKEKAKELLKLHARVWRESPCVPRNLYDSYPA

SEQ ID NO: 44764 - DNA, 930 bp, Arabidopsis thaliana
  misc_feature (1)..(930): Ceres Seq. ID no. 13503816
  misc_feature: MA Experiment ID: 20000185 Result: Down-regulated in Transcription
  misc_feature: MA Experiment 20000185 PARAMETER Experiment Name: At_Roots__P Parameter: Age (day) Value: 7 vs. 21
  misc_feature: MA Experiment 20000185 PARAMETER Experiment Name: At_Roots__P Parameter: Organism Value: A. thaliana
  misc_feature: MA Experiment 20000185 PARAMETER Experiment Name: At_Roots__P Parameter: Tissue Value: Roots vs. Whole Plant
  misc_feature: MA Experiment ID: 20000265 Result: Down-regulated in Transcription
  misc_feature: MA Experiment 20000265 PARAMETER Experiment Name: At_Open_Flower_P Parameter: Age (day) Value: 21
  misc_feature: MA Experiment 20000265 PARAMETER Experiment Name: At_Open_Flower_P Parameter: Plant Line Value: WS
  misc_feature: MA Experiment 20000265 PARAMETER Experiment Name: At_Open_Flower_P Parameter: Tissue Value: Closed Flower vs. Whole Plant
  misc_feature: MA Experiment ID: 20000286 Result: Down-regulated in Transcription
  misc_feature: MA Experiment 20000286 PARAMETER Experiment Name: At_Open_Flower_P Parameter: Age (day) Value: 21
  misc_feature: MA Experiment 20000286 PARAMETER Experiment Name: At_Open_Flower_P Parameter: Plant Line Value: WS
  misc_feature: MA Experiment 20000286 PARAMETER Experiment Name: At_Open_Flower_P Parameter: Tissue Value: Half Open vs. Whole Plant
  misc_feature: MA Experiment ID: 20000439 Result: Down-regulated in Transcription
  misc_feature: MA Experiment 20000439 PARAMETER Experiment Name: At_Roots__P Parameter: Age (day) Value: 14 vs. 21
  misc_feature: MA Experiment 20000439 PARAMETER Experiment Name: At_Roots__P Parameter: Organism Value: A. thaliana
  misc_feature: MA Experiment 20000439 PARAMETER Experiment Name: At_Roots__P Parameter: Tissue Value: Roots vs. Whole Plant
  misc_feature: MA Experiment ID: 20000794 Result: Down-regulated in Transcription
  misc_feature: MA Experiment 20000794 PARAMETER Experiment Name: At_Petals_P Parameter: Age (day) Value: 23-25 days
  misc_feature: MA Experiment 20000794 PARAMETER Experiment Name: At_Petals_P Parameter: Plant Line Value: WS
  misc_feature: MA Experiment 20000794 PARAMETER Experiment Name: At_Petals_P Parameter: Tissue Value: Petals vs. Whole plant
  misc_feature: MA Experiment ID: 20001558 Result: Down-regulated in Transcription
  misc_feature: MA Experiment 20001558 PARAMETER Experiment Name: At_Drought_Soil_Dry_P Parameter: Age (day) Value: 27
  misc_feature: MA Experiment 20001558 PARAMETER Experiment Name: At_Drought_Soil_Dry_P Parameter: Organism Value: A. thaliana
  misc_feature: MA Experiment 20001558 PARAMETER Experiment Name: At_Drought_Soil_Dry_P Parameter: Plant Line Value: WS
  misc_feature: MA Experiment 20001558 PARAMETER Experiment Name: At_Drought_Soil_Dry_P Parameter: Post Timepoint (hr) Value: 6
  misc_feature: MA Experiment 20001558 PARAMETER Experiment Name: At_Drought_Soil_Dry_P Parameter: Post-Treatment Value: Re-Water vs. No Drought
  misc_feature: MA Experiment 20001558 PARAMETER Experiment Name: At_Drought_Soil_Dry_P Parameter: Timepoint (day) Value: 13
  misc_feature: MA Experiment 20001558 PARAMETER Experiment Name: At_Drought_Soil_Dry_P Parameter: Treatment Value: Drought vs. No Drought
  misc_feature: MA Experiment ID: 20001560 Result: Down-regulated in Transcription
  misc_feature: MA Experiment 20001560 PARAMETER Experiment Name: At_Drought_Soil_Dry_P Parameter: Age (day) Value: 28
  misc_feature: MA Experiment 20001560 PARAMETER Experiment Name: At_Drought_Soil_Dry_P Parameter: Organism Value: A. thaliana
  misc_feature: MA Experiment 20001560 PARAMETER Experiment Name: At_Drought_Soil_Dry_P Parameter: Plant Line Value: WS
  misc_feature: MA Experiment 20001560 PARAMETER Experiment Name: At_Drought_Soil_Dry_P Parameter: Post Timepoint (hr) Value: None
  misc_feature: MA Experiment 20001560 PARAMETER Experiment Name: At_Drought_Soil_Dry_P Parameter: Post-Treatment Value: None
  misc_feature: MA Experiment 20001560 PARAMETER Experiment Name: At_Drought_Soil_Dry_P Parameter: Timepoint (day) Value: 14
  misc_feature: MA Experiment 20001560 PARAMETER Experiment Name: At_Drought_Soil_Dry_P Parameter: Treatment Value: Drought vs. No Drought
  misc_feature: MA Experiment ID: 20001905 Result: Down-regulated in Transcription
  misc_feature: MA Experiment 20001905 PARAMETER Experiment Name: At_Drought_Reproduction_P Parameter: Age (day) Value: 40
  misc_feature: MA Experiment 20001905 PARAMETER Experiment Name: At_Drought_Reproduction_P Parameter: Organism Value: A. thaliana
  misc_feature: MA Experiment 20001905 PARAMETER Experiment Name: At_Drought_Reproduction_P Parameter: Plant Line Value: WS
  misc_feature: MA Experiment 20001905 PARAMETER Experiment Name: At_Drought_Reproduction_P Parameter: Timepoint (day) Value: 10
  misc_feature: MA Experiment 20001905 PARAMETER Experiment Name: At_Drought_Reproduction_P Parameter: Tissue Value: Rosettes
  misc_feature: MA Experiment 20001905 PARAMETER Experiment Name: At_Drought_Reproduction_P Parameter: Treatment Value: Drought vs. No Drought
atcttcacggcataataagaccaagaagaaaaagaaaacattaatttcaaccaaagcaaaacagagagaaaaaaatagagagagtgaatcaatttcggtggagaaagagaagaatggagcagccgtacgtgtacgcatacccgcaaggtagtggcccctcgggagctccgactccacaagccggaggagtggtagtggatccaaagtactgcgctccttaccctatagatatggcgatcgtacggaagatgatgtcgttaacggacggcaatttcgtgataacggacgtcaacggaaacctgctgttcaaggtgaaggaaccggtgtttggtctccacgacaagagggtcttgctggatggttctggtactccggtcgtcactttgagagaaaagatggtgagcatgcatgacaggtggcaagtgtttagaggagggagtacggatcagcgtgatctgctgtacacggtgaaaagatcgtcgatgcttcagctaaagaccaaactcgatgtgtttttgggacacaacaaagatgagaagagatgtgatttcagagtcaaagggagttggctcgagcgttcttgtgttgtttacgccggcgaatctgacgccattgttgcccaaatgcacaggaagcacacggtgcagagcgtattcttgggaaaagacaacttctcggtgactgtttatccaaacgtcgattatgccttcatcgcctctctcgtcgtcattctcgatgacgtcaaccgcgaagaccgcgccgcctgagagaagaagatatcaccttctcttcttcttaattatccatccatcaataatgtgctattcatcaaccgttaaaactttgtgtgatcatctcagttgtaaaataatcaaatcattgtgcctgtccttgttgtttaatgactacatttataactgttttttcatt

SEQ ID NO: 44765 - protein, 217 aa, Arabidopsis thaliana
  peptide (1)..(217): Ceres Seq. ID no. 13503817
  misc_feature (25)..(206): Pfam Name: Protein of unknown function (DUF567) Pfam Description: Protein of unknown function (DUF567)
  misc_feature (25)..(206): Pfam Name: Protein of unknown function (DUF567) Pfam Description: Protein of unknown function (DUF567)
  misc_feature (27)..(211): Homolog of NCBI NO: 15228906 NR Description: hypothetical protein [Arabidopsis thaliana]
  misc_feature (18)..(213): Homolog of NCBI NO: 27818079 NR Description: OSJNBa0086N05.7 [Oryza sativa (japonica
  misc_feature (1)..(173): Homolog of NCBI NO: 25352417 NR Description: hypothetical protein T3M13.14 - Arabidopsis
  misc_feature (26)..(212): Homolog of NCBI NO: 15225960 NR Description: expressed protein [Arabidopsis thaliana]
  misc_feature (26)..(212): Homolog of NCBI NO: 17979321 NR Description: unknown protein [Arabidopsis thaliana]
  misc_feature (27)..(211): Homolog of NCBI NO: 15228906 NR Description: hypothetical protein [Arabidopsis thaliana]
  misc_feature (1)..(173): Homolog of NCBI NO: 25352417 NR Description: hypothetical protein T3M13.14 - Arabidopsis
  misc_feature (26)..(212): Homolog of NCBI NO: 17979321 NR Description: unknown protein [Arabidopsis thaliana]
  misc_feature (1)..(217): Homolog of NCBI NO: 30679390 NR Description: expressed protein [Arabidopsis thaliana]
  misc_feature (1)..(172): Homolog of NCBI NO: 18413737 NR Description: expressed protein [Arabidopsis thaliana]
  misc_feature (1)..(172): Homolog of NCBI NO: 21553506 NR Description: unknown [Arabidopsis thaliana]
  misc_feature (1)..(207): Homolog of NCBI NO: 9665105 NR Description: Hypothetical protein [Arabidopsis thaliana]
  misc_feature (26)..(207): Homolog of NCBI NO: 15217694 NR Description: hypothetical protein [Arabidopsis thaliana]
  misc_feature (26)..(212): Homolog of NCBI NO: 15225960 NR Description: expressed protein [Arabidopsis thaliana]
  misc_feature (18)..(213): Homolog of NCBI NO: 27818079 NR Description: OSJNBa0086N05.7 [Oryza sativa (japonica
  misc_feature (26)..(207): Homolog of NCBI NO: 15217694 NR Description: hypothetical protein [Arabidopsis thaliana]
  misc_feature (1)..(207): Homolog of NCBI NO: 9665105 NR Description: Hypothetical protein [Arabidopsis thaliana]
  misc_feature (1)..(172): Homolog of NCBI NO: 21553506 NR Description: unknown [Arabidopsis thaliana]
  misc_feature (1)..(172): Homolog of NCBI NO: 18413737 NR Description: expressed protein [Arabidopsis thaliana]
  misc_feature (1)..(217): Homolog of NCBI NO: 30679390 NR Description: expressed protein [Arabidopsis thaliana]
MEQPYVYAYPQGSGPSGAPTPQAGGVVVDPKYCAPYPIDMAIVRKMMSLTDGNFVITDVNGNLLFKVKEPVFGLHDKRVLLDGSGTPVVTLREKMVSMHDRWQVFRGGSTDQRDLLYTVKRSSMLQLKTKLDVFLGHNKDEKRCDFRVKGSWLERSCVVYAGESDAIVAQMHRKHTVQSVFLGKDNFSVTVYPNVDYAFIASLVVILDDVNREDRAA

SEQ ID NO: 44766 - protein, 178 aa, Arabidopsis thaliana
  peptide (1)..(178): Ceres Seq. ID no. 13503818
  misc_feature (1)..(167): Pfam Name: Protein of unknown function (DUF567) Pfam Description: Protein of unknown function (DUF567)
  misc_feature (1)..(167): Pfam Name: Protein of unknown function (DUF567) Pfam Description: Protein of unknown function (DUF567)
  misc_feature (1)..(172): Homolog of NCBI NO: 15228906 NR Description: hypothetical protein [Arabidopsis thaliana]
  misc_feature (1)..(174): Homolog of NCBI NO: 27818079 NR Description: OSJNBa0086N05.7 [Oryza sativa (japonica
  misc_feature (1)..(134): Homolog of NCBI NO: 25352417 NR Description: hypothetical protein T3M13.14 - Arabidopsis
  misc_feature (1)..(173): Homolog of NCBI NO: 15225960 NR Description: expressed protein [Arabidopsis thaliana]
  misc_feature (1)..(173): Homolog of NCBI NO: 17979321 NR Description: unknown protein [Arabidopsis thaliana]
  misc_feature (1)..(172): Homolog of NCBI NO: 15228906 NR Description: hypothetical protein [Arabidopsis thaliana]
  misc_feature (1)..(134): Homolog of NCBI NO: 25352417 NR Description: hypothetical protein T3M13.14 - Arabidopsis
  misc_feature (1)..(173): Homolog of NCBI NO: 17979321 NR Description: unknown protein [Arabidopsis thaliana]
  misc_feature (1)..(178): Homolog of NCBI NO: 30679390 NR Description: expressed protein [Arabidopsis thaliana]
  misc_feature (1)..(133): Homolog of NCBI NO: 18413737 NR Description: expressed protein [Arabidopsis thaliana]
  misc_feature (1)..(133): Homolog of NCBI NO: 21553506 NR Description: unknown [Arabidopsis thaliana]
  misc_feature (1)..(168): Homolog of NCBI NO: 9665105 NR Description: Hypothetical protein [Arabidopsis thaliana]
  misc_feature (1)..(168): Homolog of NCBI NO: 15217694 NR Description: hypothetical protein [Arabidopsis thaliana]
  misc_feature (1)..(173): Homolog of NCBI NO: 15225960 NR Description: expressed protein [Arabidopsis thaliana]
  misc_feature (1)..(174): Homolog of NCBI NO: 27818079 NR Description: OSJNBa0086N05.7 [Oryza sativa (japonica
  misc_feature (1)..(168): Homolog of NCBI NO: 15217694 NR Description: hypothetical protein [Arabidopsis thaliana]
  misc_feature (1)..(168): Homolog of NCBI NO: 9665105 NR Description: Hypothetical protein [Arabidopsis thaliana]
  misc_feature (1)..(133): Homolog of NCBI NO: 21553506 NR Description: unknown [Arabidopsis thaliana]
  misc_feature (1)..(133): Homolog of NCBI NO: 18413737 NR Description: expressed protein [Arabidopsis thaliana]
  misc_feature (1)..(178): Homolog of NCBI NO: 30679390 NR Description: expressed protein [Arabidopsis thaliana]
MAIVRKMMSLTDGNFVITDVNGNLLFKVKEPVFGLHDKRVLLDGSGTPVVTLREKMVSMHDRWQVFRGGSTDQRDLLYTVKRSSMLQLKTKLDVFLGHNKDEKRCDFRVKGSWLERSCVVYAGESDAIVAQMHRKHTVQSVFLGKDNFSVTVYPNVDYAFIASLVVILDDVNREDRAA

SEQ ID NO: 44767 - protein, 172 aa, Arabidopsis thaliana
  peptide (1)..(172): Ceres Seq. ID no. 13503819
  misc_feature (1)..(161): Pfam Name: Protein of unknown function (DUF567) Pfam Description: Protein of unknown function (DUF567)
  misc_feature (1)..(161): Pfam Name: Protein of unknown function (DUF567) Pfam Description: Protein of unknown function (DUF567)
  misc_feature (1)..(166): Homolog of NCBI NO: 15228906 NR Description: hypothetical protein [Arabidopsis thaliana]
  misc_feature (1)..(168): Homolog of NCBI NO: 27818079 NR Description: OSJNBa0086N05.7 [Oryza sativa (japonica
  misc_feature (1)..(128): Homolog of NCBI NO: 25352417 NR Description: hypothetical protein T3M13.14 - Arabidopsis
  misc_feature (1)..(167): Homolog of NCBI NO: 15225960 NR Description: expressed protein [Arabidopsis thaliana]
  misc_feature (1)..(167): Homolog of NCBI NO: 17979321 NR Description: unknown protein [Arabidopsis thaliana]
  misc_feature (1)..(166): Homolog of NCBI NO: 15228906 NR Description: hypothetical protein [Arabidopsis thaliana]
  misc_feature (1)..(128): Homolog of NCBI NO: 25352417 NR Description: hypothetical protein T3M13.14 - Arabidopsis
  misc_feature (1)..(167): Homolog of NCBI NO: 17979321 NR Description: unknown protein [Arabidopsis thaliana]
  misc_feature (1)..(172): Homolog of NCBI NO: 30679390 NR Description: expressed protein [Arabidopsis thaliana]
  misc_feature (1)..(127): Homolog of NCBI NO: 18413737 NR Description: expressed protein [Arabidopsis thaliana]
  misc_feature (1)..(127): Homolog of NCBI NO: 21553506 NR Description: unknown [Arabidopsis thaliana]
  misc_feature (1)..(162): Homolog of NCBI NO: 9665105 NR Description: Hypothetical protein [Arabidopsis thaliana]
  misc_feature (1)..(162): Homolog of NCBI NO: 15217694 NR Description: hypothetical protein [Arabidopsis thaliana]
  misc_feature (1)..(167): Homolog of NCBI NO: 15225960 NR Description: expressed protein [Arabidopsis thaliana]
  misc_feature (1)..(168): Homolog of NCBI NO: 27818079 NR Description: OSJNBa0086N05.7 [Oryza sativa (japonica
  misc_feature (1)..(162): Homolog of NCBI NO: 15217694 NR Description: hypothetical protein [Arabidopsis thaliana]
  misc_feature (1)..(162): Homolog of NCBI NO: 9665105 NR Description: Hypothetical protein [Arabidopsis thaliana]
  misc_feature (1)..(127): Homolog of NCBI NO: 21553506 NR Description: unknown [Arabidopsis thaliana]
  misc_feature (1)..(127): Homolog of NCBI NO: 18413737 NR Description: expressed protein [Arabidopsis thaliana]
  misc_feature (1)..(172): Homolog of NCBI NO: 30679390 NR Description: expressed protein [Arabidopsis thaliana]
MMSLTDGNFVITDVNGNLLFKVKEPVFGLHDKRVLLDGSGTPVVTLREKMVSMHDRWQVFRGGSTDQRDLLYTVKRSSMLQLKTKLDVFLGHNKDEKRCDFRVKGSWLERSCVVYAGESDAIVAQMHRKHTVQSVFLGKDNFSVTVYPNVDYAFIASLVVILDDVNREDRAA

SEQ ID NO: 44768 - DNA, 1000 bp, Arabidopsis thaliana
  misc_feature (1)..(1000): Ceres Seq. ID no. 13580579
  misc_feature: MA Experiment ID: 108461 Result: Down-regulated in Transcription
  misc_feature: MA Experiment 108461 PARAMETER Experiment Name: At_Germinating_Seeds_cDNA_P Parameter: Age (day) Value: 1 vs. 0
  misc_feature: MA Experiment 108461 PARAMETER Experiment Name: At_Germinating_Seeds_cDNA_P Parameter: Tissue Value: Germinating Seeds
  misc_feature: MA Experiment ID: 108488 Result: Down-regulated in Transcription
  misc_feature: MA Experiment ID: 108574 Result: Up-regulated in Transcription
  misc_feature: MA Experiment 108574 PARAMETER Experiment Name: At_Wounding__cDNA_P Parameter: Timepoint (hr) Value: 1
  misc_feature: MA Experiment 108574 PARAMETER Experiment Name: At_Wounding__cDNA_P Parameter: Tissue Value: Aerial
  misc_feature: MA Experiment 108574 PARAMETER Experiment Name: At_Wounding__cDNA_P Parameter: Treatment Value: Wounding vs. No Wounding
  misc_feature: MA Experiment ID: 108576 Result: Up-regulated in Transcription
  misc_feature: MA Experiment 108576 PARAMETER Experiment Name: At_42deg_Heat_cDNA_P Parameter: Temperature (deg C) Value: 42 vs. 22
  misc_feature: MA Experiment 108576 PARAMETER Experiment Name: At_42deg_Heat_cDNA_P Parameter: Timepoint (hr) Value: 1
  misc_feature: MA Experiment 108576 PARAMETER Experiment Name: At_42deg_Heat_cDNA_P Parameter: Tissue Value: Aerial
  misc_feature: MA Experiment ID: 108585 Result: Up-regulated in Transcription
  misc_feature: MA Experiment 108585 PARAMETER Experiment Name: At_5mM_NaNP_cDNA_P Parameter: Timepoint (hr) Value: 6
  misc_feature: MA Experiment 108585 PARAMETER Experiment Name: At_5mM_NaNP_cDNA_P Parameter: Tissue Value: Aerial
  misc_feature: MA Experiment 108585 PARAMETER Experiment Name: At_5mM_NaNP_cDNA_P Parameter: Treatment Value: null
  misc_feature: MA Experiment ID: 108595 Result: Up-regulated in Transcription
  misc_feature: MA Experiment 108595 PARAMETER Experiment Name: At_Ler-pi_Ovule_cDNA_P Parameter: Plant Line Value: null
  misc_feature: MA Experiment ID: 108607 Result: Up-regulated in Transcription
  misc_feature: MA Experiment 108607 PARAMETER Experiment Name: At_100uM_ABA_cDNA_P Parameter: Timepoint (hr) Value: 4
  misc_feature: MA Experiment 108607 PARAMETER Experiment Name: At_100uM_ABA_cDNA_P Parameter: Tissue Value: Aerial
  misc_feature: MA Experiment 108607 PARAMETER Experiment Name: At_100uM_ABA_cDNA_P Parameter: Treatment Value: 100uM ABA vs. No Treatment
  misc_feature: MA Experiment ID: 108608 Result: Up-regulated in Transcription
  misc_feature: MA Experiment 108608 PARAMETER Experiment Name: At_100uM_ABA_cDNA_P Parameter: Timepoint (hr) Value: 1
  misc_feature: MA Experiment 108608 PARAMETER Experiment Name: At_100uM_ABA_cDNA_P Parameter: Tissue Value: Aerial
  misc_feature: MA Experiment 108608 PARAMETER Experiment Name: At_100uM_ABA_cDNA_P Parameter: Treatment Value: 100uM ABA vs. No Treatment
  misc_feature: MA Experiment ID: 108667 Result: Up-regulated in Transcription
  misc_feature: MA Experiment 108667 PARAMETER Experiment Name: At_2mM_SA_cDNA_P Parameter: Plant Line Value: WS
  misc_feature: MA Experiment 108667 PARAMETER Experiment Name: At_2mM_SA_cDNA_P Parameter: Timepoint (hr) Value: 1
  misc_feature: MA Experiment 108667 PARAMETER Experiment Name: At_2mM_SA_cDNA_P Parameter: Treatment Value: 2mM SA vs. No Treatment
  misc_feature: MA Experiment ID: 20000069 Result: Up-regulated in Transcription
  misc_feature: MA Experiment 20000069 PARAMETER Experiment Name: At_100uM_ABA_Mutants_cDNA_P Parameter: Plant Line Value: CS23
  misc_feature: MA Experiment 20000069 PARAMETER Experiment Name: At_100uM_ABA_Mutants_cDNA_P Parameter: Timepoint (hr) Value: 6
  misc_feature: MA Experiment 20000069 PARAMETER Experiment Name: At_100uM_ABA_Mutants_cDNA_P Parameter: Tissue Value: Aerial
  misc_feature: MA Experiment 20000069 PARAMETER Experiment Name: At_100uM_ABA_Mutants_cDNA_P Parameter: Treatment Value: 100uM ABA vs. No Treatment
  misc_feature: MA Experiment ID: 20000070 Result: Up-regulated in Transcription
  misc_feature: MA Experiment 20000070 PARAMETER Experiment Name: At_100uM_ABA_Mutants_cDNA_P Parameter: Plant Line Value: CS24
  misc_feature: MA Experiment 20000070 PARAMETER Experiment Name: At_100uM_ABA_Mutants_cDNA_P Parameter: Timepoint (hr) Value: 6
  misc_feature: MA Experiment 20000070 PARAMETER Experiment Name: At_100uM_ABA_Mutants_cDNA_P Parameter: Tissue Value: Aerial
  misc_feature: MA Experiment 20000070 PARAMETER Experiment Name: At_100uM_ABA_Mutants_cDNA_P Parameter: Treatment Value: 100uM ABA vs. No Treatment
  misc_feature: MA Experiment ID: 20000071 Result: Up-regulated in Transcription
  misc_feature: MA Experiment 20000071 PARAMETER Experiment Name: At_100uM_ABA_Mutants_cDNA_P Parameter: Plant Line Value: CS8104
  misc_feature: MA Experiment 20000071 PARAMETER Experiment Name: At_100uM_ABA_Mutants_cDNA_P Parameter: Timepoint (hr) Value: 6
  misc_feature: MA Experiment 20000071 PARAMETER Experiment Name: At_100uM_ABA_Mutants_cDNA_P Parameter: Tissue Value: Aerial
  misc_feature: MA Experiment 20000071 PARAMETER Experiment Name: At_100uM_ABA_Mutants_cDNA_P Parameter: Treatment Value: 100uM ABA vs. No Treatment
  misc_feature: MA Experiment ID: 20000072 Result: Up-regulated in Transcription
  misc_feature: MA Experiment 20000072 PARAMETER Experiment Name: At_100uM_ABA_Mutants_cDNA_P Parameter: Plant Line Value: CS8105
  misc_feature: MA Experiment 20000072 PARAMETER Experiment Name: At_100uM_ABA_Mutants_cDNA_P Parameter: Timepoint (hr) Value: 6
  misc_feature: MA Experiment 20000072 PARAMETER Experiment Name: At_100uM_ABA_Mutants_cDNA_P Parameter: Tissue Value: Aerial
  misc_feature: MA Experiment 20000072 PARAMETER Experiment Name: At_100uM_ABA_Mutants_cDNA_P Parameter: Treatment Value: 100uM ABA vs. No Treatment
  misc_feature: MA Experiment ID: 20000087 Result: Up-regulated in Transcription
  misc_feature: MA Experiment 20000087 PARAMETER Experiment Name: At_100uM_ABA_Mutants_cDNA_P Parameter: Plant Line Value: WS
  misc_feature: MA Experiment 20000087 PARAMETER Experiment Name: At_100uM_ABA_Mutants_cDNA_P Parameter: Timepoint (hr) Value: 6
  misc_feature: MA Experiment 20000087 PARAMETER Experiment Name: At_100uM_ABA_Mutants_cDNA_P Parameter: Tissue Value: Aerial
  misc_feature: MA Experiment 20000087 PARAMETER Experiment Name: At_100uM_ABA_Mutants_cDNA_P Parameter: Treatment Value: 100uM ABA vs. No Treatment
  misc_feature: MA Experiment ID: 20000088 Result: Up-regulated in Transcription
  misc_feature: MA Experiment 20000088 PARAMETER Experiment Name: At_100uM_ABA_Mutants_cDNA_P Parameter: Plant Line Value: Landsberg
  misc_feature: MA Experiment 20000088 PARAMETER Experiment Name: At_100uM_ABA_Mutants_cDNA_P Parameter: Timepoint (hr) Value: 6
  misc_feature: MA Experiment 20000088 PARAMETER Experiment Name: At_100uM_ABA_Mutants_cDNA_P Parameter: Tissue Value: Aerial
  misc_feature: MA Experiment 20000088 PARAMETER Experiment Name: At_100uM_ABA_Mutants_cDNA_P Parameter: Treatment Value: 100uM ABA vs. No Treatment
  misc_feature: MA Experiment ID: 20000093 Result: Up-regulated in Transcription
  misc_feature: MA Experiment 20000093 PARAMETER Experiment Name: At_42deg_Heat_cDNA_P Parameter: Temperature (deg C) Value: 42 vs. 22
  misc_feature: MA Experiment 20000093 PARAMETER Experiment Name: At_42deg_Heat_cDNA_P Parameter: Timepoint (hr) Value: 0.5
  misc_feature: MA Experiment 20000093 PARAMETER Experiment Name: At_42deg_Heat_cDNA_P Parameter: Tissue Value: Aerial
  misc_feature: MA Experiment ID: 20000112 Result: Up-regulated in Transcription
  misc_feature: MA Experiment 20000112 PARAMETER Experiment Name: At_42deg_Heat_cDNA_P Parameter: Temperature (deg C) Value: 42 vs. 22
  misc_feature: MA Experiment 20000112 PARAMETER Experiment Name: At_42deg_Heat_cDNA_P Parameter: Timepoint (hr) Value: 2
  misc_feature: MA Experiment 20000112 PARAMETER Experiment Name: At_42deg_Heat_cDNA_P Parameter: Tissue Value: Aerial
  misc_feature: MA Experiment ID: 20000117 Result: Up-regulated in Transcription
  misc_feature: MA Experiment 20000117 PARAMETER Experiment Name: At_100uM_ABA_Mutants_cDNA_P Parameter: Plant Line Value: Columbia
  misc_feature: MA Experiment 20000117 PARAMETER Experiment Name: At_100uM_ABA_Mutants_cDNA_P Parameter: Timepoint (hr) Value: 6
  misc_feature: MA Experiment 20000117 PARAMETER Experiment Name: At_100uM_ABA_Mutants_cDNA_P Parameter: Tissue Value: Aerial
  misc_feature: MA Experiment 20000117 PARAMETER Experiment Name: At_100uM_ABA_Mutants_cDNA_P Parameter: Treatment Value: 100uM ABA vs. No Treatment
  misc_feature: MA Experiment ID: 20000144 Result: Up-regulated in Transcription
  misc_feature: MA Experiment 20000144 PARAMETER Experiment Name: At_42deg_Heat_cDNA_P Parameter: Temperature (deg C) Value: 42 vs. 22
  misc_feature: MA Experiment 20000144 PARAMETER Experiment Name: At_42deg_Heat_cDNA_P Parameter: Timepoint (hr) Value: 1
  misc_feature: MA Experiment 20000144 PARAMETER Experiment Name: At_42deg_Heat_cDNA_P Parameter: Tissue Value: Aerial
  misc_feature: MA Experiment ID: 20000185 Result: Up-regulated in Transcription
  misc_feature: MA Experiment 20000185 PARAMETER Experiment Name: At_Roots__P Parameter: Age (day) Value: 7 vs. 21
  misc_feature: MA Experiment 20000185 PARAMETER Experiment Name: At_Roots__P Parameter: Organism Value: A. thaliana
  misc_feature: MA Experiment 20000185 PARAMETER Experiment Name: At_Roots__P Parameter: Tissue Value: Roots vs. Whole Plant
  misc_feature: MA Experiment ID: 20000224 Result: Up-regulated in Transcription
  misc_feature: MA Experiment ID: 20000286 Result: Up-regulated in Transcription
  misc_feature: MA Experiment 20000286 PARAMETER Experiment Name: At_Open_Flower_P Parameter: Age (day) Value: 21
  misc_feature: MA Experiment 20000286 PARAMETER Experiment Name: At_Open_Flower_P Parameter: Plant Line Value: WS
  misc_feature: MA Experiment 20000286 PARAMETER Experiment Name: At_Open_Flower_P Parameter: Tissue Value: Half Open vs. Whole Plant
  misc_feature: MA Experiment ID: 20001555 Result: Up-regulated in Transcription
  misc_feature: MA Experiment 20001555 PARAMETER Experiment Name: At_Drought_Soil_Dry_P Parameter: Age (day) Value: 24
  misc_feature: MA Experiment 20001555 PARAMETER Experiment Name: At_Drought_Soil_Dry_P Parameter: Organism Value: A. thaliana
  misc_feature: MA Experiment 20001555 PARAMETER Experiment Name: At_Drought_Soil_Dry_P Parameter: Plant Line Value: WS
  misc_feature: MA Experiment 20001555 PARAMETER Experiment Name: At_Drought_Soil_Dry_P Parameter: Post Timepoint (hr) Value: None
  misc_feature: MA Experiment 20001555 PARAMETER Experiment Name: At_Drought_Soil_Dry_P Parameter: Post-Treatment Value: None
  misc_feature: MA Experiment 20001555 PARAMETER Experiment Name: At_Drought_Soil_Dry_P Parameter: Timepoint (day) Value: 10
  misc_feature: MA Experiment 20001555 PARAMETER Experiment Name: At_Drought_Soil_Dry_P Parameter: Treatment Value: Drought vs. No Drought
  misc_feature: MA Experiment ID: 20001904 Result: Up-regulated in Transcription
  misc_feature: MA Experiment 20001904 PARAMETER Experiment Name: At_Drought_Reproduction_P Parameter: Age (day) Value: 37
  misc_feature: MA Experiment 20001904 PARAMETER Experiment Name: At_Drought_Reproduction_P Parameter: Organism Value: A. thaliana
  misc_feature: MA Experiment 20001904 PARAMETER Experiment Name: At_Drought_Reproduction_P Parameter: Plant Line Value: WS
  misc_feature: MA Experiment 20001904 PARAMETER Experiment Name: At_Drought_Reproduction_P Parameter: Timepoint (day) Value: 7
  misc_feature: MA Experiment 20001904 PARAMETER Experiment Name: At_Drought_Reproduction_P Parameter: Tissue Value: Rosettes
  misc_feature: MA Experiment 20001904 PARAMETER Experiment Name: At_Drought_Reproduction_P Parameter: Treatment Value: Drought vs. No Drought
  misc_feature: MA Experiment ID: 20001905 Result: Up-regulated in Transcription
  misc_feature: MA Experiment 20001905 PARAMETER Experiment Name: At_Drought_Reproduction_P Parameter: Age (day) Value: 40
  misc_feature: MA Experiment 20001905 PARAMETER Experiment Name: At_Drought_Reproduction_P Parameter: Organism Value: A. thaliana
  misc_feature: MA Experiment 20001905 PARAMETER Experiment Name: At_Drought_Reproduction_P Parameter: Plant Line Value: WS
  misc_feature: MA Experiment 20001905 PARAMETER Experiment Name: At_Drought_Reproduction_P Parameter: Timepoint (day) Value: 10
  misc_feature: MA Experiment 20001905 PARAMETER Experiment Name: At_Drought_Reproduction_P Parameter: Tissue Value: Rosettes
  misc_feature: MA Experiment 20001905 PARAMETER Experiment Name: At_Drought_Reproduction_P Parameter: Treatment Value: Drought vs. No Drought
atttaaaacccttatttaaattatatagaaaaaaaaaaggtcaagtagtcttctattatttactagtataacctctagaaacatcatcaccacattcctggctaatatccttcatctagaacaattattaacgaatcaaaataccaaaaaacaaagcacctcattgactattaaattagtactaatacattaattaagttattattcctatatataaatctcacccattctccaccttatcatcacaatccaaaactctctctctctctctctctctgtctcttgtcttatcatttatctctctaacggcgaggcaatgggttttccggtgggatattctgagctacttctcccaaaaatctttttctacttgttatctttcttaggtttgatacgtaaactcatctccacaatgttcaagatcattggtctaccagatttcttagaacctgaaccggtttcaacctcatggcccgacccaccacccacgttgaccaaacctgactcagcagcaatactagccggagagatgttaccggttgttcgattctcggatataaaccgaccggaatccgagtgttgcgcagtgtgtctctacgatttcgagaacgacgacgagatccgacggctgacgaattgtcgacatatatttcatcggggatgtttggaccgttggatgatgggttataatcagatgacgtgtccactttgtcgtacacagtttatacctgatcatcttcaactggagtttaatcaaaggctctggtctcaatcttctgctgtttcttctcaacttcttgatgaatcatcatcttaggacgtattaaatctttgtccaaacaaaaaaaaaagacatattaaatcctttttttttggtactttcattgggaattgggtttggtgtgagatcgatgtaaatattaaacaaaaaaaaaaaaggtagtggttacaggttaatgaaaaaagaaagaagaagaaaatttgtacttatccatccctc

SEQ ID NO: 44769 - protein, 166 aa, Arabidopsis thaliana; identical to SEQ ID NO: 25098
  peptide (1)..(166): Ceres Seq. ID no. 13580580
  misc_feature (89)..(132): Pfam Name: Zinc finger, C3HC4 type (RING finger) Pfam Description: Zinc finger, C3HC4 type (RING finger)
  misc_feature (71)..(139): Homolog of NCBI NO: 18411282 NR Description: zinc finger (C3HC4-type RING finger) protein
  misc_feature (1)..(138): Homolog of NCBI NO: 34897812 NR Description: P0514G12.26 [Oryza sativa (japonica
  misc_feature (1)..(154): Homolog of NCBI NO: 15233352 NR Description: RING-H2 finger protein, putative [Arabidopsis
  misc_feature (1)..(153): Homolog of NCBI NO: 15233350 NR Description: RING-H2 finger protein RHA1b [Arabidopsis
  misc_feature (1)..(153): Homolog of NCBI NO: 11358777 NR Description: RING-H2 finger protein RHA1b [imported] -
  misc_feature (1)..(154): Homolog of NCBI NO: 11358776 NR Description: RING-H2 finger protein RHA1a [imported] -
  misc_feature (1)..(153): Homolog of NCBI NO: 15233117 NR Description: BRH1 RING finger protein [Arabidopsis thaliana]
  misc_feature (1)..(157): Homolog of NCBI NO: 21554155 NR Description: RING zinc finger protein-like [Arabidopsis
  misc_feature (1)..(157): Homolog of NCBI NO: 15238072 NR Description: RING-H2 zinc finger protein, putative
  misc_feature (1)..(166): Homolog of NCBI NO: 15222553 NR Description: RING-H2 finger protein, putative [Arabidopsis

SEQ ID NO: 44770 - protein, 134 aa, Arabidopsis thaliana; identical to SEQ ID NO: 25099
  peptide (1)..(134): Ceres Seq. ID no. 13580581
  misc_feature (57)..(100): Pfam Name: Zinc finger, C3HC4 type (RING finger) Pfam Description: Zinc finger, C3HC4 type (RING finger)
  misc_feature (39)..(107): Homolog of NCBI NO: 18411282 NR Description: zinc finger (C3HC4-type RING finger) protein
  misc_feature (1)..(106): Homolog of NCBI NO: 34897812 NR Description: P0514G12.26 [Oryza sativa (japonica
  misc_feature (1)..(122): Homolog of NCBI NO: 15233352 NR Description: RING-H2 finger protein, putative [Arabidopsis
  misc_feature (1)..(121): Homolog of NCBI NO: 15233350 NR Description: RING-H2 finger protein RHA1b [Arabidopsis
  misc_feature (1)..(121): Homolog of NCBI NO: 11358777 NR Description: RING-H2 finger protein RHA1b [imported] -
  misc_feature (1)..(122): Homolog of NCBI NO: 11358776 NR Description: RING-H2 finger protein RHA1a [imported] -
  misc_feature (1)..(121): Homolog of NCBI NO: 15233117 NR Description: BRH1 RING finger protein [Arabidopsis thaliana]
  misc_feature (1)..(125): Homolog of NCBI NO: 21554155 NR Description: RING zinc finger protein-like [Arabidopsis
  misc_feature (1)..(125): Homolog of NCBI NO: 15238072 NR Description: RING-H2 zinc finger protein, putative
  misc_feature (1)..(134): Homolog of NCBI NO: 15222553 NR Description: RING-H2 finger protein, putative [Arabidopsis

SEQ ID NO: 44771 - protein, 95 aa, Arabidopsis thaliana
  peptide (1)..(95): Ceres Seq. ID no. 13580582
  misc_feature (18)..(61): Pfam Name: Zinc finger, C3HC4 type (RING finger) Pfam Description: Zinc finger, C3HC4 type (RING finger)
  misc_feature (1)..(68): Homolog of NCBI NO: 18411282 NR Description: zinc finger (C3HC4-type RING finger) protein
  misc_feature (1)..(67): Homolog of NCBI NO: 34897812 NR Description: P0514G12.26 [Oryza sativa (japonica
  misc_feature (1)..(83): Homolog of NCBI NO: 15233352 NR Description: RING-H2 finger protein, putative [Arabidopsis
  misc_feature (1)..(82): Homolog of NCBI NO: 15233350 NR Description: RING-H2 finger protein RHA1b [Arabidopsis
  misc_feature (1)..(82): Homolog of NCBI NO: 11358777 NR Description: RING-H2 finger protein RHA1b [imported] -
  misc_feature (1)..(83): Homolog of NCBI NO: 11358776 NR Description: RING-H2 finger protein RHA1a [imported] -
  misc_feature (1)..(82): Homolog of NCBI NO: 15233117 NR Description: BRH1 RING finger protein [Arabidopsis thaliana]
  misc_feature (1)..(86): Homolog of NCBI NO: 21554155 NR Description: RING zinc finger protein-like [Arabidopsis
  misc_feature (1)..(86): Homolog of NCBI NO: 15238072 NR Description: RING-H2 zinc finger protein, putative
  misc_feature (1)..(95): Homolog of NCBI NO: 15222553 NR Description: RING-H2 finger protein, putative [Arabidopsis
MLPVVRFSDINRPESECCAVCLYDFENDDEIRRLTNCRHIFHRGCLDRWMMGYNQMTCPLCRTQFIPDHLQLEFNQRLWSQSSAVSSQLLDESSS

SEQ ID NO: 44772 - DNA, 805 bp, Arabidopsis thaliana
  misc_feature (1)..(805): Ceres Seq. ID no. 12489069
  misc_feature: MA Experiment ID: 20000179 Result: Up-regulated in Transcription
  misc_feature: MA Experiment 20000179 PARAMETER Experiment Name: At_Germinating_Seeds_P Parameter: Age (hr) Value: 6 vs. 0
  misc_feature: MA Experiment 20000179 PARAMETER Experiment Name: At_Germinating_Seeds_P Parameter: Tissue Value: Germinating Seeds
  misc_feature: MA Experiment ID: 20000437 Result: Up-regulated in Transcription
  misc_feature: MA Experiment 20000437 PARAMETER Experiment Name: At_Drought_P Parameter: Age (day) Value: 8
  misc_feature: MA Experiment 20000437 PARAMETER Experiment Name: At_Drought_P Parameter: Organism Value: A. thaliana
  misc_feature: MA Experiment 20000437 PARAMETER Experiment Name: At_Drought_P Parameter: Plant Line Value: WS
  misc_feature: MA Experiment 20000437 PARAMETER Experiment Name: At_Drought_P Parameter: Timepoint (hr) Value: 24
  misc_feature: MA Experiment 20000437 PARAMETER Experiment Name: At_Drought_P Parameter: Tissue Value: Whole Plant
  misc_feature: MA Experiment 20000437 PARAMETER Experiment Name: At_Drought_P Parameter: Treatment Value: Drought vs. No Drought
  misc_feature: MA Experiment ID: 20001558 Result: Down-regulated in Transcription
  misc_feature: MA Experiment 20001558 PARAMETER Experiment Name: At_Drought_Soil_Dry_P Parameter: Age (day) Value: 27
  misc_feature: MA Experiment 20001558 PARAMETER Experiment Name: At_Drought_Soil_Dry_P Parameter: Organism Value: A. thaliana
  misc_feature: MA Experiment 20001558 PARAMETER Experiment Name: At_Drought_Soil_Dry_P Parameter: Plant Line Value: WS
  misc_feature: MA Experiment 20001558 PARAMETER Experiment Name: At_Drought_Soil_Dry_P Parameter: Post Timepoint (hr) Value: 6
  misc_feature: MA Experiment 20001558 PARAMETER Experiment Name: At_Drought_Soil_Dry_P Parameter: Post-Treatment Value: Re-Water vs. No Drought
  misc_feature: MA Experiment 20001558 PARAMETER Experiment Name: At_Drought_Soil_Dry_P Parameter: Timepoint (day) Value: 13
  misc_feature: MA Experiment 20001558 PARAMETER Experiment Name: At_Drought_Soil_Dry_P Parameter: Treatment Value: Drought vs. No Drought
  misc_feature: MA Experiment ID: 20001911 Result: Up-regulated in Transcription
  misc_feature: MA Experiment 20001911 PARAMETER Experiment Name: At_Drought_Reproduction_P Parameter: Age (day) Value: 40
  misc_feature: MA Experiment 20001911 PARAMETER Experiment Name: At_Drought_Reproduction_P Parameter: Organism Value: A. thaliana
  misc_feature: MA Experiment 20001911 PARAMETER Experiment Name: At_Drought_Reproduction_P Parameter: Plant Line Value: WS
  misc_feature: MA Experiment 20001911 PARAMETER Experiment Name: At_Drought_Reproduction_P Parameter: Timepoint (day) Value: 10
  misc_feature: MA Experiment 20001911 PARAMETER Experiment Name: At_Drought_Reproduction_P Parameter: Tissue Value: Flowers
  misc_feature: MA Experiment 20001911 PARAMETER Experiment Name: At_Drought_Reproduction_P Parameter: Treatment Value: Drought vs. No Drought
acacagcattatccaaaactcaaaattacagcgttgaaacagaaaccgatctcgtcgctgattctcttttcttcggatccttctagataatggctcgatctttctctcgttcactttctctatccaaaggccgtttcgccgccgcgtcatcctctctcctcccttcgtcgcaccttgtttcattccgatctcaatcttccgatcgtcggggagatctgtacgagattgatacctccgcggcttctcaatcgccgtcggatcctttaatacagaagctagaagacgccgttcaccggatttttgtgcgccgagctcagcctgattggctcccttttgttcctggtgcgtcttattgggtccctcctcctggatctggatctcagtctcatggaatcgctcagctcgttgtgaaactcgcgaatccgttaacacacgaagaatctttatctaccaattcttctcatggatggccttcctccgattatttccttaaaggtgttcaacctcaattgatggagaccaagaccgagacaacttcaaattccgagtctcactctgaggacgaggaagtgtaaaaatgacactgcttgtttgggctcttcaggatctcttgtcaagaccaagagctgccgaattcggacaaccaagagcaagtgaaaagacgtgaaatagaacgaccatatttctatacctgataccaaaatgtggaatatcgaataagactagtgttgtaggcttgtgtagcatgtcccgctgtttctcttttaaacagttgttgtatatatatatctctgtttccttgctc

SEQ ID NO: 44773 - protein, 161 aa, Arabidopsis thaliana
  peptide (1)..(161): Ceres Seq. ID no. 12489070
  misc_feature (1)..(156): Homolog of NCBI NO: 38346553 NR Description: OSJNBa0035M09.14 [Oryza sativa (japonica
  misc_feature (45)..(134): Homolog of NCBI NO: 14423398 NR Description: Unknown protein [Arabidopsis thaliana]
  misc_feature (1)..(134): Homolog of NCBI NO: 18398961 NR Description: expressed protein
  misc_feature (112)..(159): Homolog of NCBI NO: 38175698 NR Description: unknown protein [Oryza sativa (japonica
  misc_feature (1)..(110): Homolog of NCBI NO: 38175698 NR Description: unknown protein [Oryza sativa (japonica
  misc_feature (1)..(160): Homolog of NCBI NO: 25364101 NR Description: hypothetical protein F9K20.6 [imported] -
  misc_feature (1)..(160): Homolog of NCBI NO: 21592720 NR Description: unknown [Arabidopsis thaliana]
  misc_feature (1)..(160): Homolog of NCBI NO: 18412160 NR Description: expressed protein
  misc_feature (1)..(136): Homolog of NCBI NO: 30685027 NR Description: expressed protein [Arabidopsis thaliana]
  misc_feature (1)..(161): Homolog of NCBI NO: 18394407 NR Description: expressed protein
MARSFSRSLSLSKGRFAAASSSLLPSSHLVSFRSQSSDRRGDLYEIDTSAASQSPSDPLIQKLEDAVHRIFVRRAQPDWLPFVPGASYWVPPPGSGSQSHGIAQLVVKLANPLTHEESLSTNSSHGWPSSDYFLKGVQPQLMETKTETTSNSESHSEDEEV

SEQ ID NO: 44774 - DNA, 733 bp, Arabidopsis thaliana
  misc_feature (1)..(733): Ceres Seq. ID no. 13504686
  misc_feature: MA Experiment ID: 20000173 Result: Up-regulated in Transcription
  misc_feature: MA Experiment 20000173 PARAMETER Experiment Name: At_42deg_Heat_P Parameter: Age (day) Value: 14
  misc_feature: MA Experiment 20000173 PARAMETER Experiment Name: At_42deg_Heat_P Parameter: Organism Value: A. thaliana
  misc_feature: MA Experiment 20000173 PARAMETER Experiment Name: At_42deg_Heat_P Parameter: Plant Line Value: WS
  misc_feature: MA Experiment 20000173 PARAMETER Experiment Name: At_42deg_Heat_P Parameter: Temperature (deg C) Value: 42 vs. 22
  misc_feature: MA Experiment 20000173 PARAMETER Experiment Name: At_42deg_Heat_P Parameter: Timepoint (hr) Value: 6
  misc_feature: MA Experiment 20000173 PARAMETER Experiment Name: At_42deg_Heat_P Parameter: Tissue Value: Aerial
  misc_feature: MA Experiment ID: 20000180 Result: Down-regulated in Transcription
  misc_feature: MA Experiment 20000180 PARAMETER Experiment Name: At_Germinating_Seeds_P Parameter: Age (hr) Value: 24 vs. 0
  misc_feature: MA Experiment 20000180 PARAMETER Experiment Name: At_Germinating_Seeds_P Parameter: Tissue Value: Germinating Seeds
  misc_feature: MA Experiment ID: 20001757 Result: Up-regulated in Transcription
  misc_feature: MA Experiment 20001757 PARAMETER Experiment Name: At_50mM_NH4NO3_L-to-H_P Parameter: Timepoint (hr) Value: 6
  misc_feature: MA Experiment 20001757 PARAMETER Experiment Name: At_50mM_NH4NO3_L-to-H_P Parameter: Tissue Value: Leaf
  misc_feature: MA Experiment 20001757 PARAMETER Experiment Name: At_50mM_NH4NO3_L-to-H_P Parameter: Treatment Value: 50mM NH4NO3 vs 100mM Mannitol
acaatcacagtaccaaaaaaaaatggcagccgccgcaccgccaccgccaccaacagcagcaccggaaccaaacatggtagcaccactaatttcaccaatcggccacccaatgttctcccggatccgtctggcaacaccgtccgatgtcccattcatccacaaactaattcaccaaatggcagtcttcgaacgtctcacgcatctcttctccgccaccgaatcaggtctcgcttcaacactcttcacctctcgtcctttccaatcattcacagtcttcctcttagaagtctctcgttctccatttccagcaaccatcacttcatcaccatctcccgatttcacaccgtttttcaaaacacataaccttgatctcccgattgatgatccggagagttacaatttctcgccggatatgttgaacgacgtcgttgtagctgggtttgttctgtttttcccgaattactctagctttttgtccaagcctggtttttacattgaggatatatttgtgagagagccttataggaggaaagggtttggtagcatgttgttgactgctgtggccaaacaagcggtgaagatgggttatggaagagtggaatgggttgttcttgattggaatgttaatgctatcaagttttatgagcagatgggtgctcagattctgcaggagtggagagtttgtagacttactggtgatgctcttgaagcttttgatcaggtcaacatctag

SEQ ID NO: 44775 - protein, 243 aa, Arabidopsis thaliana
  peptide (1)..(243): Ceres Seq. ID no. 13504687
  misc_feature (136)..(220): Pfam Name: Acetyltransferase (GNAT) family Pfam Description: Acetyltransferase (GNAT) family
  misc_feature (37)..(85): Homolog of NCBI NO: 22982569 NR Description: hypothetical protein [Burkholderia fungorum]
  misc_feature (140)..(236): Homolog of NCBI NO: 22982569 NR Description: hypothetical protein [Burkholderia fungorum]
  misc_feature (37)..(238): Homolog of NCBI NO: 19908257 NR Description: N-hydroxycinnamoyl-CoA:tyramine
  misc_feature (41)..(86): Homolog of NCBI NO: 37521305 NR Description: probable acetyltransferase [Gloeobacter
  misc_feature (145)..(235): Homolog of NCBI NO: 37521305 NR Description: probable acetyltransferase [Gloeobacter
  misc_feature (41)..(85): Homolog of NCBI NO: 22298643 NR Description: ORF_ID:tll1099~putative acetyltransferase
  misc_feature (144)..(238): Homolog of NCBI NO: 22298643 NR Description: ORF_ID:tll1099~putative acetyltransferase
  misc_feature (37)..(243): Homolog of NCBI NO: 15451162 NR Description: Unknown protein [Arabidopsis thaliana]
  misc_feature (16)..(243): Homolog of NCBI NO: 18404927 NR Description: GCN5-related N-acetyltransferase (GNAT) family
  misc_feature (8)..(243): Homolog of NCBI NO: 15225009 NR Description: GCN5-related N-acetyltransferase (GNAT) family
QSQYQKKMAAAAPPPPPTAAPEPNMVAPLISPIGHPMFSRIRLATPSDVPFIHKLIHQMAVFERLTHLFSATESGLASTLFTSRPFQSFTVFLLEVSRSPFPATITSSPSPDFTPFFKTHNLDLPIDDPESYNFSPDMLNDVVVAGFVLFFPNYSSFLSKPGFYIEDIFVREPYRRKGFGSMLLTAVAKQAVKMGYGRVEWVVLDWNVNAIKFYEQMGAQILQEWRVCRLTGDALEAFDQVNI

SEQ ID NO: 44776 - protein, 236 aa, Arabidopsis thaliana
  peptide (1)..(236): Ceres Seq. ID no. 13504688
  misc_feature (129)..(213): Pfam Name: Acetyltransferase (GNAT) family Pfam Description: Acetyltransferase (GNAT) family
  misc_feature (30)..(78): Homolog of NCBI NO: 22982569 NR Description: hypothetical protein [Burkholderia fungorum]
  misc_feature (133)..(229): Homolog of NCBI NO: 22982569 NR Description: hypothetical protein [Burkholderia fungorum]
  misc_feature (30)..(231): Homolog of NCBI NO: 19908257 NR Description: N-hydroxycinnamoyl-CoA:tyramine
  misc_feature (34)..(79): Homolog of NCBI NO: 37521305 NR Description: probable acetyltransferase [Gloeobacter
  misc_feature (138)..(228): Homolog of NCBI NO: 37521305 NR Description: probable acetyltransferase [Gloeobacter
  misc_feature (34)..(78): Homolog of NCBI NO: 22298643 NR Description: ORF_ID:tll1099~putative acetyltransferase
  misc_feature (137)..(231): Homolog of NCBI NO: 22298643 NR Description: ORF_ID:tll1099~putative acetyltransferase
  misc_feature (30)..(236): Homolog of NCBI NO: 15451162 NR Description: Unknown protein [Arabidopsis thaliana]
  misc_feature (9)..(236): Homolog of NCBI NO: 18404927 NR Description: GCN5-related N-acetyltransferase (GNAT) family
  misc_feature (1)..(236): Homolog of NCBI NO: 15225009 NR Description: GCN5-related N-acetyltransferase (GNAT) family
MAAAAPPPPPTAAPEPNMVAPLISPIGHPMFSRIRLATPSDVPFIHKLIHQMAVFERLTHLFSATESGLASTLFTSRPFQSFTVFLLEVSRSPFPATITSSPSPDFTPFFKTHNLDLPIDDPESYNFSPDMLNDVVVAGFVLFFPNYSSFLSKPGFYIEDIFVREPYRRKGFGSMLLTAVAKQAVKMGYGRVEWVVLDWNVNAIKFYEQMGAQILQEWRVCRLTGDALEAFDQVNI

SEQ ID NO: 44777 - protein, 219 aa, Arabidopsis thaliana
  peptide (1)..(219): Ceres Seq. ID no. 13504689
  misc_feature (112)..(196): Pfam Name: Acetyltransferase (GNAT) family Pfam Description: Acetyltransferase (GNAT) family
  misc_feature (13)..(61): Homolog of NCBI NO: 22982569 NR Description: hypothetical protein [Burkholderia fungorum]
  misc_feature (116)..(212): Homolog of NCBI NO: 22982569 NR Description: hypothetical protein [Burkholderia fungorum]
  misc_feature (13)..(214): Homolog of NCBI NO: 19908257 NR Description: N-hydroxycinnamoyl-CoA:tyramine
  misc_feature (17)..(62): Homolog of NCBI NO: 37521305 NR Description: probable acetyltransferase [Gloeobacter
  misc_feature (121)..(211): Homolog of NCBI NO: 37521305 NR Description: probable acetyltransferase [Gloeobacter
  misc_feature (17)..(61): Homolog of NCBI NO: 22298643 NR Description: ORF_ID:tll1099~putative acetyltransferase
  misc_feature (120)..(214): Homolog of NCBI NO: 22298643 NR Description: ORF_ID:tll1099~putative acetyltransferase
  misc_feature (13)..(219): Homolog of NCBI NO: 15451162 NR Description: Unknown protein [Arabidopsis thaliana]
  misc_feature (1)..(219): Homolog of NCBI NO: 18404927 NR Description: GCN5-related N-acetyltransferase (GNAT) family
  misc_feature (1)..(219): Homolog of NCBI NO: 15225009 NR Description: GCN5-related N-acetyltransferase (GNAT) family
MVAPLISPIGHPMFSRIRLATPSDVPFIHKLIHQMAVFERLTHLFSATESGLASTLFTSRPFQSFTVFLLEVSRSPFPATITSSPSPDFTPFFKTHNLDLPIDDPESYNFSPDMLNDVVVAGFVLFFPNYSSFLSKPGFYIEDIFVREPYRRKGFGSMLLTAVAKQAVKMGYGRVEWVVLDWNVNAIKFYEQMGAQILQEWRVCRLTGDALEAFDQVNI

SEQ ID NO: 44778 - DNA, 2328 bp, Arabidopsis thaliana
  misc_feature (1)..(2328): Ceres Seq. ID no. 12455357
  misc_feature: MA Experiment ID: 20000440 Result: Up-regulated in Transcription
  misc_feature: MA Experiment 20000440 PARAMETER Experiment Name: At_Closed-Flower__Sub_P Parameter: Tissue Value: Closed Flower vs. Whole Plant
atcgctgttcttcagtctcgcttctttgtaaactgtaaaggatcaagcttttctattcagatcaaatccacttcactatacccttttttagtttcgttaacccagctcaaatccgagatgagatatcaacaatggcgattgatgcttcttcgaagctaccatcgttctcatcttccttatctatctccttgttctcaggtaacctccatttcatcgcgatctttctcttctttcattcaccctgggatcggagctttgcaacaaagtgaacaactttgtcccttacgatccccaatgacgagctctggcaacttagtgaaatcagtgggtcgaagcttctcgtccgagcctgcggttgaagagaaatcttctgctgaggctaccgtgattgatatttttagtagattgagtggtgaggatgagattaggaaggagttggaatcgagtggtgtagtgattagccaagatttagctttgaaggttttgagaaagctcgaatcaaaccctgatgttgccaaaagttttttccagtggattaaggaggcttctcctgaggaacttagctcgaagaactataacatgatgctgcggattctgggtggtaatggacttgttgatgagttttgggggttggttgatgtgatgaagaagaaagggcatggtttatcggctaatgttagagataaagtgggtgacaaatttcagaaagatgggctggagagtgatttgctgaggctgagaaagctttttacttcagattgtttagataattcggcggagaatgtttgcgatagggtgtgtaagattgtgatgaaggaagaatggggtgatgatgtagagaaacgggtaagagatttgaatgttgagtttaagagtgatttagtgaagatgattgtggaacgtcttgatgttgaacccaggaaagctttgttgttcttccggtggattgatgagtctgatctctttaagcatgatgagaaaacctataatgctatggctagggttttgggaaaagagaagtttcttgatagatttcagaacattgtagtagaaatgaggagtgctggttatgaagtggaaatagagacttatgttagagtttcaacgaggttctgccagactaaattgatcaaggaagctgttgacttgtttgagattgcaatggcaggtagtagtagtagtaacaaccccaccccacactgcttctgtttgttgctcaagaaaattgtcactgccaagattctagatatggatttgttttcaagagctgtgaaagtttataccaaaaatggtaatgctttgacggattccttgctgaaatctgtcttaaagtccttgagaagcgtggatagggttgaacagagcaatgagctgttgaaagaaatgaagagaggaggctatgttcctagtggtgatatgcagagcatgattgcatcaagtcttagtcgtaagggaaagaaggacgaagctgatgaatttgtagactttatggaatcatccggaaacaatctagatgacaaggcaatggcgtctcttgttgaagggtattgtgattccgggaatcttgatgaagctttagtgtgtttcgagaaaatggttggaaacacgggagtctcctatgctgattattcatttgagaagttggttcttgcttattgcaacaagaatcaagtaagagatgcatacaagcttttgagtgcacaagtaacgaaaaatcaactgaaacctcgtcatagcacatacaaaagcttggtgacgaatctgttgacgaagaagattgcaagggatggtgggtttgaagaagctttgagtcttctaccgataatgaaagatcacgggttccctcctttcattgaccctttcatgagttacttctcatcaactggaaaaagcactgaagctctcggttttttgaaggctatgacctcgaataactttccatatatatcagtggttctgcgtgtattcgaaactatgatgaagtctgcaagacacagtgaagcacaagatttactctctctgtgcccaaactatatccgtaataatccggatgttctagaactcttcaataccatgaaacccaacgaatctgctgtagaaaaacctttggctgcttctgcttagctccagttttagtttacattccttcaagtctttttggtttctgggcatttgattcaaataatttggccagaatatttcctgctgttcccttttgtttacatgtatcactcaccagtcaccagttaactttcttcatcaacctggtgcactggcaaaataattttaaggtactatgtttttttatattccacttgcttatcatct

SEQ ID NO: 44779 - protein, 707 aa, Arabidopsis thaliana
  peptide (1)..(707): Ceres Seq. ID no. 12455358
  misc_feature (190)..(224): Pfam Name: PPR repeat Pfam Description: PPR repeat
  misc_feature (86)..(669): Homolog of NCBI NO: 15240032 NR Description: putative protein; protein id: At5g06400.1
  misc_feature (236)..(615): Homolog of NCBI NO: 15228104 NR Description: unknown protein; protein id: At2g37230.1
  misc_feature (254)..(597): Homolog of NCBI NO: 15228788 NR Description: putative protein; protein id: At3g62540.1
  misc_feature (254)..(593): Homolog of NCBI NO: 15228767 NR Description: putative protein; protein id: At3g62470.1
  misc_feature (254)..(597): Homolog of NCBI NO: 15241508 NR Description: putative protein; protein id: At5g14820.1
  misc_feature (256)..(668): Homolog of NCBI NO: 15231338 NR Description: hypothetical protein; protein id: At3g06920.1
  misc_feature (77)..(686): Homolog of NCBI NO: 15231863 NR Description: putative protein
  misc_feature (162)..(698): Homolog of NCBI NO: 34905990 NR Description: P0518C01.6 [Oryza sativa (japonica
  misc_feature (68)..(689): Homolog of NCBI NO: 15228363 NR Description: putative protein; protein id: At3g48250.1
  misc_feature (40)..(707): Homolog of NCBI NO: 15232917 NR Description: unknown protein; protein id: At3g02490.1
IAVLQSRFFVNCKGSSFSIQIKSTSLYPFLVSLTQLKSEMRYQQWRLMLLRSYHRSHLPYLSPCSQVTSISSRSFSSFIHPGIGALQQSEQLCPLRSPMTSSGNLVKSVGRSFSSEPAVEEKSSAEATVIDIFSRLSGEDEIRKELESSGVVISQDLALKVLRKLESNPDVAKSFFQWIKEASPEELSSKNYNMMLRILGGNGLVDEFWGLVDVMKKKGHGLSANVRDKVGDKFQKDGLESDLLRLRKLFTSDCLDNSAENVCDRVCKIVMKEEWGDDVEKRVRDLNVEFKSDLVKMIVERLDVEPRKALLFFRWIDESDLFKHDEKTYNAMARVLGKEKFLDRFQNIVVEMRSAGYEVEIETYVRVSTRFCQTKLIKEAVDLFEIAMAGSSSSNNPTPHCFCLLLKKIVTAKILDMDLFSRAVKVYTKNGNALTDSLLKSVLKSLRSVDRVEQSNELLKEMKRGGYVPSGDMQSMIASSLSRKGKKDEADEFVDFMESSGNNLDDKAMASLVEGYCDSGNLDEALVCFEKMVGNTGVSYADYSFEKLVLAYCNKNQVRDAYKLLSAQVTKNQLKPRHSTYKSLVTNLLTKKIARDGGFEEALSLLPIMKDHGFPPFIDPFMSYFSSTGKSTEALGFLKAMTSNNFPYISVVLRVFETMMKSARHSEAQDLLSLCPNYIRNNPDVLELFNTMKPNESAVEKPLAASA

SEQ ID NO: 44780 - protein, 668 aa, Arabidopsis thaliana
  peptide (1)..(668): Ceres Seq. ID no. 12455359
  misc_feature (151)..(185): Pfam Name: PPR repeat Pfam Description: PPR repeat
  misc_feature (47)..(630): Homolog of NCBI NO: 15240032 NR Description: putative protein; protein id: At5g06400.1
  misc_feature (197)..(576): Homolog of NCBI NO: 15228104 NR Description: unknown protein; protein id: At2g37230.1
  misc_feature (215)..(558): Homolog of NCBI NO: 15228788 NR Description: putative protein; protein id: At3g62540.1
  misc_feature (215)..(554): Homolog of NCBI NO: 15228767 NR Description: putative protein; protein id: At3g62470.1
  misc_feature (215)..(558): Homolog of NCBI NO: 15241508 NR Description: putative protein; protein id: At5g14820.1
  misc_feature (217)..(629): Homolog of NCBI NO: 15231338 NR Description: hypothetical protein; protein id: At3g06920.1
  misc_feature (38)..(647): Homolog of NCBI NO: 15231863 NR Description: putative protein
  misc_feature (123)..(659): Homolog of NCBI NO: 34905990 NR Description: P0518C01.6 [Oryza sativa (japonica
  misc_feature (29)..(650): Homolog of NCBI NO: 15228363 NR Description: putative protein; protein id: At3g48250.1
  misc_feature (1)..(668): Homolog of NCBI NO: 15232917 NR Description: unknown protein; protein id: At3g02490.1
MRYQQWRLMLLRSYHRSHLPYLSPCSQVTSISSRSFSSFIHPGIGALQQSEQLCPLRSPMTSSGNLVKSVGRSFSSEPAVEEKSSAEATVIDIFSRLSGEDEIRKELESSGVVISQDLALKVLRKLESNPDVAKSFFQWIKEASPEELSSKNYNMMLRILGGNGLVDEFWGLVDVMKKKGHGLSANVRDKVGDKFQKDGLESDLLRLRKLFTSDCLDNSAENVCDRVCKIVMKEEWGDDVEKRVRDLNVEFKSDLVKMIVERLDVEPRKALLFFRWIDESDLFKHDEKTYNAMARVLGKEKFLDRFQNIVVEMRSAGYEVEIETYVRVSTRFCQTKLIKEAVDLFEIAMAGSSSSNNPTPHCFCLLLKKIVTAKILDMDLFSRAVKVYTKNGNALTDSLLKSVLKSLRSVDRVEQSNELLKEMKRGGYVPSGDMQSMIASSLSRKGKKDEADEFVDFMESSGNNLDDKAMASLVEGYCDSGNLDEALVCFEKMVGNTGVSYADYSFEKLVLAYCNKNQVRDAYKLLSAQVTKNQLKPRHSTYKSLVTNLLTKKIARDGGFEEALSLLPIMKDHGFPPFIDPFMSYFSSTGKSTEALGFLKAMTSNNFPYISVVLRVFETMMKSARHSEAQDLLSLCPNYIRNNPDVLELFNTMKPNESAVEKPLAASA

SEQ ID NO: 44781 - protein, 660 aa, Arabidopsis thaliana
  peptide (1)..(660): Ceres Seq. ID no. 12455360
  misc_feature (143)..(177): Pfam Name: PPR repeat Pfam Description: PPR repeat
  misc_feature (39)..(622): Homolog of NCBI NO: 15240032 NR Description: putative protein; protein id: At5g06400.1
  misc_feature (189)..(568): Homolog of NCBI NO: 15228104 NR Description: unknown protein; protein id: At2g37230.1
  misc_feature (207)..(550): Homolog of NCBI NO: 15228788 NR Description: putative protein; protein id: At3g62540.1
  misc_feature (207)..(546): Homolog of NCBI NO: 15228767 NR Description: putative protein; protein id: At3g62470.1
  misc_feature (207)..(550): Homolog of NCBI NO: 15241508 NR Description: putative protein; protein id: At5g14820.1
  misc_feature (209)..(621): Homolog of NCBI NO: 15231338 NR Description: hypothetical protein; protein id: At3g06920.1
  misc_feature (30)..(639): Homolog of NCBI NO: 15231863 NR Description: putative protein
  misc_feature (115)..(651): Homolog of NCBI NO: 34905990 NR Description: P0518C01.6 [Oryza sativa (japonica
  misc_feature (21)..(642): Homolog of NCBI NO: 15228363 NR Description: putative protein; protein id: At3g48250.1
  misc_feature (1)..(660): Homolog of NCBI NO: 15232917 NR Description: unknown protein; protein id: At3g02490.1
MLLRSYHRSHLPYLSPCSQVTSISSRSFSSFIHPGIGALQQSEQLCPLRSPMTSSGNLVKSVGRSFSSEPAVEEKSSAEATVIDIFSRLSGEDEIRKELESSGVVISQDLALKVLRKLESNPDVAKSFFQWIKEASPEELSSKNYNMMLRILGGNGLVDEFWGLVDVMKKKGHGLSANVRDKVGDKFQKDGLESDLLRLRKLFTSDCLDNSAENVCDRVCKIVMKEEWGDDVEKRVRDLNVEFKSDLVKMIVERLDVEPRKALLFFRWIDESDLFKHDEKTYNAMARVLGKEKFLDRFQNIVVEMRSAGYEVEIETYVRVSTRFCQTKLIKEAVDLFEIAMAGSSSSNNPTPHCFCLLLKKIVTAKILDMDLFSRAVKVYTKNGNALTDSLLKSVLKSLRSVDRVEQSNELLKEMKRGGYVPSGDMQSMIASSLSRKGKKDEADEFVDFMESSGNNLDDKAMASLVEGYCDSGNLDEALVCFEKMVGNTGVSYADYSFEKLVLAYCNKNQVRDAYKLLSAQVTKNQLKPRHSTYKSLVTNLLTKKIARDGGFEEALSLLPIMKDHGFPPFIDPFMSYFSSTGKSTEALGFLKAMTSNNFPYISVVLRVFETMMKSARHSEAQDLLSLCPNYIRNNPDVLELFNTMKPNESAVEKPLAASA

SEQ ID NO: 44782 - DNA, 2204 bp, Arabidopsis thaliana
  misc_feature (1)..(2204): Ceres Seq. ID no. 12489344
  misc_feature: MA Experiment ID: 20000166 Result: Down-regulated in Transcription
  misc_feature: MA Experiment 20000166 PARAMETER Experiment Name: At_100uM_ABA_P Parameter: Age (day) Value: 14
  misc_feature: MA Experiment 20000166 PARAMETER Experiment Name: At_100uM_ABA_P Parameter: Organism Value: A. thaliana
  misc_feature: MA Experiment 20000166 PARAMETER Experiment Name: At_100uM_ABA_P Parameter: Plant Line Value: WS
  misc_feature: MA Experiment 20000166 PARAMETER Experiment Name: At_100uM_ABA_P Parameter: Timepoint (hr) Value: 1
  misc_feature: MA Experiment 20000166 PARAMETER Experiment Name: At_100uM_ABA_P Parameter: Tissue Value: Aerial
  misc_feature: MA Experiment 20000166 PARAMETER Experiment Name: At_100uM_ABA_P Parameter: Treatment Value: 100uM ABA vs. No Treatment
  misc_feature: MA Experiment ID: 20000436 Result: Down-regulated in Transcription
  misc_feature: MA Experiment 20000436 PARAMETER Experiment Name: At_Drought_P Parameter: Age (day) Value: 7
  misc_feature: MA Experiment 20000436 PARAMETER Experiment Name: At_Drought_P Parameter: Organism Value: A. thaliana
  misc_feature: MA Experiment 20000436 PARAMETER Experiment Name: At_Drought_P Parameter: Plant Line Value: WS
  misc_feature: MA Experiment 20000436 PARAMETER Experiment Name: At_Drought_P Parameter: Timepoint (hr) Value: 12
  misc_feature: MA Experiment 20000436 PARAMETER Experiment Name: At_Drought_P Parameter: Tissue Value: Whole Plant
  misc_feature: MA Experiment 20000436 PARAMETER Experiment Name: At_Drought_P Parameter: Treatment Value: Drought vs. No Drought
  misc_feature: MA Experiment ID: 20000437 Result: Down-regulated in Transcription
  misc_feature: MA Experiment 20000437 PARAMETER Experiment Name: At_Drought_P Parameter: Age (day) Value: 8
  misc_feature: MA Experiment 20000437 PARAMETER Experiment Name: At_Drought_P Parameter: Organism Value: A. thaliana
  misc_feature: MA Experiment 20000437 PARAMETER Experiment Name: At_Drought_P Parameter: Plant Line Value: WS
  misc_feature: MA Experiment 20000437 PARAMETER Experiment Name: At_Drought_P Parameter: Timepoint (hr) Value: 24
  misc_feature: MA Experiment 20000437 PARAMETER Experiment Name: At_Drought_P Parameter: Tissue Value: Whole Plant
  misc_feature: MA Experiment 20000437 PARAMETER Experiment Name: At_Drought_P Parameter: Treatment Value: Drought vs. No Drought
  misc_feature: MA Experiment ID: 20000439 Result: Up-regulated in Transcription
  misc_feature: MA Experiment 20000439 PARAMETER Experiment Name: At_Roots__P Parameter: Age (day) Value: 14 vs. 21
  misc_feature: MA Experiment 20000439 PARAMETER Experiment Name: At_Roots__P Parameter: Organism Value: A. thaliana
  misc_feature: MA Experiment 20000439 PARAMETER Experiment Name: At_Roots__P Parameter: Tissue Value: Roots vs. Whole Plant
  misc_feature: MA Experiment ID: 20000441 Result: Up-regulated in Transcription
  misc_feature: MA Experiment 20000441 PARAMETER Experiment Name: At_1uM_BR-BRZ__P Parameter: Tissue Value: Shoot Apices
  misc_feature: MA Experiment 20000441 PARAMETER Experiment Name: At_1uM_BR-BRZ__P Parameter: Treatment Value: 1uM BR vs. No Treatment
  misc_feature: MA Experiment ID: 20000443 Result: Up-regulated in Transcription
  misc_feature: MA Experiment 20000443 PARAMETER Experiment Name: At_1uM_BR-BRZ__P Parameter: Tissue Value: Shoot Apices
  misc_feature: MA Experiment 20000443 PARAMETER Experiment Name: At_1uM_BR-BRZ__P Parameter: Treatment Value: 1uM BRZ vs. No Treatment
  misc_feature: MA Experiment ID: 20000575 Result: Down-regulated in Transcription
  misc_feature: MA Experiment 20000575 PARAMETER Experiment Name: At_100uM_ABA_Mutants__P Parameter: Organism Value: A. thaliana
  misc_feature: MA Experiment 20000575 PARAMETER Experiment Name: At_100uM_ABA_Mutants__P Parameter: Plant Line Value: CS22
  misc_feature: MA Experiment 20000575 PARAMETER Experiment Name: At_100uM_ABA_Mutants__P Parameter: Timepoint (hr) Value: 6
  misc_feature: MA Experiment 20000575 PARAMETER Experiment Name: At_100uM_ABA_Mutants__P Parameter: Tissue Value: Whole Plant
  misc_feature: MA Experiment 20000575 PARAMETER Experiment Name: At_100uM_ABA_Mutants__P Parameter: Treatment Value: 1uM ABA vs. No Treatment
  misc_feature: MA Experiment ID: 20000576 Result: Down-regulated in Transcription
  misc_feature: MA Experiment 20000576 PARAMETER Experiment Name: At_100uM_ABA_Mutants__P Parameter: Organism Value: A. thaliana
  misc_feature: MA Experiment 20000576 PARAMETER Experiment Name: At_100uM_ABA_Mutants__P Parameter: Plant Line Value: CS23
  misc_feature: MA Experiment 20000576 PARAMETER Experiment Name: At_100uM_ABA_Mutants__P Parameter: Timepoint (hr) Value: 6
  misc_feature: MA Experiment 20000576 PARAMETER Experiment Name: At_100uM_ABA_Mutants__P Parameter: Tissue Value: Whole Plant
  misc_feature: MA Experiment 20000576 PARAMETER Experiment Name: At_100uM_ABA_Mutants__P Parameter: Treatment Value: 1uM ABA vs. No Treatment
  misc_feature: MA Experiment ID: 20000606 Result: Up-regulated in Transcription
  misc_feature: MA Experiment 20000606 PARAMETER Experiment Name: At_CS8548_Mutant_P Parameter: Age (day) Value: 14
  misc_feature: MA Experiment 20000606 PARAMETER Experiment Name: At_CS8548_Mutant_P Parameter: Plant Line Value: CS8548 vs. wt
  misc_feature: MA Experiment 20000606 PARAMETER Experiment Name: At_CS8548_Mutant_P Parameter: Tissue Value: Whole Plant
  misc_feature: MA Experiment ID: 20001248 Result: Up-regulated in Transcription
  misc_feature: MA Experiment 20001248 PARAMETER Experiment Name: At_Far-red-induction_P Parameter: Age (day) Value: 7
  misc_feature: MA Experiment 20001248 PARAMETER Experiment Name: At_Far-red-induction_P Parameter: Light Value: Far-red vs. White
  misc_feature: MA Experiment 20001248 PARAMETER Experiment Name: At_Far-red-induction_P Parameter: Organism Value: A. thaliana
  misc_feature: MA Experiment 20001248 PARAMETER Experiment Name: At_Far-red-induction_P Parameter: Plant Line Value: Columbia
  misc_feature: MA Experiment 20001248 PARAMETER Experiment Name: At_Far-red-induction_P Parameter: Timepoint (hr) Value: 4
  misc_feature: MA Experiment 20001248 PARAMETER Experiment Name: At_Far-red-induction_P Parameter: Tissue Value: Whole Plant
  misc_feature: MA Experiment ID: 20001557 Result: Up-regulated in Transcription
  misc_feature: MA Experiment 20001557 PARAMETER Experiment Name: At_Drought_Soil_Dry_P Parameter: Age (day) Value: 27
  misc_feature: MA Experiment 20001557 PARAMETER Experiment Name: At_Drought_Soil_Dry_P Parameter: Organism Value: A. thaliana
  misc_feature: MA Experiment 20001557 PARAMETER Experiment Name: At_Drought_Soil_Dry_P Parameter: Plant Line Value: WS
  misc_feature: MA Experiment 20001557 PARAMETER Experiment Name: At_Drought_Soil_Dry_P Parameter: Post Timepoint (hr) Value: 3
  misc_feature: MA Experiment 20001557 PARAMETER Experiment Name: At_Drought_Soil_Dry_P Parameter: Post-Treatment Value: Re-Water vs. No Drought
  misc_feature: MA Experiment 20001557 PARAMETER Experiment Name: At_Drought_Soil_Dry_P Parameter: Timepoint (day) Value: 13
  misc_feature: MA Experiment 20001557 PARAMETER Experiment Name: At_Drought_Soil_Dry_P Parameter: Treatment Value: Drought vs. No Drought
atagattagagaaaaaaagcttcaagctttcatggaacatgtcagagttatcttcttctttgcttgtttcctaacgcttgctccatttcatgcctttgctcaggtagattcctatgagtttgatccagatttcaactgtgttgatcgtggcaacttcacggcgaacagcacttttgccgggaatctcaaccgccttgtctcctccctctcctcactcaaatcccaagcttatggcttctacaacctctcttctggagactcatctggagaaagagcttatgcaattggtctgtgtagaagagaagtcaaaagagatgattgtgtcagctgtattcagacagctgcaagaaacctcaccaagcagtgtccgctgacaaaacaagctgttgtatggtacacgcactgtatgtttcgttactcaaacaggacaatctacggaagaaaagaaacgaacccgactaaggcttttattgctggtgaagagatatcagcaaacagagatgactttgagcgtctgcagagaggactattggacagactcaaaggaattgcggctgctggtgggcctaataggaaatacgctcaaggaaacggttcagcttcggctgggtaccggagattctatggaactgtgcaatgtacgccagatttgtctgaacaggattgtaatgattgtttagtttttgggtttgagaatattccgagttgttgtgatgctgagattggtcttcggtggttttctcctagttgtaacttccggtttgagacgtggagattctacgagtttgatgccgacctagagccagatccacctgcaattcagcctgctgattcaccacaatcagctgcaagaactgagaggacaggaaagggcaaaggtggatctaaagtcattatcgcgatagtcatcccgatacttcttgttgcgttactcgcaatttgcctatgcttggtcttgaagtggaggaagaacaagtctggatataaaaacaaagttcttgggaaatcacctttgtcgggttcaattgccgaggatgagttctcgaacacagaatcactcttagttcattttgagactctaaagacagcaacagataacttttcttcagaaaacgaacttggacgtggtgggtttggttcagtttataagggtgtgttccctcaggggcaagaaatcgcggtgaagagattatcgggtaattctggacaaggagacaacgagttcaagaacgaaatattactacttgcaaagcttcaacataggaacttggtcaggcttataggtttctgcatacaaggagaagaaagactccttgtctatgagttcatcaagaacgctagtcttgaccaatttatcttcgatactgagaagcgtcaacttttggattgggtagtgcggtacaaaatgatcggaggaattgctagaggactcctttatcttcatgaagactctcgtttccggataattcatcgtgatcttaaagctagcaacattcttttggaccaagaaatgaatccgaaaatcgcagattttggattagctaaactctttgactcaggccaaaccatgacacatcgattcacaagcaggattgcaggaacttacggatatatggctccggaatacgcaatgcatggacaattctctgtgaaaacagatgttttcagcttcggtgtattagtcattgagatcattacaggtaaaagaaacaacaatggtggatcgaatggtgacgaagatgcagaagatcttcttagttgggtgtggagaagctggagagaagacactatactaagcgtgatcgatccgagtttaaccgcaggatcaagaaatgagatcttgagatgcatacacattggtcttttatgtgtgcaagaaagtgcagcgactagaccaacaatggctacggtttctctcatgctcaatagctattcttttaccctcccgacgcctttgaggcctgcgtttgtgttggagagtgtcgtcataccttcaaatgtttcttcttcaacggaagggttacaaatgtcgtcaaatgatgttactgtttctgagttttctcctcgttaatctgtaaatgttttgattcttctctgaaaacctttgaaatgggttttgtttgtgtgatttttcaggcagcctggcttgatcttgttgtgaataaaacatgaatgtgaagctgtgagatactttttcctttgtc

SEQ ID NO: 44783 - protein, 679 aa, Arabidopsis thaliana
  peptide (1)..(679): Ceres Seq. ID no. 12489345
  misc_feature (197)..(251): Pfam Name: Domain of unknown function DUF26 Pfam Description: Domain of unknown function DUF26
  misc_feature (11)..(679): Homolog of NCBI NO: 15234659 NR Description: receptor protein kinase - like protein; protein
  misc_feature (13)..(122): Homolog of NCBI NO: 18076587 NR Description: putative receptor-like serine-threonine protein
  misc_feature (157)..(674): Homolog of NCBI NO: 18076587 NR Description: putative receptor-like serine-threonine protein
  misc_feature (13)..(674): Homolog of NCBI NO: 18076589 NR Description: putative receptor-like serine-threonine protein
  misc_feature (13)..(679): Homolog of NCBI NO: 18076583 NR Description: putative receptor-like serine-threonine protein
  misc_feature (13)..(674): Homolog of NCBI NO: 18076585 NR Description: putative receptor-like serine-threonine protein
  misc_feature (40)..(679): Homolog of NCBI NO: 15234824 NR Description: receptor-like protein kinase - like protein
  misc_feature (11)..(679): Homolog of NCBI NO: 4530126 NR Description: receptor-like protein kinase homolog RK20-1
  misc_feature (442)..(679): Homolog of NCBI NO: 15234434 NR Description: serine threonine protein kinase - like protein
  misc_feature (1)..(443): Homolog of NCBI NO: 15234434 NR Description: serine threonine protein kinase - like protein
MEHVRVIFFFACFLTLAPFHAFAQVDSYEFDPDFNCVDRGNFTANSTFAGNLNRLVSSLSSLKSQAYGFYNLSSGDSSGERAYAIGLCRREVKRDDCVSCIQTAARNLTKQCPLTKQAVVWYTHCMFRYSNRTIYGRKETNPTKAFIAGEEISANRDDFERLQRGLLDRLKGIAAAGGPNRKYAQGNGSASAGYRRFYGTVQCTPDLSEQDCNDCLVFGFENIPSCCDAEIGLRWFSPSCNFRFETWRFYEFDADLEPDPPAIQPADSPQSAARTERTGKGKGGSKVIIAIVIPILLVALLAICLCLVLKWRKNKSGYKNKVLGKSPLSGSIAEDEFSNTESLLVHFETLKTATDNFSSENELGRGGFGSVYKGVFPQGQEIAVKRLSGNSGQGDNEFKNEILLLAKLQHRNLVRLIGFCIQGEERLLVYEFIKNASLDQFIFDTEKRQLLDWVVRYKMIGGIARGLLYLHEDSRFRIIHRDLKASNILLDQEMNPKIADFGLAKLFDSGQTMTHRFTSRIAGTYGYMAPEYAMHGQFSVKTDVFSFGVLVIEIITGKRNNNGGSNGDEDAEDLLSWVWRSWREDTILSVIDPSLTAGSRNEILRCIHIGLLCVQESAATRPTMATVSLMLNSYSFTLPTPLRPAFVLESVVIPSNVSSSTEGLQMSSNDVTVSEFSPR

SEQ ID NO: 44784 - protein, 554 aa, Arabidopsis thaliana
  peptide (1)..(554): Ceres Seq. ID no. 12489346
  misc_feature (72)..(126): Pfam Name: Domain of unknown function DUF26 Pfam Description: Domain of unknown function DUF26
  misc_feature (204)..(554): Homolog of NCBI NO: 15236415 NR Description: putative protein; protein id: At4g23160.1
  misc_feature (1)..(554): Homolog of NCBI NO: 15234659 NR Description: receptor protein kinase - like protein; protein
  misc_feature (32)..(549): Homolog of NCBI NO: 18076587 NR Description: putative receptor-like serine-threonine protein
  misc_feature (1)..(549): Homolog of NCBI NO: 18076589 NR Description: putative receptor-like serine-threonine protein
  misc_feature (1)..(554): Homolog of NCBI NO: 18076583 NR Description: putative receptor-like serine-threonine protein
  misc_feature (1)..(549): Homolog of NCBI NO: 18076585 NR Description: putative receptor-like serine-threonine protein
  misc_feature (1)..(554): Homolog of NCBI NO: 15234824 NR Description: receptor-like protein kinase - like protein
  misc_feature (1)..(554): Homolog of NCBI NO: 4530126 NR Description: receptor-like protein kinase homolog RK20-1
  misc_feature (317)..(554): Homolog of NCBI NO: 15234434 NR Description: serine threonine protein kinase - like protein
  misc_feature (1)..(318): Homolog of NCBI NO: 15234434 NR Description: serine threonine protein kinase - like protein
MFRYSNRTIYGRKETNPTKAFIAGEEISANRDDFERLQRGLLDRLKGIAAAGGPNRKYAQGNGSASAGYRRFYGTVQCTPDLSEQDCNDCLVFGFENIPSCCDAEIGLRWFSPSCNFRFETWRFYEFDADLEPDPPAIQPADSPQSAARTERTGKGKGGSKVIIAIVIPILLVALLAICLCLVLKWRKNKSGYKNKVLGKSPLSGSIAEDEFSNTESLLVHFETLKTATDNFSSENELGRGGFGSVYKGVFPQGQEIAVKRLSGNSGQGDNEFKNEILLLAKLQHRNLVRLIGFCIQGEERLLVYEFIKNASLDQFIFDTEKRQLLDWVVRYKMIGGIARGLLYLHEDSRFRIIHRDLKASNILLDQEMNPKIADFGLAKLFDSGQTMTHRFTSRIAGTYGYMAPEYAMHGQFSVKTDVFSFGVLVIEIITGKRNNNGGSNGDEDAEDLLSWVWRSWREDTILSVIDPSLTAGSRNEILRCIHIGLLCVQESAATRPTMATVSLMLNSYSFTLPTPLRPAFVLESVVIPSNVSSSTEGLQMSSNDVTVSEFSPR

SEQ ID NO: 44785 - DNA, 1348 bp, Arabidopsis thaliana
  misc_feature (1)..(1348): Ceres Seq. ID no. 13502522
  misc_feature: MA Experiment ID: 20000169 Result: Down-regulated in Transcription
  misc_feature: MA Experiment 20000169 PARAMETER Experiment Name: At_100uM_ABA_P Parameter: Age (day) Value: 14
  misc_feature: MA Experiment 20000169 PARAMETER Experiment Name: At_100uM_ABA_P Parameter: Organism Value: A. thaliana
  misc_feature: MA Experiment 20000169 PARAMETER Experiment Name: At_100uM_ABA_P Parameter: Plant Line Value: WS
  misc_feature: MA Experiment 20000169 PARAMETER Experiment Name: At_100uM_ABA_P Parameter: Timepoint (hr) Value: 6
  misc_feature: MA Experiment 20000169 PARAMETER Experiment Name: At_100uM_ABA_P Parameter: Tissue Value: Aerial
  misc_feature: MA Experiment 20000169 PARAMETER Experiment Name: At_100uM_ABA_P Parameter: Treatment Value: 100uM ABA vs. No Treatment
  misc_feature: MA Experiment ID: 20000179 Result: Up-regulated in Transcription
  misc_feature: MA Experiment 20000179 PARAMETER Experiment Name: At_Germinating_Seeds_P Parameter: Age (hr) Value: 6 vs. 0
  misc_feature: MA Experiment 20000179 PARAMETER Experiment Name: At_Germinating_Seeds_P Parameter: Tissue Value: Germinating Seeds
  misc_feature: MA Experiment ID: 20000180 Result: Up-regulated in Transcription
  misc_feature: MA Experiment 20000180 PARAMETER Experiment Name: At_Germinating_Seeds_P Parameter: Age (hr) Value: 24 vs. 0
  misc_feature: MA Experiment 20000180 PARAMETER Experiment Name: At_Germinating_Seeds_P Parameter: Tissue Value: Germinating Seeds
  misc_feature: MA Experiment ID: 20000182 Result: Up-regulated in Transcription
  misc_feature: MA Experiment 20000182 PARAMETER Experiment Name: At_2mM_SA_P Parameter: Age (day) Value: 14
  misc_feature: MA Experiment 20000182 PARAMETER Experiment Name: At_2mM_SA_P Parameter: Organism Value: A. thaliana
  misc_feature: MA Experiment 20000182 PARAMETER Experiment Name: At_2mM_SA_P Parameter: Plant Line Value: WS
  misc_feature: MA Experiment 20000182 PARAMETER Experiment Name: At_2mM_SA_P Parameter: Timepoint (hr) Value: 6
  misc_feature: MA Experiment 20000182 PARAMETER Experiment Name: At_2mM_SA_P Parameter: Tissue Value: Aerial
  misc_feature: MA Experiment 20000182 PARAMETER Experiment Name: At_2mM_SA_P Parameter: Treatment Value: 2mM SA vs. No Treatment
  misc_feature: MA Experiment ID: 20000184 Result: Up-regulated in Transcription
  misc_feature: MA Experiment 20000184 PARAMETER Experiment Name: At_Shoots__P Parameter: Age (day) Value: 7
  misc_feature: MA Experiment 20000184 PARAMETER Experiment Name: At_Shoots__P Parameter: Tissue Value: Shoots vs. Whole Plant
  misc_feature: MA Experiment ID: 20000213 Result: Up-regulated in Transcription
  misc_feature: MA Experiment 20000213 PARAMETER Experiment Name: At_4deg_Cold_P Parameter: Timepoint (hr) Value: 2
  misc_feature: MA Experiment ID: 20000438 Result: Up-regulated in Transcription
  misc_feature: MA Experiment 20000438 PARAMETER Experiment Name: At_Shoots__P Parameter: Age (day) Value: 14
  misc_feature: MA Experiment 20000438 PARAMETER Experiment Name: At_Shoots__P Parameter: Tissue Value: Shoots vs. Whole Plant
  misc_feature: MA Experiment ID: 20000439 Result: Up-regulated in Transcription
  misc_feature: MA Experiment 20000439 PARAMETER Experiment Name: At_Roots__P Parameter: Age (day) Value: 14 vs. 21
  misc_feature: MA Experiment 20000439 PARAMETER Experiment Name: At_Roots__P Parameter: Organism Value: A. thaliana
  misc_feature: MA Experiment 20000439 PARAMETER Experiment Name: At_Roots__P Parameter: Tissue Value: Roots vs. Whole Plant
  misc_feature: MA Experiment ID: 20001247 Result: Up-regulated in Transcription
  misc_feature: MA Experiment 20001247 PARAMETER Experiment Name: At_Far-red-induction_P Parameter: Age (day) Value: 7
  misc_feature: MA Experiment 20001247 PARAMETER Experiment Name: At_Far-red-induction_P Parameter: Light Value: Far-red vs. White
  misc_feature: MA Experiment 20001247 PARAMETER Experiment Name: At_Far-red-induction_P Parameter: Organism Value: A. thaliana
  misc_feature: MA Experiment 20001247 PARAMETER Experiment Name: At_Far-red-induction_P Parameter: Plant Line Value: Columbia
  misc_feature: MA Experiment 20001247 PARAMETER Experiment Name: At_Far-red-induction_P Parameter: Timepoint (hr) Value: 1
  misc_feature: MA Experiment 20001247 PARAMETER Experiment Name: At_Far-red-induction_P Parameter: Tissue Value: Whole Plant
  misc_feature: MA Experiment ID: 20001248 Result: Down-regulated in Transcription
  misc_feature: MA Experiment 20001248 PARAMETER Experiment Name: At_Far-red-induction_P Parameter: Age (day) Value: 7
  misc_feature: MA Experiment 20001248 PARAMETER Experiment Name: At_Far-red-induction_P Parameter: Light Value: Far-red vs. White
  misc_feature: MA Experiment 20001248 PARAMETER Experiment Name: At_Far-red-induction_P Parameter: Organism Value: A. thaliana
  misc_feature: MA Experiment 20001248 PARAMETER Experiment Name: At_Far-red-induction_P Parameter: Plant Line Value: Columbia
  misc_feature: MA Experiment 20001248 PARAMETER Experiment Name: At_Far-red-induction_P Parameter: Timepoint (hr) Value: 4
  misc_feature: MA Experiment 20001248 PARAMETER Experiment Name: At_Far-red-induction_P Parameter: Tissue Value: Whole Plant
  misc_feature: MA Experiment ID: 20001451 Result: Up-regulated in Transcription
  misc_feature: MA Experiment 20001451 PARAMETER Experiment Name: At_Far-red-induction_P Parameter: Age (day) Value: 7
  misc_feature: MA Experiment 20001451 PARAMETER Experiment Name: At_Far-red-induction_P Parameter: Light Value: Far-red vs. White
  misc_feature: MA Experiment 20001451 PARAMETER Experiment Name: At_Far-red-induction_P Parameter: Organism Value: A. thaliana
  misc_feature: MA Experiment 20001451 PARAMETER Experiment Name: At_Far-red-induction_P Parameter: Plant Line Value: Columbia
  misc_feature: MA Experiment 20001451 PARAMETER Experiment Name: At_Far-red-induction_P Parameter: Timepoint (hr) Value: 24
  misc_feature: MA Experiment 20001451 PARAMETER Experiment Name: At_Far-red-induction_P Parameter: Tissue Value: Whole Plant
  misc_feature: MA Experiment ID: 20001558 Result: Up-regulated in Transcription
  misc_feature: MA Experiment 20001558 PARAMETER Experiment Name: At_Drought_Soil_Dry_P Parameter: Age (day) Value: 27
  misc_feature: MA Experiment 20001558 PARAMETER Experiment Name: At_Drought_Soil_Dry_P Parameter: Organism Value: A. thaliana
  misc_feature: MA Experiment 20001558 PARAMETER Experiment Name: At_Drought_Soil_Dry_P Parameter: Plant Line Value: WS
  misc_feature: MA Experiment 20001558 PARAMETER Experiment Name: At_Drought_Soil_Dry_P Parameter: Post Timepoint (hr) Value: 6
  misc_feature: MA Experiment 20001558 PARAMETER Experiment Name: At_Drought_Soil_Dry_P Parameter: Post-Treatment Value: Re-Water vs. No Drought
  misc_feature: MA Experiment 20001558 PARAMETER Experiment Name: At_Drought_Soil_Dry_P Parameter: Timepoint (day) Value: 13
  misc_feature: MA Experiment 20001558 PARAMETER Experiment Name: At_Drought_Soil_Dry_P Parameter: Treatment Value: Drought vs. No Drought
gttttcgattggtccgaaaccccagaagcaacagtcattactctgttttcatatgaacactcttcatcctcacaagcagcaacaagaacaagcacaacaacaagaagaagctagatacgaatgggatctttctctctccaccgtcgtatcttcctcctcctcctccgcctccgacgttatcggagctattgaattcgatcccactgataacatcgtcgctaccgccgggatttcaagaaagattcgtttttacggcctcccttctcttttacgtaacaacgctgtctccggtaccggagtttccttcgtcgatcaagccaccgcctgcgaatattacatctgtactccggcgaaacttagtagtctccggtggagacccgggtcgggcggtcgggttattgggtcgggagattacgacggcgtagtgatggagtacgatcttgagaagaggacgccggtattcgaaagggacgagcacggtggtcgtcgtgtatggagcgtagattacactcgtcacggcggcgcttcgacggtgggcgcgtcgggatcggatgacgggactatgcaagtatgggatccgaggtgtccgccggaagaatctgtcggtgttgtacgaccggcggggatttgccggagtgctgtttgttgcgtcgagttcgatccttccggtggaccagccgtggccgtcggatgcgctgatcggaaagggtacgtttacgatataaggaaactcgttgacccggcgttgactttacaaggtcatacgaaaacggtgtcgtatgtgaggttcctcgacggtgggacggtggtgacggcaggtacggacggttgtttgaagctgtggagcgtggaggatgggcgcgtgattcgcacgtacgaagggcatgtgaataatcggaacttcgtggggttatctgtgtggagaaacggcgcgttgtttggttgtggatcggaaaacaacagggtgtttgtgtacgataggagatgggggaagccggtttgggtagatgggtttgaaccagttggtatgaattctggttcggataagcggttcgtgagtagcgtctgttggaggcaatcaggtgtggaccagtgtaccctagtggctggaggatctgatggagtattacaggtttacgtgggcaaaagaaaaccatagtgttcttcttaatttatcattactatattttatgaattatgatgatgatgatgatgatgatgatgcttcttaatttcttttctttttttcaaatttaatttcctatttgagatgatttttgattgagttgtgagagcatacgatctgtttgtttttttttttaatttataaaggattttttacttgttc

SEQ ID NO: 44786 - protein, 385 aa, Arabidopsis thaliana
  peptide (1)..(385): Ceres Seq. ID no. 13502523
  misc_feature (115)..(380): Homolog of NCBI NO: 15225760 NR Description: COP1 regulatory protein [Arabidopsis thaliana]
  misc_feature (23)..(380): Homolog of NCBI NO: 3121867 NR Description: COP1 regulatory protein (Constitutive
  misc_feature (24)..(380): Homolog of NCBI NO: 11127996 NR Description: COP1 [Ipomoea nil]
  misc_feature (55)..(378): Homolog of NCBI NO: 34910754 NR Description: P0042A10.6 [Oryza sativa (japonica
  misc_feature (23)..(380): Homolog of NCBI NO: 7688063 NR Description: constitutively photomorphogenic 1 protein [Pisum
  misc_feature (70)..(380): Homolog of NCBI NO: 4090943 NR Description: COP1 homolog [Lycopersicon esculentum]
  misc_feature (38)..(383): Homolog of NCBI NO: 21592812 NR Description: contains similarity to photomorphogenesis
  misc_feature (38)..(383): Homolog of NCBI NO: 15242945 NR Description: transducin / WD-40 repeat protein family
  misc_feature (143)..(385): Homolog of NCBI NO: 18420709 NR Description: transducin / WD-40 repeat protein family
  misc_feature (18)..(385): Homolog of NCBI NO: 10176840 NR Description: contains similarity to photomorphogenesis
FSIGPKPQKQQSLLCFHMNTLHPHKQQQEQAQQQEEARYEWDLSLSTVVSSSSSSASDVIGAIEFDPTDNIVATAGISRKIRFYGLPSLLRNNAVSGTGVSFVDQATACEYYICTPAKLSSLRWRPGSGGRVIGSGDYDGVVMEYDLEKRTPVFERDEHGGRRVWSVDYTRHGGASTVGASGSDDGTMQVWDPRCPPEESVGVVRPAGICRSAVCCVEFDPSGGPAVAVGCADRKGYVYDIRKLVDPALTLQGHTKTVSYVRFLDGGTVVTAGTDGCLKLWSVEDGRVIRTYEGHVNNRNFVGLSVWRNGALFGCGSENNRVFVYDRRWGKPVWVDGFEPVGMNSGSDKRFVSSVCWRQSGVDQCTLVAGGSDGVLQVYVGKRKP

SEQ ID NO: 44787 - protein, 368 aa, Arabidopsis thaliana
  peptide (1)..(368): Ceres Seq. ID no. 13502524
  misc_feature (98)..(363): Homolog of NCBI NO: 15225760 NR Description: COP1 regulatory protein [Arabidopsis thaliana]
  misc_feature (6)..(363): Homolog of NCBI NO: 3121867 NR Description: COP1 regulatory protein (Constitutive
  misc_feature (7)..(363): Homolog of NCBI NO: 11127996 NR Description: COP1 [Ipomoea nil]
  misc_feature (38)..(361): Homolog of NCBI NO: 34910754 NR Description: P0042A10.6 [Oryza sativa (japonica
  misc_feature (6)..(363): Homolog of NCBI NO: 7688063 NR Description: constitutively photomorphogenic 1 protein [Pisum
  misc_feature (53)..(363): Homolog of NCBI NO: 4090943 NR Description: COP1 homolog [Lycopersicon esculentum]
  misc_feature (21)..(366): Homolog of NCBI NO: 21592812 NR Description: contains similarity to photomorphogenesis
  misc_feature (21)..(366): Homolog of NCBI NO: 15242945 NR Description: transducin / WD-40 repeat protein family
  misc_feature (126)..(368): Homolog of NCBI NO: 18420709 NR Description: transducin / WD-40 repeat protein family
  misc_feature (1)..(368): Homolog of NCBI NO: 10176840 NR Description: contains similarity to photomorphogenesis
MNTLHPHKQQQEQAQQQEEARYEWDLSLSTVVSSSSSSASDVIGAIEFDPTDNIVATAGISRKIRFYGLPSLLRNNAVSGTGVSFVDQATACEYYICTPAKLSSLRWRPGSGGRVIGSGDYDGVVMEYDLEKRTPVFERDEHGGRRVWSVDYTRHGGASTVGASGSDDGTMQVWDPRCPPEESVGVVRPAGICRSAVCCVEFDPSGGPAVAVGCADRKGYVYDIRKLVDPALTLQGHTKTVSYVRFLDGGTVVTAGTDGCLKLWSVEDGRVIRTYEGHVNNRNFVGLSVWRNGALFGCGSENNRVFVYDRRWGKPVWVDGFEPVGMNSGSDKRFVSSVCWRQSGVDQCTLVAGGSDGVLQVYVGKRKP

SEQ ID NO: 44788 - protein, 243 aa, Arabidopsis thaliana
  peptide (1)..(243): Ceres Seq. ID no. 13502525
  misc_feature (1)..(238): Homolog of NCBI NO: 15225760 NR Description: COP1 regulatory protein [Arabidopsis thaliana]
  misc_feature (1)..(238): Homolog of NCBI NO: 3121867 NR Description: COP1 regulatory protein (Constitutive
  misc_feature (1)..(238): Homolog of NCBI NO: 11127996 NR Description: COP1 [Ipomoea nil]
  misc_feature (1)..(236): Homolog of NCBI NO: 34910754 NR Description: P0042A10.6 [Oryza sativa (japonica
  misc_feature (1)..(238): Homolog of NCBI NO: 7688063 NR Description: constitutively photomorphogenic 1 protein [Pisum
  misc_feature (1)..(238): Homolog of NCBI NO: 4090943 NR Description: COP1 homolog [Lycopersicon esculentum]
  misc_feature (1)..(241): Homolog of NCBI NO: 21592812 NR Description: contains similarity to photomorphogenesis
  misc_feature (1)..(241): Homolog of NCBI NO: 15242945 NR Description: transducin / WD-40 repeat protein family
  misc_feature (1)..(243): Homolog of NCBI NO: 18420709 NR Description: transducin / WD-40 repeat protein family
  misc_feature (1)..(243): Homolog of NCBI NO: 10176840 NR Description: contains similarity to photomorphogenesis
MEYDLEKRTPVFERDEHGGRRVWSVDYTRHGGASTVGASGSDDGTMQVWDPRCPPEESVGVVRPAGICRSAVCCVEFDPSGGPAVAVGCADRKGYVYDIRKLVDPALTLQGHTKTVSYVRFLDGGTVVTAGTDGCLKLWSVEDGRVIRTYEGHVNNRNFVGLSVWRNGALFGCGSENNRVFVYDRRWGKPVWVDGFEPVGMNSGSDKRFVSSVCWRQSGVDQCTLVAGGSDGVLQVYVGKRKP

SEQ ID NO: 44789 - DNA, 1694 bp, Arabidopsis thaliana
  misc_feature (1)..(1694): Ceres Seq. ID no. 12455338
  misc_feature: MA Experiment ID: 20000171 Result: Down-regulated in Transcription
  misc_feature: MA Experiment 20000171 PARAMETER Experiment Name: At_42deg_Heat_P Parameter: Age (day) Value: 14
  misc_feature: MA Experiment 20000171 PARAMETER Experiment Name: At_42deg_Heat_P Parameter: Organism Value: A. thaliana
  misc_feature: MA Experiment 20000171 PARAMETER Experiment Name: At_42deg_Heat_P Parameter: Plant Line Value: WS
  misc_feature: MA Experiment 20000171 PARAMETER Experiment Name: At_42deg_Heat_P Parameter: Temperature (deg C) Value: 42 vs. 22
  misc_feature: MA Experiment 20000171 PARAMETER Experiment Name: At_42deg_Heat_P Parameter: Timepoint (hr) Value: 1
  misc_feature: MA Experiment 20000171 PARAMETER Experiment Name: At_42deg_Heat_P Parameter: Tissue Value: Aerial
  misc_feature: MA Experiment ID: 20000234 Result: Up-regulated in Transcription
  misc_feature: MA Experiment 20000234 PARAMETER Experiment Name: At_Siliques_P Parameter: Age (day) Value: 21
  misc_feature: MA Experiment 20000234 PARAMETER Experiment Name: At_Siliques_P Parameter: Organism Value: A. thaliana
  misc_feature: MA Experiment 20000234 PARAMETER Experiment Name: At_Siliques_P Parameter: Plant Line Value: WS
  misc_feature: MA Experiment 20000234 PARAMETER Experiment Name: At_Siliques_P Parameter: Tissue Value: Less Than 5mm Siliques vs. Whole Plant
  misc_feature: MA Experiment ID: 20000235 Result: Up-regulated in Transcription
  misc_feature: MA Experiment 20000235 PARAMETER Experiment Name: At_Siliques_P Parameter: Age (day) Value: 21
  misc_feature: MA Experiment 20000235 PARAMETER Experiment Name: At_Siliques_P Parameter: Organism Value: A. thaliana
  misc_feature: MA Experiment 20000235 PARAMETER Experiment Name: At_Siliques_P Parameter: Plant Line Value: WS
  misc_feature: MA Experiment 20000235 PARAMETER Experiment Name: At_Siliques_P Parameter: Tissue Value: 5-10mm Siliques vs. Whole Plant
  misc_feature: MA Experiment ID: 20000794 Result: Down-regulated in Transcription
  misc_feature: MA Experiment 20000794 PARAMETER Experiment Name: At_Petals_P Parameter: Age (day) Value: 23-25 days
  misc_feature: MA Experiment 20000794 PARAMETER Experiment Name: At_Petals_P Parameter: Plant Line Value: WS
  misc_feature: MA Experiment 20000794 PARAMETER Experiment Name: At_Petals_P Parameter: Tissue Value: Petals vs. Whole plant
  misc_feature: MA Experiment ID: 20001247 Result: Up-regulated in Transcription
  misc_feature: MA Experiment 20001247 PARAMETER Experiment Name: At_Far-red-induction_P Parameter: Age (day) Value: 7
  misc_feature: MA Experiment 20001247 PARAMETER Experiment Name: At_Far-red-induction_P Parameter: Light Value: Far-red vs. White
  misc_feature: MA Experiment 20001247 PARAMETER Experiment Name: At_Far-red-induction_P Parameter: Organism Value: A. thaliana
  misc_feature: MA Experiment 20001247 PARAMETER Experiment Name: At_Far-red-induction_P Parameter: Plant Line Value: Columbia
  misc_feature: MA Experiment 20001247 PARAMETER Experiment Name: At_Far-red-induction_P Parameter: Timepoint (hr) Value: 1
  misc_feature: MA Experiment 20001247 PARAMETER Experiment Name: At_Far-red-induction_P Parameter: Tissue Value: Whole Plant
  misc_feature: MA Experiment ID: 20001451 Result: Up-regulated in Transcription
  misc_feature: MA Experiment 20001451 PARAMETER Experiment Name: At_Far-red-induction_P Parameter: Age (day) Value: 7
  misc_feature: MA Experiment 20001451 PARAMETER Experiment Name: At_Far-red-induction_P Parameter: Light Value: Far-red vs. White
  misc_feature: MA Experiment 20001451 PARAMETER Experiment Name: At_Far-red-induction_P Parameter: Organism Value: A. thaliana
  misc_feature: MA Experiment 20001451 PARAMETER Experiment Name: At_Far-red-induction_P Parameter: Plant Line Value: Columbia
  misc_feature: MA Experiment 20001451 PARAMETER Experiment Name: At_Far-red-induction_P Parameter: Timepoint (hr) Value: 24
  misc_feature: MA Experiment 20001451 PARAMETER Experiment Name: At_Far-red-induction_P Parameter: Tissue Value: Whole Plant
  misc_feature: MA Experiment ID: 20001560 Result: Up-regulated in Transcription
  misc_feature: MA Experiment 20001560 PARAMETER Experiment Name: At_Drought_Soil_Dry_P Parameter: Age (day) Value: 28
  misc_feature: MA Experiment 20001560 PARAMETER Experiment Name: At_Drought_Soil_Dry_P Parameter: Organism Value: A. thaliana
  misc_feature: MA Experiment 20001560 PARAMETER Experiment Name: At_Drought_Soil_Dry_P Parameter: Plant Line Value: WS
  misc_feature: MA Experiment 20001560 PARAMETER Experiment Name: At_Drought_Soil_Dry_P Parameter: Post Timepoint (hr) Value: None
  misc_feature: MA Experiment 20001560 PARAMETER Experiment Name: At_Drought_Soil_Dry_P Parameter: Post-Treatment Value: None
  misc_feature: MA Experiment 20001560 PARAMETER Experiment Name: At_Drought_Soil_Dry_P Parameter: Timepoint (day) Value: 14
  misc_feature: MA Experiment 20001560 PARAMETER Experiment Name: At_Drought_Soil_Dry_P Parameter: Treatment Value: Drought vs. No Drought
  misc_feature: MA Experiment ID: 20001911 Result: Down-regulated in Transcription
  misc_feature: MA Experiment 20001911 PARAMETER Experiment Name: At_Drought_Reproduction_P Parameter: Age (day) Value: 40
  misc_feature: MA Experiment 20001911 PARAMETER Experiment Name: At_Drought_Reproduction_P Parameter: Organism Value: A. thaliana
  misc_feature: MA Experiment 20001911 PARAMETER Experiment Name: At_Drought_Reproduction_P Parameter: Plant Line Value: WS
  misc_feature: MA Experiment 20001911 PARAMETER Experiment Name: At_Drought_Reproduction_P Parameter: Timepoint (day) Value: 10
  misc_feature: MA Experiment 20001911 PARAMETER Experiment Name: At_Drought_Reproduction_P Parameter: Tissue Value: Flowers
  misc_feature: MA Experiment 20001911 PARAMETER Experiment Name: At_Drought_Reproduction_P Parameter: Treatment Value: Drought vs. No Drought
attgtgccgacacttctttcccctctctctctctctctccaccgccatggattcctcctatggcgccacaaagttccttctcctcctcttcctcaccacctccattgcgaccgcattacccgataacaaaccagtaccgggtcaaataaactcaaactcagtcctcgtagctctcctggactctcactacacagagctagcagaactagtcgaaaaagctctccttctccagaccctcgaagaagcagttggtaaacacaacatcacaatcttcgcaccacgcaacgatgccttggaacgaaacttagacccactcttcaaatctttcttgctcgaaccaagaaacctcaaatctttacaatctttattaatgttccacattcttcctaaacgaatcacttctcctcaatggccttctctttctcatcaccaccgtactctctccaacgaccatctccacctcaccgtcgacgtcaacactcttaaagtagattccgctgagattatccgacccgatgacgtcattagacccgatggtatcattcacggcatcgaacgtcttctcatccctcgctctgttcaagaagattttaaccgccgtcgtagtctccgttcaatctccgccgttataccagaaggagctcctgaggttgaccctagaactcaccgtctcaagaaaccatctcccgccgttcccgccggagctcctccggttcttccaatctacgacgctatgtcaccaggtccttccctagctcctgctccagctcccggacccggtggtccacgtggccatttcaacggcgatgctcaagttaaagatttcatccacactctcttgcattacggtggctacaacgagatggctgatatactcgtcaacttaacctctttagccactgagatgggtcgactcgtgtcagaaggctacgttttaaccgttcttgctcctaacgacgaagccatggctaagctcacaacggaccagcttagcgagccaggtgctcctgaacaaattatgtattaccacatcataccggagtatcaaacagaggagagtatgtacaacgctgttcggagattcggaaaagtgaagtatgattcattgagattcccacataaagtgttggctcaagaagctgatggatctgtcaaattcggacacggtgatggttcagcttacttgtttgatcctgatatctacacggacggtcggatttcagttcagggtattgatggagtcttgttcccgaaggaggaaacgccggcgacggagattaaaccagctgctccggtcgttaagaaagtttctaaatcaagaagaggtaaattgatggaggtagcttgtagaatgatggggtcacggtttattccgtgtcagtgatttcacacgttatcaaaaaaaaattccaagcttccaaattcttaattctgtaaacatgtggaaaaaaaaaagaaagagttgaatatgtaaatgatgtgatttttgggttcgttgttatttgcatgttctatttgtaatttttttattatcataaatatatatatatatatacgtagattttgattaagtttgttatttgggggtgagtaaaaaagttctaggagtttagagaaatcaaatatgtaatacaagttatacaatctgtatggaaataataaaggaaggatccatttgtgtgcctattctattc

SEQ ID NO: 44790 - protein, 460 aa, Arabidopsis thaliana
  peptide (1)..(460): Ceres Seq. ID no. 12455339
  misc_feature (50)..(190): Pfam Name: Fasciclin domain Pfam Description: Fasciclin domain
  misc_feature (50)..(190): Pfam Name: Fasciclin domain Pfam Description: Fasciclin domain
  misc_feature (45)..(438): Homolog of NCBI NO: 27819499 NR Description: putative arabinogalactan-protein
  misc_feature (124)..(442): Homolog of NCBI NO: 7486009 NR Description: hypothetical protein F22O6.250 - Arabidopsis
  misc_feature (49)..(421): Homolog of NCBI NO: 34899886 NR Description: OJ1714_H10.26 [Oryza sativa (japonica
  misc_feature (49)..(453): Homolog of NCBI NO: 33146739 NR Description: GPI-anchored protein -like
  misc_feature (25)..(442): Homolog of NCBI NO: 6041822 NR Description: unknown protein [Arabidopsis thaliana]
  misc_feature (45)..(438): Homolog of NCBI NO: 27819499 NR Description: putative arabinogalactan-protein
  misc_feature (49)..(421): Homolog of NCBI NO: 34899886 NR Description: OJ1714_H10.26 [Oryza sativa (japonica
  misc_feature (25)..(442): Homolog of NCBI NO: 6041822 NR Description: unknown protein [Arabidopsis thaliana]
  misc_feature (16)..(460): Homolog of NCBI NO: 30686588 NR Description: expressed protein [Arabidopsis thaliana]
  misc_feature (16)..(443): Homolog of NCBI NO: 25370583 NR Description: hypothetical protein At2g35860 [imported] -
  misc_feature (23)..(460): Homolog of NCBI NO: 15231197 NR Description: unknown protein; protein id: At3g52370.1
  misc_feature (25)..(454): Homolog of NCBI NO: 18399319 NR Description: expressed protein
  misc_feature (25)..(445): Homolog of NCBI NO: 15240029 NR Description: putative protein; protein id: At5g06390.1
  misc_feature (49)..(453): Homolog of NCBI NO: 33146739 NR Description: GPI-anchored protein -like
  misc_feature (124)..(442): Homolog of NCBI NO: 7486009 NR Description: hypothetical protein F22O6.250 - Arabidopsis
  misc_feature (25)..(445): Homolog of NCBI NO: 15240029 NR Description: putative protein; protein id: At5g06390.1
  misc_feature (25)..(454): Homolog of NCBI NO: 18399319 NR Description: expressed protein
  misc_feature (23)..(460): Homolog of NCBI NO: 15231197 NR Description: unknown protein; protein id: At3g52370.1
  misc_feature (16)..(443): Homolog of NCBI NO: 25370583 NR Description: hypothetical protein At2g35860 [imported] -
  misc_feature (16)..(460): Homolog of NCBI NO: 30686588 NR Description: expressed protein [Arabidopsis thaliana]
LCRHFFPLSLSLSTAMDSSYGATKFLLLLFLTTSIATALPDNKPVPGQINSNSVLVALLDSHYTELAELVEKALLLQTLEEAVGKHNITIFAPRNDALERNLDPLFKSFLLEPRNLKSLQSLLMFHILPKRITSPQWPSLSHHHRTLSNDHLHLTVDVNTLKVDSAEIIRPDDVIRPDGIIHGIERLLIPRSVQEDFNRRRSLRSISAVIPEGAPEVDPRTHRLKKPSPAVPAGAPPVLPIYDAMSPGPSLAPAPAPGPGGPRGHFNGDAQVKDFIHTLLHYGGYNEMADILVNLTSLATEMGRLVSEGYVLTVLAPNDEAMAKLTTDQLSEPGAPEQIMYYHIIPEYQTEESMYNAVRRFGKVKYDSLRFPHKVLAQEADGSVKFGHGDGSAYLFDPDIYTDGRISVQGIDGVLFPKEETPATEIKPAAPVVKKVSKSRRGKLMEVACRMMGSRFIPCQ

SEQ ID NO: 44791 - protein, 445 aa, Arabidopsis thaliana
  peptide (1)..(445): Ceres Seq. ID no. 12455340
  misc_feature (35)..(175): Pfam Name: Fasciclin domain Pfam Description: Fasciclin domain
  misc_feature (35)..(175): Pfam Name: Fasciclin domain Pfam Description: Fasciclin domain
  misc_feature (30)..(423): Homolog of NCBI NO: 27819499 NR Description: putative arabinogalactan-protein
  misc_feature (109)..(427): Homolog of NCBI NO: 7486009 NR Description: hypothetical protein F22O6.250 - Arabidopsis
  misc_feature (34)..(406): Homolog of NCBI NO: 34899886 NR Description: OJ1714_H10.26 [Oryza sativa (japonica
  misc_feature (34)..(438): Homolog of NCBI NO: 33146739 NR Description: GPI-anchored protein -like
  misc_feature (10)..(427): Homolog of NCBI NO: 6041822 NR Description: unknown protein [Arabidopsis thaliana]
  misc_feature (30)..(423): Homolog of NCBI NO: 27819499 NR Description: putative arabinogalactan-protein
  misc_feature (34)..(406): Homolog of NCBI NO: 34899886 NR Description: OJ1714_H10.26 [Oryza sativa (japonica
  misc_feature (10)..(427): Homolog of NCBI NO: 6041822 NR Description: unknown protein [Arabidopsis thaliana]
  misc_feature (1)..(445): Homolog of NCBI NO: 30686588 NR Description: expressed protein [Arabidopsis thaliana]
  misc_feature (1)..(428): Homolog of NCBI NO: 25370583 NR Description: hypothetical protein At2g35860 [imported] -
  misc_feature (8)..(445): Homolog of NCBI NO: 15231197 NR Description: unknown protein; protein id: At3g52370.1
  misc_feature (10)..(439): Homolog of NCBI NO: 18399319 NR Description: expressed protein
  misc_feature (10)..(430): Homolog of NCBI NO: 15240029 NR Description: putative protein; protein id: At5g06390.1
  misc_feature (34)..(438): Homolog of NCBI NO: 33146739 NR Description: GPI-anchored protein -like
  misc_feature (109)..(427): Homolog of NCBI NO: 7486009 NR Description: hypothetical protein F22O6.250 - Arabidopsis
  misc_feature (10)..(430): Homolog of NCBI NO: 15240029 NR Description: putative protein; protein id: At5g06390.1
  misc_feature (10)..(439): Homolog of NCBI NO: 18399319 NR Description: expressed protein
  misc_feature (8)..(445): Homolog of NCBI NO: 15231197 NR Description: unknown protein; protein id: At3g52370.1
  misc_feature (1)..(428): Homolog of NCBI NO: 25370583 NR Description: hypothetical protein At2g35860 [imported] -
  misc_feature (1)..(445): Homolog of NCBI NO: 30686588 NR Description: expressed protein [Arabidopsis thaliana]
MDSSYGATKFLLLLFLTTSIATALPDNKPVPGQINSNSVLVALLDSHYTELAELVEKALLLQTLEEAVGKHNITIFAPRNDALERNLDPLFKSFLLEPRNLKSLQSLLMFHILPKRITSPQWPSLSHHHRTLSNDHLHLTVDVNTLKVDSAEIIRPDDVIRPDGIIHGIERLLIPRSVQEDFNRRRSLRSISAVIPEGAPEVDPRTHRLKKPSPAVPAGAPPVLPIYDAMSPGPSLAPAPAPGPGGPRGHFNGDAQVKDFIHTLLHYGGYNEMADILVNLTSLATEMGRLVSEGYVLTVLAPNDEAMAKLTTDQLSEPGAPEQIMYYHIIPEYQTEESMYNAVRRFGKVKYDSLRFPHKVLAQEADGSVKFGHGDGSAYLFDPDIYTDGRISVQGIDGVLFPKEETPATEIKPAAPVVKKVSKSRRGKLMEVACRMMGSRFIPCQ

SEQ ID NO: 44792 - protein, 337 aa, Arabidopsis thaliana
  peptide (1)..(337): Ceres Seq. ID no. 12455341
  misc_feature (1)..(67): Pfam Name: Fasciclin domain Pfam Description: Fasciclin domain
  misc_feature (1)..(67): Pfam Name: Fasciclin domain Pfam Description: Fasciclin domain
  misc_feature (1)..(315): Homolog of NCBI NO: 27819499 NR Description: putative arabinogalactan-protein
  misc_feature (1)..(319): Homolog of NCBI NO: 7486009 NR Description: hypothetical protein F22O6.250 - Arabidopsis
  misc_feature (1)..(298): Homolog of NCBI NO: 34899886 NR Description: OJ1714_H10.26 [Oryza sativa (japonica
  misc_feature (1)..(330): Homolog of NCBI NO: 33146739 NR Description: GPI-anchored protein -like
  misc_feature (1)..(319): Homolog of NCBI NO: 6041822 NR Description: unknown protein [Arabidopsis thaliana]
  misc_feature (1)..(315): Homolog of NCBI NO: 27819499 NR Description: putative arabinogalactan-protein
  misc_feature (1)..(298): Homolog of NCBI NO: 34899886 NR Description: OJ1714_H10.26 [Oryza sativa (japonica
  misc_feature (1)..(319): Homolog of NCBI NO: 6041822 NR Description: unknown protein [Arabidopsis thaliana]
  misc_feature (1)..(337): Homolog of NCBI NO: 30686588 NR Description: expressed protein [Arabidopsis thaliana]
  misc_feature (1)..(320): Homolog of NCBI NO: 25370583 NR Description: hypothetical protein At2g35860 [imported] -
  misc_feature (1)..(337): Homolog of NCBI NO: 15231197 NR Description: unknown protein; protein id: At3g52370.1
  misc_feature (1)..(331): Homolog of NCBI NO: 18399319 NR Description: expressed protein
  misc_feature (1)..(322): Homolog of NCBI NO: 15240029 NR Description: putative protein; protein id: At5g06390.1
  misc_feature (1)..(330): Homolog of NCBI NO: 33146739 NR Description: GPI-anchored protein -like
  misc_feature (1)..(319): Homolog of NCBI NO: 7486009 NR Description: hypothetical protein F22O6.250 - Arabidopsis
  misc_feature (1)..(322): Homolog of NCBI NO: 15240029 NR Description: putative protein; protein id: At5g06390.1
  misc_feature (1)..(331): Homolog of NCBI NO: 18399319 NR Description: expressed protein
  misc_feature (1)..(337): Homolog of NCBI NO: 15231197 NR Description: unknown protein; protein id: At3g52370.1
  misc_feature (1)..(320): Homolog of NCBI NO: 25370583 NR Description: hypothetical protein At2g35860 [imported] -
  misc_feature (1)..(337): Homolog of NCBI NO: 30686588 NR Description: expressed protein [Arabidopsis thaliana]
MFHILPKRITSPQWPSLSHHHRTLSNDHLHLTVDVNTLKVDSAEIIRPDDVIRPDGIIHGIERLLIPRSVQEDFNRRRSLRSISAVIPEGAPEVDPRTHRLKKPSPAVPAGAPPVLPIYDAMSPGPSLAPAPAPGPGGPRGHFNGDAQVKDFIHTLLHYGGYNEMADILVNLTSLATEMGRLVSEGYVLTVLAPNDEAMAKLTTDQLSEPGAPEQIMYYHIIPEYQTEESMYNAVRRFGKVKYDSLRFPHKVLAQEADGSVKFGHGDGSAYLFDPDIYTDGRISVQGIDGVLFPKEETPATEIKPAAPVVKKVSKSRRGKLMEVACRMMGSRFIPCQ

SEQ ID NO: 44793 - DNA, 2322 bp, Arabidopsis thaliana
  misc_feature (1)..(2322): Ceres Seq. ID no. 12489113
  misc_feature: MA Experiment ID: 108473 Result: Down-regulated in Transcription
  misc_feature: MA Experiment 108473 PARAMETER Experiment Name: At_Drought_Flowers_cDNA_P Parameter: Timepoint (hr) Value: 7 d
  misc_feature: MA Experiment 108473 PARAMETER Experiment Name: At_Drought_Flowers_cDNA_P Parameter: Tissue Value: Flower
  misc_feature: MA Experiment 108473 PARAMETER Experiment Name: At_Drought_Flowers_cDNA_P Parameter: Treatment Value: Drought vs. No Drought
  misc_feature: MA Experiment ID: 108572 Result: Up-regulated in Transcription
  misc_feature: MA Experiment 108572 PARAMETER Experiment Name: At_Drought_cDNA_P Parameter: Timepoint (hr) Value: 1
  misc_feature: MA Experiment 108572 PARAMETER Experiment Name: At_Drought_cDNA_P Parameter: Tissue Value: Aerial
  misc_feature: MA Experiment 108572 PARAMETER Experiment Name: At_Drought_cDNA_P Parameter: Treatment Value: Drought vs. No Drought
  misc_feature: MA Experiment ID: 108576 Result: Down-regulated in Transcription
  misc_feature: MA Experiment 108576 PARAMETER Experiment Name: At_42deg_Heat_cDNA_P Parameter: Temperature (deg C) Value: 42 vs. 22
  misc_feature: MA Experiment 108576 PARAMETER Experiment Name: At_42deg_Heat_cDNA_P Parameter: Timepoint (hr) Value: 1
  misc_feature: MA Experiment 108576 PARAMETER Experiment Name: At_42deg_Heat_cDNA_P Parameter: Tissue Value: Aerial
  misc_feature: MA Experiment ID: 108577 Result: Down-regulated in Transcription
  misc_feature: MA Experiment 108577 PARAMETER Experiment Name: At_42deg_Heat_cDNA_P Parameter: Temperature (deg C) Value: 42 vs. 22
  misc_feature: MA Experiment 108577 PARAMETER Experiment Name: At_42deg_Heat_cDNA_P Parameter: Timepoint (hr) Value: 6
  misc_feature: MA Experiment 108577 PARAMETER Experiment Name: At_42deg_Heat_cDNA_P Parameter: Tissue Value: Aerial
  misc_feature: MA Experiment ID: 108594 Result: Down-regulated in Transcription
  misc_feature: MA Experiment 108594 PARAMETER Experiment Name: At_Ler-rhl_Root_cDNA_P Parameter: Plant Line Value: null
  misc_feature: MA Experiment ID: 108595 Result: Down-regulated in Transcription
  misc_feature: MA Experiment 108595 PARAMETER Experiment Name: At_Ler-pi_Ovule_cDNA_P Parameter: Plant Line Value: null
  misc_feature: MA Experiment ID: 108607 Result: Up-regulated in Transcription
  misc_feature: MA Experiment 108607 PARAMETER Experiment Name: At_100uM_ABA_cDNA_P Parameter: Timepoint (hr) Value: 4
  misc_feature: MA Experiment 108607 PARAMETER Experiment Name: At_100uM_ABA_cDNA_P Parameter: Tissue Value: Aerial
  misc_feature: MA Experiment 108607 PARAMETER Experiment Name: At_100uM_ABA_cDNA_P Parameter: Treatment Value: 100uM ABA vs. No Treatment
  misc_feature: MA Experiment ID: 20000090 Result: Down-regulated in Transcription
  misc_feature: MA Experiment ID: 20000111 Result: Down-regulated in Transcription
  misc_feature: MA Experiment 20000111 PARAMETER Experiment Name: At_42deg_Heat_cDNA_P Parameter: Temperature (deg C) Value: 42 vs. 22
  misc_feature: MA Experiment 20000111 PARAMETER Experiment Name: At_42deg_Heat_cDNA_P Parameter: Timepoint (hr) Value: 6
  misc_feature: MA Experiment 20000111 PARAMETER Experiment Name: At_42deg_Heat_cDNA_P Parameter: Tissue Value: Aerial
  misc_feature: MA Experiment ID: 20000112 Result: Down-regulated in Transcription
  misc_feature: MA Experiment 20000112 PARAMETER Experiment Name: At_42deg_Heat_cDNA_P Parameter: Temperature (deg C) Value: 42 vs. 22
  misc_feature: MA Experiment 20000112 PARAMETER Experiment Name: At_42deg_Heat_cDNA_P Parameter: Timepoint (hr) Value: 2
  misc_feature: MA Experiment 20000112 PARAMETER Experiment Name: At_42deg_Heat_cDNA_P Parameter: Tissue Value: Aerial
  misc_feature: MA Experiment ID: 20000113 Result: Down-regulated in Transcription
  misc_feature: MA Experiment 20000113 PARAMETER Experiment Name: At_42deg_Heat_cDNA_P Parameter: Temperature (deg C) Value: 42 vs. 22
  misc_feature: MA Experiment 20000113 PARAMETER Experiment Name: At_42deg_Heat_cDNA_P Parameter: Timepoint (hr) Value: 8
  misc_feature: MA Experiment 20000113 PARAMETER Experiment Name: At_42deg_Heat_cDNA_P Parameter: Tissue Value: Aerial
  misc_feature: MA Experiment ID: 20000117 Result: Down-regulated in Transcription
  misc_feature: MA Experiment 20000117 PARAMETER Experiment Name: At_100uM_ABA_Mutants_cDNA_P Parameter: Plant Line Value: Columbia
  misc_feature: MA Experiment 20000117 PARAMETER Experiment Name: At_100uM_ABA_Mutants_cDNA_P Parameter: Timepoint (hr) Value: 6
  misc_feature: MA Experiment 20000117 PARAMETER Experiment Name: At_100uM_ABA_Mutants_cDNA_P Parameter: Tissue Value: Aerial
  misc_feature: MA Experiment 20000117 PARAMETER Experiment Name: At_100uM_ABA_Mutants_cDNA_P Parameter: Treatment Value: 100uM ABA vs. No Treatment
  misc_feature: MA Experiment ID: 20000234 Result: Up-regulated in Transcription
  misc_feature: MA Experiment 20000234 PARAMETER Experiment Name: At_Siliques_P Parameter: Age (day) Value: 21
  misc_feature: MA Experiment 20000234 PARAMETER Experiment Name: At_Siliques_P Parameter: Organism Value: A. thaliana
  misc_feature: MA Experiment 20000234 PARAMETER Experiment Name: At_Siliques_P Parameter: Plant Line Value: WS
  misc_feature: MA Experiment 20000234 PARAMETER Experiment Name: At_Siliques_P Parameter: Tissue Value: Less Than 5mm Siliques vs. Whole Plant
  misc_feature: MA Experiment ID: 20000235 Result: Up-regulated in Transcription
  misc_feature: MA Experiment 20000235 PARAMETER Experiment Name: At_Siliques_P Parameter: Age (day) Value: 21
  misc_feature: MA Experiment 20000235 PARAMETER Experiment Name: At_Siliques_P Parameter: Organism Value: A. thaliana
  misc_feature: MA Experiment 20000235 PARAMETER Experiment Name: At_Siliques_P Parameter: Plant Line Value: WS
  misc_feature: MA Experiment 20000235 PARAMETER Experiment Name: At_Siliques_P Parameter: Tissue Value: 5-10mm Siliques vs. Whole Plant
  misc_feature: MA Experiment ID: 20000265 Result: Up-regulated in Transcription
  misc_feature: MA Experiment 20000265 PARAMETER Experiment Name: At_Open_Flower_P Parameter: Age (day) Value: 21
  misc_feature: MA Experiment 20000265 PARAMETER Experiment Name: At_Open_Flower_P Parameter: Plant Line Value: WS
  misc_feature: MA Experiment 20000265 PARAMETER Experiment Name: At_Open_Flower_P Parameter: Tissue Value: Closed Flower vs. Whole Plant
  misc_feature: MA Experiment ID: 20000286 Result: Up-regulated in Transcription
  misc_feature: MA Experiment 20000286 PARAMETER Experiment Name: At_Open_Flower_P Parameter: Age (day) Value: 21
  misc_feature: MA Experiment 20000286 PARAMETER Experiment Name: At_Open_Flower_P Parameter: Plant Line Value: WS
  misc_feature: MA Experiment 20000286 PARAMETER Experiment Name: At_Open_Flower_P Parameter: Tissue Value: Half Open vs. Whole Plant
  misc_feature: MA Experiment ID: 20000495 Result: Down-regulated in Transcription
  misc_feature: MA Experiment 20000495 PARAMETER Experiment Name: At_Guard_Cells_P Parameter: Harvest Date Value: 8/2/2002
  misc_feature: MA Experiment 20000495 PARAMETER Experiment Name: At_Guard_Cells_P Parameter: Organism Value: A. thaliana
  misc_feature: MA Experiment 20000495 PARAMETER Experiment Name: At_Guard_Cells_P Parameter: Tissue Value: Guard Cells vs. Leaves
  misc_feature: MA Experiment ID: 20000794 Result: Down-regulated in Transcription
  misc_feature: MA Experiment 20000794 PARAMETER Experiment Name: At_Petals_P Parameter: Age (day) Value: 23-25 days
  misc_feature: MA Experiment 20000794 PARAMETER Experiment Name: At_Petals_P Parameter: Plant Line Value: WS
  misc_feature: MA Experiment 20000794 PARAMETER Experiment Name: At_Petals_P Parameter: Tissue Value: Petals vs. Whole plant
  misc_feature: MA Experiment ID: 20001248 Result: Down-regulated in Transcription
  misc_feature: MA Experiment 20001248 PARAMETER Experiment Name: At_Far-red-induction_P Parameter: Age (day) Value: 7
  misc_feature: MA Experiment 20001248 PARAMETER Experiment Name: At_Far-red-induction_P Parameter: Light Value: Far-red vs. White
  misc_feature: MA Experiment 20001248 PARAMETER Experiment Name: At_Far-red-induction_P Parameter: Organism Value: A. thaliana
  misc_feature: MA Experiment 20001248 PARAMETER Experiment Name: At_Far-red-induction_P Parameter: Plant Line Value: Columbia
  misc_feature: MA Experiment 20001248 PARAMETER Experiment Name: At_Far-red-induction_P Parameter: Timepoint (hr) Value: 4
  misc_feature: MA Experiment 20001248 PARAMETER Experiment Name: At_Far-red-induction_P Parameter: Tissue Value: Whole Plant
  misc_feature: MA Experiment ID: 20001450 Result: Down-regulated in Transcription
  misc_feature: MA Experiment 20001450 PARAMETER Experiment Name: At_Far-red-induction_P Parameter: Age (day) Value: 7
  misc_feature: MA Experiment 20001450 PARAMETER Experiment Name: At_Far-red-induction_P Parameter: Light Value: Far-red vs. White
  misc_feature: MA Experiment 20001450 PARAMETER Experiment Name: At_Far-red-induction_P Parameter: Organism Value: A. thaliana
  misc_feature: MA Experiment 20001450 PARAMETER Experiment Name: At_Far-red-induction_P Parameter: Plant Line Value: Columbia
  misc_feature: MA Experiment 20001450 PARAMETER Experiment Name: At_Far-red-induction_P Parameter: Timepoint (hr) Value: 8
  misc_feature: MA Experiment 20001450 PARAMETER Experiment Name: At_Far-red-induction_P Parameter: Tissue Value: Whole Plant
  misc_feature: MA Experiment ID: 20001451 Result: Down-regulated in Transcription
  misc_feature: MA Experiment 20001451 PARAMETER Experiment Name: At_Far-red-induction_P Parameter: Age (day) Value: 7
  misc_feature: MA Experiment 20001451 PARAMETER Experiment Name: At_Far-red-induction_P Parameter: Light Value: Far-red vs. White
  misc_feature: MA Experiment 20001451 PARAMETER Experiment Name: At_Far-red-induction_P Parameter: Organism Value: A. thaliana
  misc_feature: MA Experiment 20001451 PARAMETER Experiment Name: At_Far-red-induction_P Parameter: Plant Line Value: Columbia
  misc_feature: MA Experiment 20001451 PARAMETER Experiment Name: At_Far-red-induction_P Parameter: Timepoint (hr) Value: 24
  misc_feature: MA Experiment 20001451 PARAMETER Experiment Name: At_Far-red-induction_P Parameter: Tissue Value: Whole Plant
  misc_feature: MA Experiment ID: 20001557 Result: Up-regulated in Transcription
  misc_feature: MA Experiment 20001557 PARAMETER Experiment Name: At_Drought_Soil_Dry_P Parameter: Age (day) Value: 27
  misc_feature: MA Experiment 20001557 PARAMETER Experiment Name: At_Drought_Soil_Dry_P Parameter: Organism Value: A. thaliana
  misc_feature: MA Experiment 20001557 PARAMETER Experiment Name: At_Drought_Soil_Dry_P Parameter: Plant Line Value: WS
  misc_feature: MA Experiment 20001557 PARAMETER Experiment Name: At_Drought_Soil_Dry_P Parameter: Post Timepoint (hr) Value: 3
  misc_feature: MA Experiment 20001557 PARAMETER Experiment Name: At_Drought_Soil_Dry_P Parameter: Post-Treatment Value: Re-Water vs. No Drought
  misc_feature: MA Experiment 20001557 PARAMETER Experiment Name: At_Drought_Soil_Dry_P Parameter: Timepoint (day) Value: 13
  misc_feature: MA Experiment 20001557 PARAMETER Experiment Name: At_Drought_Soil_Dry_P Parameter: Treatment Value: Drought vs. No Drought
  misc_feature: MA Experiment ID: 20001560 Result: Up-regulated in Transcription
  misc_feature: MA Experiment 20001560 PARAMETER Experiment Name: At_Drought_Soil_Dry_P Parameter: Age (day) Value: 28
  misc_feature: MA Experiment 20001560 PARAMETER Experiment Name: At_Drought_Soil_Dry_P Parameter: Organism Value: A. thaliana
  misc_feature: MA Experiment 20001560 PARAMETER Experiment Name: At_Drought_Soil_Dry_P Parameter: Plant Line Value: WS
  misc_feature: MA Experiment 20001560 PARAMETER Experiment Name: At_Drought_Soil_Dry_P Parameter: Post Timepoint (hr) Value: None
  misc_feature: MA Experiment 20001560 PARAMETER Experiment Name: At_Drought_Soil_Dry_P Parameter: Post-Treatment Value: None
  misc_feature: MA Experiment 20001560 PARAMETER Experiment Name: At_Drought_Soil_Dry_P Parameter: Timepoint (day) Value: 14
  misc_feature: MA Experiment 20001560 PARAMETER Experiment Name: At_Drought_Soil_Dry_P Parameter: Treatment Value: Drought vs. No Drought
  misc_feature: MA Experiment ID: 20001911 Result: Down-regulated in Transcription
  misc_feature: MA Experiment 20001911 PARAMETER Experiment Name: At_Drought_Reproduction_P Parameter: Age (day) Value: 40
  misc_feature: MA Experiment 20001911 PARAMETER Experiment Name: At_Drought_Reproduction_P Parameter: Organism Value: A. thaliana
  misc_feature: MA Experiment 20001911 PARAMETER Experiment Name: At_Drought_Reproduction_P Parameter: Plant Line Value: WS
  misc_feature: MA Experiment 20001911 PARAMETER Experiment Name: At_Drought_Reproduction_P Parameter: Timepoint (day) Value: 10
  misc_feature: MA Experiment 20001911 PARAMETER Experiment Name: At_Drought_Reproduction_P Parameter: Tissue Value: Flowers
  misc_feature: MA Experiment 20001911 PARAMETER Experiment Name: At_Drought_Reproduction_P Parameter: Treatment Value: Drought vs. No Drought
acagagacttttattaaccttcaaaacattatttattattccaatcttcaaagagagacactcacactccttatcttcttcattcctccatcctatttttcttcttcgccaaagtgttattcctcaactttatatattacacaaatgtctttagccgcggataatgtgttgttggtggaagaaggaaggccagccacagcggaacatccatcggccggaccggtttatcgatgtaaatacgctaaagatggcctcctcgatctccctaccgatattgattctccttggcagttctttagtgaggctgtgaagaaatatccgaatgagcaaatgttgggccaacgcgtaacgactgattctaaggtcggtccatacacgtggatcacatataaggaagcgcacgacgctgcaattcggattggatcagcaatcagaagccgaggcgttgatccgggacactgttgtggtatttacggagctaattgtccagaatggattattgcaatggaggcctgcatgagccaagggatcacctacgtgcctctatacgattctttaggcgtaaacgcagttgaattcatcatcaaccacgccgaggtttcgctagtatttgttcaagagaagacagtttcatcgatcttatcgtgccaaaagggatgttcttcgaatttgaagactattgtgagcttcggggaagtctcgagtacacaaaaggaagaagctaagaaccaatgtgtttctttattttcatggaatgagttctcactaatgggaaacttagatgaggcaaatctacctcgtaagcgaaagacagacatctgcacaataatgtacacaagcgggacgactggagaacccaaaggtgtaatcttaaacaacgcagcaatttcggtccaggttttatccatagacaaaatgcttgaagtcactgatcgatcgtgtgacacgagcgatgtgttcttctcgtacttgccattagcacattgctatgatcaagtcatggagatttactttttatctagaggctcctctgttggatactggcgtggcgacattcggtacctgatggatgatgttcaagctcttaaacctactgtgttttgcggtgttccacgagtttacgacaaactatatgccggtataatgcaaaaaatatcagctagtggcttgatacgcaagaaactgtttgattttgcttataactacaaattgggaaatatgagaaaaggattctctcaagaagaagcttctcctcgtctagacagacttatgttcgataagataaaagaagcattaggaggaagagctcatatgttgttatcaggagcagcgcctctacctcgtcatgtagaggagttcttgagaatcattcctgcctctaatctctctcaaggttatggattgactgagagttgtgggggaagcttcacgaccttagccggagtattttctatggtggggacagtgggtgtgccaatgcccacggtggaggcaaggctagtgtccgtaccagagatgggttacgacgccttttccgctgacgtgccgagaggagagatttgtcttagaggaaattcaatgttttctggttaccataaaagacaagatctaactgatcaagtcctaatcgatggatggttccacacaggagatattggagaatggcaagaagatggatcaatgaagatcatcgataggaagaagaacatcttcaagttgtctcaaggtgaatatgttgctgttgaaaacctcgaaaacacttactcaagatgtcccctcattgctcagatatgggtctatggcaacagcttcgagtcatttttggtaggtgtggttgtacctgatagaaaagctattgaagattgggctaaactcaattaccaatctcccaatgatttcgaatctctatgtcaaaatctcaaagctcaaaaatacttcttggatgagcttaactctaccgcaaagcaatatcaacttaaaggatttgaaatgttaaaagctattcatttagaaccaaacccttttgatattgaaagagatcttattactccaactttcaagctgaaaaggccacagctcctccaacattacaagggcatagttgatcaactttattcagaagcaaagaggtccatggcatagataattagataccgatcggctattcattttctgatgctatttgggtttgtatgatatgttacaaaattgtgttcggatcctctcatcatgtgattcttgttacactaaatttatagtttggaaactatatatatactattaagcaacgtttactaaagatttcttgatacattttgattt

SEQ ID NO: 44794 - protein, 713 aa, Arabidopsis thaliana
  peptide (1)..(713): Ceres Seq. ID no. 12489114
  misc_feature (129)..(599): Pfam Name: AMP-binding enzyme Pfam Description: AMP-binding enzyme
  misc_feature (129)..(599): Pfam Name: AMP-binding enzyme Pfam Description: AMP-binding enzyme
  misc_feature (87)..(707): Homolog of NCBI NO: 18397422 NR Description: putative long-chain-fatty-acid--CoA ligase
  misc_feature (31)..(711): Homolog of NCBI NO: 22327099 NR Description: long-chain-fatty-acid--CoA ligase-like protein
  misc_feature (87)..(707): Homolog of NCBI NO: 13516481 NR Description: long-chain acyl-CoA synthetase [Arabidopsis
  misc_feature (59)..(705): Homolog of NCBI NO: 15226536 NR Description: putative acyl-CoA synthetase
  misc_feature (71)..(709): Homolog of NCBI NO: 34898260 NR Description: similar to long-chain-fatty-acid--CoA ligase 1
  misc_feature (87)..(707): Homolog of NCBI NO: 18397422 NR Description: putative long-chain-fatty-acid--CoA ligase
  misc_feature (87)..(707): Homolog of NCBI NO: 13516481 NR Description: long-chain acyl-CoA synthetase [Arabidopsis
  misc_feature (71)..(709): Homolog of NCBI NO: 34898260 NR Description: similar to long-chain-fatty-acid--CoA ligase 1
  misc_feature (56)..(707): Homolog of NCBI NO: 15217631 NR Description: acyl-CoA synthetase, putative
  misc_feature (56)..(713): Homolog of NCBI NO: 7437845 NR Description: probable long-chain-fatty-acid-CoA ligase (EC
  misc_feature (49)..(713): Homolog of NCBI NO: 15236634 NR Description: acyl-CoA synthetase - like protein
  misc_feature (59)..(713): Homolog of NCBI NO: 15237023 NR Description: putative acyl-CoA synthetase
  misc_feature (59)..(713): Homolog of NCBI NO: 20805871 NR Description: long chain acyl-CoA synthetase 5 [Arabidopsis
  misc_feature (59)..(705): Homolog of NCBI NO: 15226536 NR Description: putative acyl-CoA synthetase
  misc_feature (31)..(711): Homolog of NCBI NO: 22327099 NR Description: long-chain-fatty-acid--CoA ligase-like protein
  misc_feature (59)..(713): Homolog of NCBI NO: 20805871 NR Description: long chain acyl-CoA synthetase 5 [Arabidopsis
  misc_feature (59)..(713): Homolog of NCBI NO: 15237023 NR Description: putative acyl-CoA synthetase
  misc_feature (49)..(713): Homolog of NCBI NO: 15236634 NR Description: acyl-CoA synthetase - like protein
  misc_feature (56)..(713): Homolog of NCBI NO: 7437845 NR Description: probable long-chain-fatty-acid-CoA ligase (EC
  misc_feature (56)..(707): Homolog of NCBI NO: 15217631 NR Description: acyl-CoA synthetase, putative
TETFINLQNIIYYSNLQRETLTLLIFFIPPSYFSSSPKCYSSTLYITQMSLAADNVLLVEEGRPATAEHPSAGPVYRCKYAKDGLLDLPTDIDSPWQFFSEAVKKYPNEQMLGQRVTTDSKVGPYTWITYKEAHDAAIRIGSAIRSRGVDPGHCCGIYGANCPEWIIAMEACMSQGITYVPLYDSLGVNAVEFIINHAEVSLVFVQEKTVSSILSCQKGCSSNLKTIVSFGEVSSTQKEEAKNQCVSLFSWNEFSLMGNLDEANLPRKRKTDICTIMYTSGTTGEPKGVILNNAAISVQVLSIDKMLEVTDRSCDTSDVFFSYLPLAHCYDQVMEIYFLSRGSSVGYWRGDIRYLMDDVQALKPTVFCGVPRVYDKLYAGIMQKISASGLIRKKLFDFAYNYKLGNMRKGFSQEEASPRLDRLMFDKIKEALGGRAHMLLSGAAPLPRHVEEFLRIIPASNLSQGYGLTESCGGSFTTLAGVFSMVGTVGVPMPTVEARLVSVPEMGYDAFSADVPRGEICLRGNSMFSGYHKRQDLTDQVLIDGWFHTGDIGEWQEDGSMKIIDRKKNIFKLSQGEYVAVENLENTYSRCPLIAQIWVYGNSFESFLVGVVVPDRKAIEDWAKLNYQSPNDFESLCQNLKAQKYFLDELNSTAKQYQLKGFEMLKAIHLEPNPFDIERDLITPTFKLKRPQLLQHYKGIVDQLYSEAKRSMA

SEQ ID NO: 44795 - protein, 665 aa, Arabidopsis thaliana
  peptide (1)..(665): Ceres Seq. ID no. 12489115
  misc_feature (81)..(551): Pfam Name: AMP-binding enzyme Pfam Description: AMP-binding enzyme
  misc_feature (81)..(551): Pfam Name: AMP-binding enzyme Pfam Description: AMP-binding enzyme
  misc_feature (39)..(659): Homolog of NCBI NO: 18397422 NR Description: putative long-chain-fatty-acid--CoA ligase
  misc_feature (1)..(663): Homolog of NCBI NO: 22327099 NR Description: long-chain-fatty-acid--CoA ligase-like protein
  misc_feature (39)..(659): Homolog of NCBI NO: 13516481 NR Description: long-chain acyl-CoA synthetase [Arabidopsis
  misc_feature (11)..(657): Homolog of NCBI NO: 15226536 NR Description: putative acyl-CoA synthetase
  misc_feature (23)..(661): Homolog of NCBI NO: 34898260 NR Description: similar to long-chain-fatty-acid--CoA ligase 1
  misc_feature (39)..(659): Homolog of NCBI NO: 18397422 NR Description: putative long-chain-fatty-acid--CoA ligase
  misc_feature (39)..(659): Homolog of NCBI NO: 13516481 NR Description: long-chain acyl-CoA synthetase [Arabidopsis
  misc_feature (23)..(661): Homolog of NCBI NO: 34898260 NR Description: similar to long-chain-fatty-acid--CoA ligase 1
  misc_feature (8)..(659): Homolog of NCBI NO: 15217631 NR Description: acyl-CoA synthetase, putative
  misc_feature (8)..(665): Homolog of NCBI NO: 7437845 NR Description: probable long-chain-fatty-acid-CoA ligase (EC
  misc_feature (1)..(665): Homolog of NCBI NO: 15236634 NR Description: acyl-CoA synthetase - like protein
  misc_feature (11)..(665): Homolog of NCBI NO: 15237023 NR Description: putative acyl-CoA synthetase
  misc_feature (11)..(665): Homolog of NCBI NO: 20805871 NR Description: long chain acyl-CoA synthetase 5 [Arabidopsis
  misc_feature (11)..(657): Homolog of NCBI NO: 15226536 NR Description: putative acyl-CoA synthetase
  misc_feature (1)..(663): Homolog of NCBI NO: 22327099 NR Description: long-chain-fatty-acid--CoA ligase-like protein
  misc_feature (11)..(665): Homolog of NCBI NO: 20805871 NR Description: long chain acyl-CoA synthetase 5 [Arabidopsis
  misc_feature (11)..(665): Homolog of NCBI NO: 15237023 NR Description: putative acyl-CoA synthetase
  misc_feature (1)..(665): Homolog of NCBI NO: 15236634 NR Description: acyl-CoA synthetase - like protein
  misc_feature (8)..(665): Homolog of NCBI NO: 7437845 NR Description: probable long-chain-fatty-acid-CoA ligase (EC
  misc_feature (8)..(659): Homolog of NCBI NO: 15217631 NR Description: acyl-CoA synthetase, putative
MSLAADNVLLVEEGRPATAEHPSAGPVYRCKYAKDGLLDLPTDIDSPWQFFSEAVKKYPNEQMLGQRVTTDSKVGPYTWITYKEAHDAAIRIGSAIRSRGVDPGHCCGIYGANCPEWIIAMEACMSQGITYVPLYDSLGVNAVEFIINHAEVSLVFVQEKTVSSILSCQKGCSSNLKTIVSFGEVSSTQKEEAKNQCVSLFSWNEFSLMGNLDEANLPRKRKTDICTIMYTSGTTGEPKGVILNNAAISVQVLSIDKMLEVTDRSCDTSDVFFSYLPLAHCYDQVMEIYFLSRGSSVGYWRGDIRYLMDDVQALKPTVFCGVPRVYDKLYAGIMQKISASGLIRKKLFDFAYNYKLGNMRKGFSQEEASPRLDRLMFDKIKEALGGRAHMLLSGAAPLPRHVEEFLRIIPASNLSQGYGLTESCGGSFTTLAGVFSMVGTVGVPMPTVEARLVSVPEMGYDAFSADVPRGEICLRGNSMFSGYHKRQDLTDQVLIDGWFHTGDIGEWQEDGSMKIIDRKKNIFKLSQGEYVAVENLENTYSRCPLIAQIWVYGNSFESFLVGVVVPDRKAIEDWAKLNYQSPNDFESLCQNLKAQKYFLDELNSTAKQYQLKGFEMLKAIHLEPNPFDIERDLITPTFKLKRPQLLQHYKGIVDQLYSEAKRSMA

SEQ ID NO: 44796 - protein, 603 aa, Arabidopsis thaliana
  peptide (1)..(603): Ceres Seq. ID no. 12489116
  misc_feature (19)..(489): Pfam Name: AMP-binding enzyme Pfam Description: AMP-binding enzyme
  misc_feature (19)..(489): Pfam Name: AMP-binding enzyme Pfam Description: AMP-binding enzyme
  misc_feature (1)..(597): Homolog of NCBI NO: 18397422 NR Description: putative long-chain-fatty-acid--CoA ligase
  misc_feature (1)..(601): Homolog of NCBI NO: 22327099 NR Description: long-chain-fatty-acid--CoA ligase-like protein
  misc_feature (1)..(597): Homolog of NCBI NO: 13516481 NR Description: long-chain acyl-CoA synthetase [Arabidopsis
  misc_feature (1)..(595): Homolog of NCBI NO: 15226536 NR Description: putative acyl-CoA synthetase
  misc_feature (1)..(599): Homolog of NCBI NO: 34898260 NR Description: similar to long-chain-fatty-acid--CoA ligase 1
  misc_feature (1)..(597): Homolog of NCBI NO: 18397422 NR Description: putative long-chain-fatty-acid--CoA ligase
  misc_feature (1)..(597): Homolog of NCBI NO: 13516481 NR Description: long-chain acyl-CoA synthetase [Arabidopsis
  misc_feature (1)..(599): Homolog of NCBI NO: 34898260 NR Description: similar to long-chain-fatty-acid--CoA ligase 1
  misc_feature (1)..(597): Homolog of NCBI NO: 15217631 NR Description: acyl-CoA synthetase, putative
  misc_feature (1)..(603): Homolog of NCBI NO: 7437845 NR Description: probable long-chain-fatty-acid-CoA ligase (EC
  misc_feature (1)..(603): Homolog of NCBI NO: 15236634 NR Description: acyl-CoA synthetase - like protein
  misc_feature (1)..(603): Homolog of NCBI NO: 15237023 NR Description: putative acyl-CoA synthetase
  misc_feature (1)..(603): Homolog of NCBI NO: 20805871 NR Description: long chain acyl-CoA synthetase 5 [Arabidopsis
  misc_feature (1)..(595): Homolog of NCBI NO: 15226536 NR Description: putative acyl-CoA synthetase
  misc_feature (1)..(601): Homolog of NCBI NO: 22327099 NR Description: long-chain-fatty-acid--CoA ligase-like protein
  misc_feature (1)..(603): Homolog of NCBI NO: 20805871 NR Description: long chain acyl-CoA synthetase 5 [Arabidopsis
  misc_feature (1)..(603): Homolog of NCBI NO: 15237023 NR Description: putative acyl-CoA synthetase
  misc_feature (1)..(603): Homolog of NCBI NO: 15236634 NR Description: acyl-CoA synthetase - like protein
  misc_feature (1)..(603): Homolog of NCBI NO: 7437845 NR Description: probable long-chain-fatty-acid-CoA ligase (EC
  misc_feature (1)..(597): Homolog of NCBI NO: 15217631 NR Description: acyl-CoA synthetase, putative
MLGQRVTTDSKVGPYTWITYKEAHDAAIRIGSAIRSRGVDPGHCCGIYGANCPEWIIAMEACMSQGITYVPLYDSLGVNAVEFIINHAEVSLVFVQEKTVSSILSCQKGCSSNLKTIVSFGEVSSTQKEEAKNQCVSLFSWNEFSLMGNLDEANLPRKRKTDICTIMYTSGTTGEPKGVILNNAAISVQVLSIDKMLEVTDRSCDTSDVFFSYLPLAHCYDQVMEIYFLSRGSSVGYWRGDIRYLMDDVQALKPTVFCGVPRVYDKLYAGIMQKISASGLIRKKLFDFAYNYKLGNMRKGFSQEEASPRLDRLMFDKIKEALGGRAHMLLSGAAPLPRHVEEFLRIIPASNLSQGYGLTESCGGSFTTLAGVFSMVGTVGVPMPTVEARLVSVPEMGYDAFSADVPRGEICLRGNSMFSGYHKRQDLTDQVLIDGWFHTGDIGEWQEDGSMKIIDRKKNIFKLSQGEYVAVENLENTYSRCPLIAQIWVYGNSFESFLVGVVVPDRKAIEDWAKLNYQSPNDFESLCQNLKAQKYFLDELNSTAKQYQLKGFEMLKAIHLEPNPFDIERDLITPTFKLKRPQLLQHYKGIVDQLYSEAKRSMA

SEQ ID NO: 44797 - DNA, 1498 bp, Arabidopsis thaliana; identical to SEQ ID NO: 41695
  misc_feature (1)..(1498): Ceres Seq. ID no. 13646293
  misc_feature: MA Experiment ID: 20000169 Result: Up-regulated in Transcription
  misc_feature: MA Experiment 20000169 PARAMETER Experiment Name: At_100uM_ABA_P Parameter: Age (day) Value: 14
  misc_feature: MA Experiment 20000169 PARAMETER Experiment Name: At_100uM_ABA_P Parameter: Organism Value: A. thaliana
  misc_feature: MA Experiment 20000169 PARAMETER Experiment Name: At_100uM_ABA_P Parameter: Plant Line Value: WS
  misc_feature: MA Experiment 20000169 PARAMETER Experiment Name: At_100uM_ABA_P Parameter: Timepoint (hr) Value: 6
  misc_feature: MA Experiment 20000169 PARAMETER Experiment Name: At_100uM_ABA_P Parameter: Tissue Value: Aerial
  misc_feature: MA Experiment 20000169 PARAMETER Experiment Name: At_100uM_ABA_P Parameter: Treatment Value: 100uM ABA vs. No Treatment
  misc_feature: MA Experiment ID: 20000171 Result: Up-regulated in Transcription
  misc_feature: MA Experiment 20000171 PARAMETER Experiment Name: At_42deg_Heat_P Parameter: Age (day) Value: 14
  misc_feature: MA Experiment 20000171 PARAMETER Experiment Name: At_42deg_Heat_P Parameter: Organism Value: A. thaliana
  misc_feature: MA Experiment 20000171 PARAMETER Experiment Name: At_42deg_Heat_P Parameter: Plant Line Value: WS
  misc_feature: MA Experiment 20000171 PARAMETER Experiment Name: At_42deg_Heat_P Parameter: Temperature (deg C) Value: 42 vs. 22
  misc_feature: MA Experiment 20000171 PARAMETER Experiment Name: At_42deg_Heat_P Parameter: Timepoint (hr) Value: 1
  misc_feature: MA Experiment 20000171 PARAMETER Experiment Name: At_42deg_Heat_P Parameter: Tissue Value: Aerial
  misc_feature: MA Experiment ID: 20000173 Result: Up-regulated in Transcription
  misc_feature: MA Experiment 20000173 PARAMETER Experiment Name: At_42deg_Heat_P Parameter: Age (day) Value: 14
  misc_feature: MA Experiment 20000173 PARAMETER Experiment Name: At_42deg_Heat_P Parameter: Organism Value: A. thaliana
  misc_feature: MA Experiment 20000173 PARAMETER Experiment Name: At_42deg_Heat_P Parameter: Plant Line Value: WS
  misc_feature: MA Experiment 20000173 PARAMETER Experiment Name: At_42deg_Heat_P Parameter: Temperature (deg C) Value: 42 vs. 22
  misc_feature: MA Experiment 20000173 PARAMETER Experiment Name: At_42deg_Heat_P Parameter: Timepoint (hr) Value: 6
  misc_feature: MA Experiment 20000173 PARAMETER Experiment Name: At_42deg_Heat_P Parameter: Tissue Value: Aerial
  misc_feature: MA Experiment ID: 20000184 Result: Up-regulated in Transcription
  misc_feature: MA Experiment 20000184 PARAMETER Experiment Name: At_Shoots__P Parameter: Age (day) Value: 7
  misc_feature: MA Experiment 20000184 PARAMETER Experiment Name: At_Shoots__P Parameter: Tissue Value: Shoots vs. Whole Plant
  misc_feature: MA Experiment ID: 20000436 Result: Up-regulated in Transcription
  misc_feature: MA Experiment 20000436 PARAMETER Experiment Name: At_Drought_P Parameter: Age (day) Value: 7
  misc_feature: MA Experiment 20000436 PARAMETER Experiment Name: At_Drought_P Parameter: Organism Value: A. thaliana
  misc_feature: MA Experiment 20000436 PARAMETER Experiment Name: At_Drought_P Parameter: Plant Line Value: WS
  misc_feature: MA Experiment 20000436 PARAMETER Experiment Name: At_Drought_P Parameter: Timepoint (hr) Value: 12
  misc_feature: MA Experiment 20000436 PARAMETER Experiment Name: At_Drought_P Parameter: Tissue Value: Whole Plant
  misc_feature: MA Experiment 20000436 PARAMETER Experiment Name: At_Drought_P Parameter: Treatment Value: Drought vs. No Drought
  misc_feature: MA Experiment ID: 20000794 Result: Up-regulated in Transcription
  misc_feature: MA Experiment 20000794 PARAMETER Experiment Name: At_Petals_P Parameter: Age (day) Value: 23-25 days
  misc_feature: MA Experiment 20000794 PARAMETER Experiment Name: At_Petals_P Parameter: Plant Line Value: WS
  misc_feature: MA Experiment 20000794 PARAMETER Experiment Name: At_Petals_P Parameter: Tissue Value: Petals vs. Whole plant
  misc_feature: MA Experiment ID: 20001248 Result: Down-regulated in Transcription
  misc_feature: MA Experiment 20001248 PARAMETER Experiment Name: At_Far-red-induction_P Parameter: Age (day) Value: 7
  misc_feature: MA Experiment 20001248 PARAMETER Experiment Name: At_Far-red-induction_P Parameter: Light Value: Far-red vs. White
  misc_feature: MA Experiment 20001248 PARAMETER Experiment Name: At_Far-red-induction_P Parameter: Organism Value: A. thaliana
  misc_feature: MA Experiment 20001248 PARAMETER Experiment Name: At_Far-red-induction_P Parameter: Plant Line Value: Columbia
  misc_feature: MA Experiment 20001248 PARAMETER Experiment Name: At_Far-red-induction_P Parameter: Timepoint (hr) Value: 4
  misc_feature: MA Experiment 20001248 PARAMETER Experiment Name: At_Far-red-induction_P Parameter: Tissue Value: Whole Plant
  misc_feature: MA Experiment ID: 20001557 Result: Up-regulated in Transcription
  misc_feature: MA Experiment 20001557 PARAMETER Experiment Name: At_Drought_Soil_Dry_P Parameter: Age (day) Value: 27
  misc_feature: MA Experiment 20001557 PARAMETER Experiment Name: At_Drought_Soil_Dry_P Parameter: Organism Value: A. thaliana
  misc_feature: MA Experiment 20001557 PARAMETER Experiment Name: At_Drought_Soil_Dry_P Parameter: Plant Line Value: WS
  misc_feature: MA Experiment 20001557 PARAMETER Experiment Name: At_Drought_Soil_Dry_P Parameter: Post Timepoint (hr) Value: 3
  misc_feature: MA Experiment 20001557 PARAMETER Experiment Name: At_Drought_Soil_Dry_P Parameter: Post-Treatment Value: Re-Water vs. No Drought
  misc_feature: MA Experiment 20001557 PARAMETER Experiment Name: At_Drought_Soil_Dry_P Parameter: Timepoint (day) Value: 13
  misc_feature: MA Experiment 20001557 PARAMETER Experiment Name: At_Drought_Soil_Dry_P Parameter: Treatment Value: Drought vs. No Drought
  misc_feature: MA Experiment ID: 20001558 Result: Up-regulated in Transcription
  misc_feature: MA Experiment 20001558 PARAMETER Experiment Name: At_Drought_Soil_Dry_P Parameter: Age (day) Value: 27
  misc_feature: MA Experiment 20001558 PARAMETER Experiment Name: At_Drought_Soil_Dry_P Parameter: Organism Value: A. thaliana
  misc_feature: MA Experiment 20001558 PARAMETER Experiment Name: At_Drought_Soil_Dry_P Parameter: Plant Line Value: WS
  misc_feature: MA Experiment 20001558 PARAMETER Experiment Name: At_Drought_Soil_Dry_P Parameter: Post Timepoint (hr) Value: 6
  misc_feature: MA Experiment 20001558 PARAMETER Experiment Name: At_Drought_Soil_Dry_P Parameter: Post-Treatment Value: Re-Water vs. No Drought
  misc_feature: MA Experiment 20001558 PARAMETER Experiment Name: At_Drought_Soil_Dry_P Parameter: Timepoint (day) Value: 13
  misc_feature: MA Experiment 20001558 PARAMETER Experiment Name: At_Drought_Soil_Dry_P Parameter: Treatment Value: Drought vs. No Drought
  misc_feature: MA Experiment ID: 20001905 Result: Up-regulated in Transcription
  misc_feature: MA Experiment 20001905 PARAMETER Experiment Name: At_Drought_Reproduction_P Parameter: Age (day) Value: 40
  misc_feature: MA Experiment 20001905 PARAMETER Experiment Name: At_Drought_Reproduction_P Parameter: Organism Value: A. thaliana
  misc_feature: MA Experiment 20001905 PARAMETER Experiment Name: At_Drought_Reproduction_P Parameter: Plant Line Value: WS
  misc_feature: MA Experiment 20001905 PARAMETER Experiment Name: At_Drought_Reproduction_P Parameter: Timepoint (day) Value: 10
  misc_feature: MA Experiment 20001905 PARAMETER Experiment Name: At_Drought_Reproduction_P Parameter: Tissue Value: Rosettes
  misc_feature: MA Experiment 20001905 PARAMETER Experiment Name: At_Drought_Reproduction_P Parameter: Treatment Value: Drought vs. No Drought

SEQ ID NO: 44798 - protein, 287 aa, Arabidopsis thaliana; identical to SEQ ID NO: 29005
  peptide (1)..(287): Ceres Seq. ID no. 13646294
  misc_feature (45)..(274): Pfam Name: Major intrinsic protein Pfam Description: Major intrinsic protein
  misc_feature (45)..(274): Pfam Name: Major intrinsic protein Pfam Description: Major intrinsic protein
  misc_feature (1)..(287): Homolog of NCBI NO: 10799095 NR Description: aquaporin PIP1b2 [Brassica oleracea]
  misc_feature (1)..(287): Homolog of NCBI NO: 15236485 NR Description: major intrinsic protein (MIP) family [Arabidopsis
  misc_feature (1)..(287): Homolog of NCBI NO: 3551131 NR Description: plasma membrane aquaporin (PAQ1) [Raphanus
  misc_feature (1)..(287): Homolog of NCBI NO: 15233109 NR Description: plasma membrane intrinsic protein 1A [Arabidopsis
  misc_feature (1)..(287): Homolog of NCBI NO: 472875 NR Description: plasma membrane intrinsic protein 1c [Arabidopsis
  misc_feature (1)..(287): Homolog of NCBI NO: 10799095 NR Description: aquaporin PIP1b2 [Brassica oleracea]
  misc_feature (1)..(287): Homolog of NCBI NO: 3551131 NR Description: plasma membrane aquaporin (PAQ1) [Raphanus
  misc_feature (1)..(287): Homolog of NCBI NO: 472875 NR Description: plasma membrane intrinsic protein 1c [Arabidopsis
  misc_feature (1)..(287): Homolog of NCBI NO: 18411332 NR Description: transmembrane protein (MIP family) [Arabidopsis
  misc_feature (1)..(287): Homolog of NCBI NO: 7441247 NR Description: probable plasma membrane intrinsic protein 1c -
  misc_feature (1)..(287): Homolog of NCBI NO: 2373401 NR Description: transmembrane protein [Arabidopsis thaliana]
  misc_feature (1)..(287): Homolog of NCBI NO: 15223438 NR Description: plasma membrane intrinsic protein 1c [Arabidopsis
  misc_feature (1)..(287): Homolog of NCBI NO: 17065068 NR Description: plasma membrane intrinsic protein 1C
  misc_feature (1)..(287): Homolog of NCBI NO: 15233109 NR Description: plasma membrane intrinsic protein 1A [Arabidopsis
  misc_feature (1)..(287): Homolog of NCBI NO: 15236485 NR Description: major intrinsic protein (MIP) family [Arabidopsis
  misc_feature (1)..(287): Homolog of NCBI NO: 17065068 NR Description: plasma membrane intrinsic protein 1C
  misc_feature (1)..(287): Homolog of NCBI NO: 15223438 NR Description: plasma membrane intrinsic protein 1c [Arabidopsis
  misc_feature (1)..(287): Homolog of NCBI NO: 2373401 NR Description: transmembrane protein [Arabidopsis thaliana]
  misc_feature (1)..(287): Homolog of NCBI NO: 7441247 NR Description: probable plasma membrane intrinsic protein 1c -
  misc_feature (1)..(287): Homolog of NCBI NO: 18411332 NR Description: transmembrane protein (MIP family) [Arabidopsis

SEQ ID NO: 44799 - protein, 214 aa, Arabidopsis thaliana; identical to SEQ ID NO: 29006
  peptide (1)..(214): Ceres Seq. ID no. 13646295
  misc_feature (1)..(201): Pfam Name: Major intrinsic protein Pfam Description: Major intrinsic protein
  misc_feature (1)..(201): Pfam Name: Major intrinsic protein Pfam Description: Major intrinsic protein
  misc_feature (1)..(214): Homolog of NCBI NO: 10799095 NR Description: aquaporin PIP1b2 [Brassica oleracea]
  misc_feature (1)..(214): Homolog of NCBI NO: 15236485 NR Description: major intrinsic protein (MIP) family [Arabidopsis
  misc_feature (1)..(214): Homolog of NCBI NO: 3551131 NR Description: plasma membrane aquaporin (PAQ1) [Raphanus
  misc_feature (1)..(214): Homolog of NCBI NO: 15233109 NR Description: plasma membrane intrinsic protein 1A [Arabidopsis
  misc_feature (1)..(214): Homolog of NCBI NO: 472875 NR Description: plasma membrane intrinsic protein 1c [Arabidopsis
  misc_feature (1)..(214): Homolog of NCBI NO: 10799095 NR Description: aquaporin PIP1b2 [Brassica oleracea]
  misc_feature (1)..(214): Homolog of NCBI NO: 3551131 NR Description: plasma membrane aquaporin (PAQ1) [Raphanus
  misc_feature (1)..(214): Homolog of NCBI NO: 472875 NR Description: plasma membrane intrinsic protein 1c [Arabidopsis
  misc_feature (1)..(214): Homolog of NCBI NO: 18411332 NR Description: transmembrane protein (MIP family) [Arabidopsis
  misc_feature (1)..(214): Homolog of NCBI NO: 7441247 NR Description: probable plasma membrane intrinsic protein 1c -
  misc_feature (1)..(214): Homolog of NCBI NO: 2373401 NR Description: transmembrane protein [Arabidopsis thaliana]
  misc_feature (1)..(214): Homolog of NCBI NO: 15223438 NR Description: plasma membrane intrinsic protein 1c [Arabidopsis
  misc_feature (1)..(214): Homolog of NCBI NO: 17065068 NR Description: plasma membrane intrinsic protein 1C
  misc_feature (1)..(214): Homolog of NCBI NO: 15233109 NR Description: plasma membrane intrinsic protein 1A [Arabidopsis
  misc_feature (1)..(214): Homolog of NCBI NO: 15236485 NR Description: major intrinsic protein (MIP) family [Arabidopsis
  misc_feature (1)..(214): Homolog of NCBI NO: 17065068 NR Description: plasma membrane intrinsic protein 1C
  misc_feature (1)..(214): Homolog of NCBI NO: 15223438 NR Description: plasma membrane intrinsic protein 1c [Arabidopsis
  misc_feature (1)..(214): Homolog of NCBI NO: 2373401 NR Description: transmembrane protein [Arabidopsis thaliana]
  misc_feature (1)..(214): Homolog of NCBI NO: 7441247 NR Description: probable plasma membrane intrinsic protein 1c -
  misc_feature (1)..(214): Homolog of NCBI NO: 18411332 NR Description: transmembrane protein (MIP family) [Arabidopsis

SEQ ID NO: 44800 - protein, 206 aa, Arabidopsis thaliana; identical to SEQ ID NO: 29007
  peptide (1)..(206): Ceres Seq. ID no. 13646296
  misc_feature (1)..(193): Pfam Name: Major intrinsic protein Pfam Description: Major intrinsic protein
  misc_feature (1)..(193): Pfam Name: Major intrinsic protein Pfam Description: Major intrinsic protein
  misc_feature (1)..(206): Homolog of NCBI NO: 10799095 NR Description: aquaporin PIP1b2 [Brassica oleracea]
  misc_feature (1)..(206): Homolog of NCBI NO: 15236485 NR Description: major intrinsic protein (MIP) family [Arabidopsis
  misc_feature (1)..(206): Homolog of NCBI NO: 3551131 NR Description: plasma membrane aquaporin (PAQ1) [Raphanus
  misc_feature (1)..(206): Homolog of NCBI NO: 15233109 NR Description: plasma membrane intrinsic protein 1A [Arabidopsis
  misc_feature (1)..(206): Homolog of NCBI NO: 472875 NR Description: plasma membrane intrinsic protein 1c [Arabidopsis
  misc_feature (1)..(206): Homolog of NCBI NO: 10799095 NR Description: aquaporin PIP1b2 [Brassica oleracea]
  misc_feature (1)..(206): Homolog of NCBI NO: 3551131 NR Description: plasma membrane aquaporin (PAQ1) [Raphanus
  misc_feature (1)..(206): Homolog of NCBI NO: 472875 NR Description: plasma membrane intrinsic protein 1c [Arabidopsis
  misc_feature (1)..(206): Homolog of NCBI NO: 18411332 NR Description: transmembrane protein (MIP family) [Arabidopsis
  misc_feature (1)..(206): Homolog of NCBI NO: 7441247 NR Description: probable plasma membrane intrinsic protein 1c -
  misc_feature (1)..(206): Homolog of NCBI NO: 2373401 NR Description: transmembrane protein [Arabidopsis thaliana]
  misc_feature (1)..(206): Homolog of NCBI NO: 15223438 NR Description: plasma membrane intrinsic protein 1c [Arabidopsis
  misc_feature (1)..(206): Homolog of NCBI NO: 17065068 NR Description: plasma membrane intrinsic protein 1C
  misc_feature (1)..(206): Homolog of NCBI NO: 15233109 NR Description: plasma membrane intrinsic protein 1A [Arabidopsis
  misc_feature (1)..(206): Homolog of NCBI NO: 15236485 NR Description: major intrinsic protein (MIP) family [Arabidopsis
  misc_feature (1)..(206): Homolog of NCBI NO: 17065068 NR Description: plasma membrane intrinsic protein 1C
  misc_feature (1)..(206): Homolog of NCBI NO: 15223438 NR Description: plasma membrane intrinsic protein 1c [Arabidopsis
  misc_feature (1)..(206): Homolog of NCBI NO: 2373401 NR Description: transmembrane protein [Arabidopsis thaliana]
  misc_feature (1)..(206): Homolog of NCBI NO: 7441247 NR Description: probable plasma membrane intrinsic protein 1c -
  misc_feature (1)..(206): Homolog of NCBI NO: 18411332 NR Description: transmembrane protein (MIP family) [Arabidopsis

SEQ ID NO: 44801 - DNA, 1778 bp, Arabidopsis thaliana
  misc_feature (1)..(1778): Ceres Seq. ID no. 13646378
  misc_feature: MA Experiment ID: 20000166 Result: Down-regulated in Transcription
  misc_feature: MA Experiment 20000166 PARAMETER Experiment Name: At_100uM_ABA_P Parameter: Age (day) Value: 14
  misc_feature: MA Experiment 20000166 PARAMETER Experiment Name: At_100uM_ABA_P Parameter: Organism Value: A. thaliana
  misc_feature: MA Experiment 20000166 PARAMETER Experiment Name: At_100uM_ABA_P Parameter: Plant Line Value: WS
  misc_feature: MA Experiment 20000166 PARAMETER Experiment Name: At_100uM_ABA_P Parameter: Timepoint (hr) Value: 1
  misc_feature: MA Experiment 20000166 PARAMETER Experiment Name: At_100uM_ABA_P Parameter: Tissue Value: Aerial
  misc_feature: MA Experiment 20000166 PARAMETER Experiment Name: At_100uM_ABA_P Parameter: Treatment Value: 100uM ABA vs. No Treatment
  misc_feature: MA Experiment ID: 20000171 Result: Down-regulated in Transcription
  misc_feature: MA Experiment 20000171 PARAMETER Experiment Name: At_42deg_Heat_P Parameter: Age (day) Value: 14
  misc_feature: MA Experiment 20000171 PARAMETER Experiment Name: At_42deg_Heat_P Parameter: Organism Value: A. thaliana
  misc_feature: MA Experiment 20000171 PARAMETER Experiment Name: At_42deg_Heat_P Parameter: Plant Line Value: WS
  misc_feature: MA Experiment 20000171 PARAMETER Experiment Name: At_42deg_Heat_P Parameter: Temperature (deg C) Value: 42 vs. 22
  misc_feature: MA Experiment 20000171 PARAMETER Experiment Name: At_42deg_Heat_P Parameter: Timepoint (hr) Value: 1
  misc_feature: MA Experiment 20000171 PARAMETER Experiment Name: At_42deg_Heat_P Parameter: Tissue Value: Aerial
  misc_feature: MA Experiment ID: 20000173 Result: Down-regulated in Transcription
  misc_feature: MA Experiment 20000173 PARAMETER Experiment Name: At_42deg_Heat_P Parameter: Age (day) Value: 14
  misc_feature: MA Experiment 20000173 PARAMETER Experiment Name: At_42deg_Heat_P Parameter: Organism Value: A. thaliana
  misc_feature: MA Experiment 20000173 PARAMETER Experiment Name: At_42deg_Heat_P Parameter: Plant Line Value: WS
  misc_feature: MA Experiment 20000173 PARAMETER Experiment Name: At_42deg_Heat_P Parameter: Temperature (deg C) Value: 42 vs. 22
  misc_feature: MA Experiment 20000173 PARAMETER Experiment Name: At_42deg_Heat_P Parameter: Timepoint (hr) Value: 6
  misc_feature: MA Experiment 20000173 PARAMETER Experiment Name: At_42deg_Heat_P Parameter: Tissue Value: Aerial
  misc_feature: MA Experiment ID: 20000182 Result: Up-regulated in Transcription
  misc_feature: MA Experiment 20000182 PARAMETER Experiment Name: At_2mM_SA_P Parameter: Age (day) Value: 14
  misc_feature: MA Experiment 20000182 PARAMETER Experiment Name: At_2mM_SA_P Parameter: Organism Value: A. thaliana
  misc_feature: MA Experiment 20000182 PARAMETER Experiment Name: At_2mM_SA_P Parameter: Plant Line Value: WS
  misc_feature: MA Experiment 20000182 PARAMETER Experiment Name: At_2mM_SA_P Parameter: Timepoint (hr) Value: 6
  misc_feature: MA Experiment 20000182 PARAMETER Experiment Name: At_2mM_SA_P Parameter: Tissue Value: Aerial
  misc_feature: MA Experiment 20000182 PARAMETER Experiment Name: At_2mM_SA_P Parameter: Treatment Value: 2mM SA vs. No Treatment
  misc_feature: MA Experiment ID: 20000184 Result: Down-regulated in Transcription
  misc_feature: MA Experiment 20000184 PARAMETER Experiment Name: At_Shoots__P Parameter: Age (day) Value: 7
  misc_feature: MA Experiment 20000184 PARAMETER Experiment Name: At_Shoots__P Parameter: Tissue Value: Shoots vs. Whole Plant
  misc_feature: MA Experiment ID: 20000185 Result: Down-regulated in Transcription
  misc_feature: MA Experiment 20000185 PARAMETER Experiment Name: At_Roots__P Parameter: Age (day) Value: 7 vs. 21
  misc_feature: MA Experiment 20000185 PARAMETER Experiment Name: At_Roots__P Parameter: Organism Value: A. thaliana
  misc_feature: MA Experiment 20000185 PARAMETER Experiment Name: At_Roots__P Parameter: Tissue Value: Roots vs. Whole Plant
  misc_feature: MA Experiment ID: 20000213 Result: Up-regulated in Transcription
  misc_feature: MA Experiment 20000213 PARAMETER Experiment Name: At_4deg_Cold_P Parameter: Timepoint (hr) Value: 2
  misc_feature: MA Experiment ID: 20000436 Result: Down-regulated in Transcription
  misc_feature: MA Experiment 20000436 PARAMETER Experiment Name: At_Drought_P Parameter: Age (day) Value: 7
  misc_feature: MA Experiment 20000436 PARAMETER Experiment Name: At_Drought_P Parameter: Organism Value: A. thaliana
  misc_feature: MA Experiment 20000436 PARAMETER Experiment Name: At_Drought_P Parameter: Plant Line Value: WS
  misc_feature: MA Experiment 20000436 PARAMETER Experiment Name: At_Drought_P Parameter: Timepoint (hr) Value: 12
  misc_feature: MA Experiment 20000436 PARAMETER Experiment Name: At_Drought_P Parameter: Tissue Value: Whole Plant
  misc_feature: MA Experiment 20000436 PARAMETER Experiment Name: At_Drought_P Parameter: Treatment Value: Drought vs. No Drought
  misc_feature: MA Experiment ID: 20000437 Result: Down-regulated in Transcription
  misc_feature: MA Experiment 20000437 PARAMETER Experiment Name: At_Drought_P Parameter: Age (day) Value: 8
  misc_feature: MA Experiment 20000437 PARAMETER Experiment Name: At_Drought_P Parameter: Organism Value: A. thaliana
  misc_feature: MA Experiment 20000437 PARAMETER Experiment Name: At_Drought_P Parameter: Plant Line Value: WS
  misc_feature: MA Experiment 20000437 PARAMETER Experiment Name: At_Drought_P Parameter: Timepoint (hr) Value: 24
  misc_feature: MA Experiment 20000437 PARAMETER Experiment Name: At_Drought_P Parameter: Tissue Value: Whole Plant
  misc_feature: MA Experiment 20000437 PARAMETER Experiment Name: At_Drought_P Parameter: Treatment Value: Drought vs. No Drought
  misc_feature: MA Experiment ID: 20000438 Result: Down-regulated in Transcription
  misc_feature: MA Experiment 20000438 PARAMETER Experiment Name: At_Shoots__P Parameter: Age (day) Value: 14
  misc_feature: MA Experiment 20000438 PARAMETER Experiment Name: At_Shoots__P Parameter: Tissue Value: Shoots vs. Whole Plant
  misc_feature: MA Experiment ID: 20000439 Result: Down-regulated in Transcription
  misc_feature: MA Experiment 20000439 PARAMETER Experiment Name: At_Roots__P Parameter: Age (day) Value: 14 vs. 21
  misc_feature: MA Experiment 20000439 PARAMETER Experiment Name: At_Roots__P Parameter: Organism Value: A. thaliana
  misc_feature: MA Experiment 20000439 PARAMETER Experiment Name: At_Roots__P Parameter: Tissue Value: Roots vs. Whole Plant
  misc_feature: MA Experiment ID: 20000527 Result: Down-regulated in Transcription
  misc_feature: MA Experiment 20000527 PARAMETER Experiment Name: At_10percent_PEG_P Parameter: Age (day) Value: 20
  misc_feature: MA Experiment 20000527 PARAMETER Experiment Name: At_10percent_PEG_P Parameter: Organism Value: A. thaliana
  misc_feature: MA Experiment 20000527 PARAMETER Experiment Name: At_10percent_PEG_P Parameter: Plant Line Value: WS
  misc_feature: MA Experiment 20000527 PARAMETER Experiment Name: At_10percent_PEG_P Parameter: Timepoint (day) Value: 20
  misc_feature: MA Experiment 20000527 PARAMETER Experiment Name: At_10percent_PEG_P Parameter: Tissue Value: Whole Plant
  misc_feature: MA Experiment 20000527 PARAMETER Experiment Name: At_10percent_PEG_P Parameter: Treatment Value: 10percent PEG vs. No Treatment
  misc_feature: MA Experiment ID: 20000573 Result: Up-regulated in Transcription
  misc_feature: MA Experiment 20000573 PARAMETER Experiment Name: At_100uM_ABA_Mutants__P Parameter: Organism Value: A. thaliana
  misc_feature: MA Experiment 20000573 PARAMETER Experiment Name: At_100uM_ABA_Mutants__P Parameter: Plant Line Value: CS22 vs. Ler wt
  misc_feature: MA Experiment 20000573 PARAMETER Experiment Name: At_100uM_ABA_Mutants__P Parameter: Timepoint (hr) Value: N/A
  misc_feature: MA Experiment 20000573 PARAMETER Experiment Name: At_100uM_ABA_Mutants__P Parameter: Tissue Value: Whole Plant
  misc_feature: MA Experiment 20000573 PARAMETER Experiment Name: At_100uM_ABA_Mutants__P Parameter: Treatment Value: None
  misc_feature: MA Experiment ID: 20000574 Result: Up-regulated in Transcription
  misc_feature: MA Experiment 20000574 PARAMETER Experiment Name: At_100uM_ABA_Mutants__P Parameter: Organism Value: A. thaliana
  misc_feature: MA Experiment 20000574 PARAMETER Experiment Name: At_100uM_ABA_Mutants__P Parameter: Plant Line Value: CS23 vs. Ler wt
  misc_feature: MA Experiment 20000574 PARAMETER Experiment Name: At_100uM_ABA_Mutants__P Parameter: Timepoint (hr) Value: N/A
  misc_feature: MA Experiment 20000574 PARAMETER Experiment Name: At_100uM_ABA_Mutants__P Parameter: Tissue Value: Whole Plant
  misc_feature: MA Experiment 20000574 PARAMETER Experiment Name: At_100uM_ABA_Mutants__P Parameter: Treatment Value: None
  misc_feature: MA Experiment ID: 20000576 Result: Down-regulated in Transcription
  misc_feature: MA Experiment 20000576 PARAMETER Experiment Name: At_100uM_ABA_Mutants__P Parameter: Organism Value: A. thaliana
  misc_feature: MA Experiment 20000576 PARAMETER Experiment Name: At_100uM_ABA_Mutants__P Parameter: Plant Line Value: CS23
  misc_feature: MA Experiment 20000576 PARAMETER Experiment Name: At_100uM_ABA_Mutants__P Parameter: Timepoint (hr) Value: 6
  misc_feature: MA Experiment 20000576 PARAMETER Experiment Name: At_100uM_ABA_Mutants__P Parameter: Tissue Value: Whole Plant
  misc_feature: MA Experiment 20000576 PARAMETER Experiment Name: At_100uM_ABA_Mutants__P Parameter: Treatment Value: 1uM ABA vs. No Treatment
  misc_feature: MA Experiment ID: 20000794 Result: Down-regulated in Transcription
  misc_feature: MA Experiment 20000794 PARAMETER Experiment Name: At_Petals_P Parameter: Age (day) Value: 23-25 days
  misc_feature: MA Experiment 20000794 PARAMETER Experiment Name: At_Petals_P Parameter: Plant Line Value: WS
  misc_feature: MA Experiment 20000794 PARAMETER Experiment Name: At_Petals_P Parameter: Tissue Value: Petals vs. Whole plant
  misc_feature: MA Experiment ID: 20001554 Result: Down-regulated in Transcription
  misc_feature: MA Experiment 20001554 PARAMETER Experiment Name: At_Drought_Soil_Dry_P Parameter: Age (day) Value: 21
  misc_feature: MA Experiment 20001554 PARAMETER Experiment Name: At_Drought_Soil_Dry_P Parameter: Organism Value: A. thaliana
  misc_feature: MA Experiment 20001554 PARAMETER Experiment Name: At_Drought_Soil_Dry_P Parameter: Plant Line Value: WS
  misc_feature: MA Experiment 20001554 PARAMETER Experiment Name: At_Drought_Soil_Dry_P Parameter: Post Timepoint (hr) Value: None
  misc_feature: MA Experiment 20001554 PARAMETER Experiment Name: At_Drought_Soil_Dry_P Parameter: Post-Treatment Value: None
  misc_feature: MA Experiment 20001554 PARAMETER Experiment Name: At_Drought_Soil_Dry_P Parameter: Timepoint (day) Value: 7
  misc_feature: MA Experiment 20001554 PARAMETER Experiment Name: At_Drought_Soil_Dry_P Parameter: Treatment Value: Drought vs. No Drought
  misc_feature: MA Experiment ID: 20001555 Result: Down-regulated in Transcription
  misc_feature: MA Experiment 20001555 PARAMETER Experiment Name: At_Drought_Soil_Dry_P Parameter: Age (day) Value: 24
  misc_feature: MA Experiment 20001555 PARAMETER Experiment Name: At_Drought_Soil_Dry_P Parameter: Organism Value: A. thaliana
  misc_feature: MA Experiment 20001555 PARAMETER Experiment Name: At_Drought_Soil_Dry_P Parameter: Plant Line Value: WS
  misc_feature: MA Experiment 20001555 PARAMETER Experiment Name: At_Drought_Soil_Dry_P Parameter: Post Timepoint (hr) Value: None
  misc_feature: MA Experiment 20001555 PARAMETER Experiment Name: At_Drought_Soil_Dry_P Parameter: Post-Treatment Value: None
  misc_feature: MA Experiment 20001555 PARAMETER Experiment Name: At_Drought_Soil_Dry_P Parameter: Timepoint (day) Value: 10
  misc_feature: MA Experiment 20001555 PARAMETER Experiment Name: At_Drought_Soil_Dry_P Parameter: Treatment Value: Drought vs. No Drought
  misc_feature: MA Experiment ID: 20001556 Result: Down-regulated in Transcription
  misc_feature: MA Experiment 20001556 PARAMETER Experiment Name: At_Drought_Soil_Dry_P Parameter: Age (day) Value: 26
  misc_feature: MA Experiment 20001556 PARAMETER Experiment Name: At_Drought_Soil_Dry_P Parameter: Organism Value: A. thaliana
  misc_feature: MA Experiment 20001556 PARAMETER Experiment Name: At_Drought_Soil_Dry_P Parameter: Plant Line Value: WS
  misc_feature: MA Experiment 20001556 PARAMETER Experiment Name: At_Drought_Soil_Dry_P Parameter: Post Timepoint (hr) Value: None
  misc_feature: MA Experiment 20001556 PARAMETER Experiment Name: At_Drought_Soil_Dry_P Parameter: Post-Treatment Value: None
  misc_feature: MA Experiment 20001556 PARAMETER Experiment Name: At_Drought_Soil_Dry_P Parameter: Timepoint (day) Value: 12
  misc_feature: MA Experiment 20001556 PARAMETER Experiment Name: At_Drought_Soil_Dry_P Parameter: Treatment Value: Drought vs. No Drought
  misc_feature: MA Experiment ID: 20001559 Result: Down-regulated in Transcription
  misc_feature: MA Experiment 20001559 PARAMETER Experiment Name: At_Drought_Soil_Dry_P Parameter: Age (day) Value: 28
  misc_feature: MA Experiment 20001559 PARAMETER Experiment Name: At_Drought_Soil_Dry_P Parameter: Organism Value: A. thaliana
  misc_feature: MA Experiment 20001559 PARAMETER Experiment Name: At_Drought_Soil_Dry_P Parameter: Plant Line Value: WS
  misc_feature: MA Experiment 20001559 PARAMETER Experiment Name: At_Drought_Soil_Dry_P Parameter: Post Timepoint (hr) Value: 29
  misc_feature: MA Experiment 20001559 PARAMETER Experiment Name: At_Drought_Soil_Dry_P Parameter: Post-Treatment Value: Re-Water vs. No Drought
  misc_feature: MA Experiment 20001559 PARAMETER Experiment Name: At_Drought_Soil_Dry_P Parameter: Timepoint (day) Value: 14
  misc_feature: MA Experiment 20001559 PARAMETER Experiment Name: At_Drought_Soil_Dry_P Parameter: Treatment Value: Drought vs. No Drought
  misc_feature: MA Experiment ID: 20001560 Result: Down-regulated in Transcription
  misc_feature: MA Experiment 20001560 PARAMETER Experiment Name: At_Drought_Soil_Dry_P Parameter: Age (day) Value: 28
  misc_feature: MA Experiment 20001560 PARAMETER Experiment Name: At_Drought_Soil_Dry_P Parameter: Organism Value: A. thaliana
  misc_feature: MA Experiment 20001560 PARAMETER Experiment Name: At_Drought_Soil_Dry_P Parameter: Plant Line Value: WS
  misc_feature: MA Experiment 20001560 PARAMETER Experiment Name: At_Drought_Soil_Dry_P Parameter: Post Timepoint (hr) Value: None
  misc_feature: MA Experiment 20001560 PARAMETER Experiment Name: At_Drought_Soil_Dry_P Parameter: Post-Treatment Value: None
  misc_feature: MA Experiment 20001560 PARAMETER Experiment Name: At_Drought_Soil_Dry_P Parameter: Timepoint (day) Value: 14
  misc_feature: MA Experiment 20001560 PARAMETER Experiment Name: At_Drought_Soil_Dry_P Parameter: Treatment Value: Drought vs. No Drought
  misc_feature: MA Experiment ID: 20001904 Result: Down-regulated in Transcription
  misc_feature: MA Experiment 20001904 PARAMETER Experiment Name: At_Drought_Reproduction_P Parameter: Age (day) Value: 37
  misc_feature: MA Experiment 20001904 PARAMETER Experiment Name: At_Drought_Reproduction_P Parameter: Organism Value: A. thaliana
  misc_feature: MA Experiment 20001904 PARAMETER Experiment Name: At_Drought_Reproduction_P Parameter: Plant Line Value: WS
  misc_feature: MA Experiment 20001904 PARAMETER Experiment Name: At_Drought_Reproduction_P Parameter: Timepoint (day) Value: 7
  misc_feature: MA Experiment 20001904 PARAMETER Experiment Name: At_Drought_Reproduction_P Parameter: Tissue Value: Rosettes
  misc_feature: MA Experiment 20001904 PARAMETER Experiment Name: At_Drought_Reproduction_P Parameter: Treatment Value: Drought vs. No Drought
  misc_feature: MA Experiment ID: 20001905 Result: Down-regulated in Transcription
  misc_feature: MA Experiment 20001905 PARAMETER Experiment Name: At_Drought_Reproduction_P Parameter: Age (day) Value: 40
  misc_feature: MA Experiment 20001905 PARAMETER Experiment Name: At_Drought_Reproduction_P Parameter: Organism Value: A. thaliana
  misc_feature: MA Experiment 20001905 PARAMETER Experiment Name: At_Drought_Reproduction_P Parameter: Plant Line Value: WS
  misc_feature: MA Experiment 20001905 PARAMETER Experiment Name: At_Drought_Reproduction_P Parameter: Timepoint (day) Value: 10
  misc_feature: MA Experiment 20001905 PARAMETER Experiment Name: At_Drought_Reproduction_P Parameter: Tissue Value: Rosettes
  misc_feature: MA Experiment 20001905 PARAMETER Experiment Name: At_Drought_Reproduction_P Parameter: Treatment Value: Drought vs. No Drought
taaaaacatagcagtctcttctctacttgctccaagccttcaacattttcttctcaaatggcgctctcctctttcaatctctcttctctattattcctcctcttcttcactccttccgttttctcgtattcgtatcaaccttctctaaaccctcatgaaacttctgctacaagtttctgcaaaaacacaccatatccagatgcatgttttacctccttaaaactatccatctccatcaacataagccccaacattctctctttcctcctccaaaccctccaaacagctctttccgaggctgggaaactcaccgatctcctttctggcgctggggtctccaacaacctagttgagggacaacgtggctctcttcaagactgcaaagatcttcaccacatcacttcttctttcttgaaacgatcaatctccaagatccaagacggtgttaacgattcacggaaactagccgacgctagagcgtacctaagcgccgctctcaccaacaagatcacatgcttggaaggtcttgaatcagcctcaggtccactcaagccaaagctcgtgacctccttcacgaccacttacaaacacataagcaactccctctctgctcttccaaaacagagaagaaccacaaatccaaaaaccggcggaaacactaagaaccgccggttacttgggttatttcctgactgggtctataagaaagatcaccggtttttagaagattctagcgacgggtatgatgagtatgacccgagtgagagcctcgtggtcgctgccgatggaacagggaatttttcgactattaacgaggccataagctttgctcctaatatgagtaacgacagggtgctgatatatgtaaaggaaggtgtgtatgacgagaacattgatattccgatctacaagactaatattgttttgataggagatggatccgatgttacatttattaccggaaaccgaagtgtcggagatggatggaccactttccgatctgctactcttgcggtttccggcgaaggattcttggcgagggatataatgataacaaacacagcaggacccgagaagcaccaagcggttgcactacgagtgaacgcggattttgtggccttataccgatgtgtcattgatggttaccaggacacactttacacccactcattccgacaattctaccgtgaatgcgatatttatggaaccattgattatatctttggaaacgcagccgttgtcttccaaggctgtaacatcgtttcaaagttgcctatgccaggacaattcacggtaattactgctcagtcacgagacactcaggacgaagataccgggatctcgatgcaaaactgctccatccttgcgtcggaggatttatttaatagctcaaataaagtgaagagctacttgggacgtccgtggagagaattttcaagaacagttgtaatggaatcttatattgatgagtttattgacggttcgggttggagcaaatggaacggtggggaagcacttgataccctttactatggcgagtataacaataacggtccgggttctgaaacggttaaacgggttaactggccgggttttcacattatgggttacgaagatgcctttaacttcacggcaacagagtttatcactggtgatggttggttgggaagtacttcgttcccttatgataatggaatttaacatttttttttgctagaaatgtatagggtttgtcttcatataaaaatctaattacaataattaataaataaaaatct

SEQ ID NO: 44802 - protein, 547 aa, Arabidopsis thaliana
  peptide (1)..(547): Ceres Seq. ID no. 13646379
  misc_feature (237)..(533): Pfam Name: Pectinesterase Pfam Description: Pectinesterase
  misc_feature (103)..(161): Homolog of NCBI NO: 7447370 NR Description: probable pectinesterase (EC 3.1.1.11) T30B22.15 -
  misc_feature (235)..(547): Homolog of NCBI NO: 7447370 NR Description: probable pectinesterase (EC 3.1.1.11) T30B22.15 -
  misc_feature (33)..(547): Homolog of NCBI NO: 34393863 NR Description: putative pectinesterase [Oryza sativa (japonica
  misc_feature (5)..(225): Homolog of NCBI NO: 6689890 NR Description: pectin methyl esterase [Solanum tuberosum]
  misc_feature (204)..(547): Homolog of NCBI NO: 6689890 NR Description: pectin methyl esterase [Solanum tuberosum]
  misc_feature (8)..(161): Homolog of NCBI NO: 18379010 NR Description: pectinesterase family [Arabidopsis thaliana]
  misc_feature (214)..(547): Homolog of NCBI NO: 18379010 NR Description: pectinesterase family [Arabidopsis thaliana]
  misc_feature (10)..(263): Homolog of NCBI NO: 31321894 NR Description: papillar cell-specific pectin methylesterase-like
  misc_feature (228)..(547): Homolog of NCBI NO: 31321894 NR Description: papillar cell-specific pectin methylesterase-like
  misc_feature (1)..(547): Homolog of NCBI NO: 15225308 NR Description: pectinesterase family [Arabidopsis thaliana]
MALSSFNLSSLLFLLFFTPSVFSYSYQPSLNPHETSATSFCKNTPYPDACFTSLKLSISINISPNILSFLLQTLQTALSEAGKLTDLLSGAGVSNNLVEGQRGSLQDCKDLHHITSSFLKRSISKIQDGVNDSRKLADARAYLSAALTNKITCLEGLESASGPLKPKLVTSFTTTYKHISNSLSALPKQRRTTNPKTGGNTKNRRLLGLFPDWVYKKDHRFLEDSSDGYDEYDPSESLVVAADGTGNFSTINEAISFAPNMSNDRVLIYVKEGVYDENIDIPIYKTNIVLIGDGSDVTFITGNRSVGDGWTTFRSATLAVSGEGFLARDIMITNTAGPEKHQAVALRVNADFVALYRCVIDGYQDTLYTHSFRQFYRECDIYGTIDYIFGNAAVVFQGCNIVSKLPMPGQFTVITAQSRDTQDEDTGISMQNCSILASEDLFNSSNKVKSYLGRPWREFSRTVVMESYIDEFIDGSGWSKWNGGEALDTLYYGEYNNNGPGSETVKRVNWPGFHIMGYEDAFNFTATEFITGDGWLGSTSFPYDNGI

SEQ ID NO: 44803 - protein, 287 aa, Arabidopsis thaliana
  peptide (1)..(287): Ceres Seq. ID no. 13646380
  misc_feature (1)..(273): Pfam Name: Pectinesterase Pfam Description: Pectinesterase
  misc_feature (1)..(287): Homolog of NCBI NO: 29539387 NR Description: pectin methylesterase [Pisum sativum]
  misc_feature (1)..(283): Homolog of NCBI NO: 14334992 NR Description: At1g11580/T23J18_33 [Arabidopsis thaliana]
  misc_feature (1)..(283): Homolog of NCBI NO: 15220424 NR Description: pectin methylesterase, putative [Arabidopsis
  misc_feature (1)..(287): Homolog of NCBI NO: 18407388 NR Description: pectinesterase family [Arabidopsis thaliana]
  misc_feature (1)..(287): Homolog of NCBI NO: 7447370 NR Description: probable pectinesterase (EC 3.1.1.11) T30B22.15 -
  misc_feature (1)..(287): Homolog of NCBI NO: 34393863 NR Description: putative pectinesterase [Oryza sativa (japonica
  misc_feature (1)..(287): Homolog of NCBI NO: 6689890 NR Description: pectin methyl esterase [Solanum tuberosum]
  misc_feature (1)..(287): Homolog of NCBI NO: 18379010 NR Description: pectinesterase family [Arabidopsis thaliana]
  misc_feature (1)..(287): Homolog of NCBI NO: 31321894 NR Description: papillar cell-specific pectin methylesterase-like
  misc_feature (1)..(287): Homolog of NCBI NO: 15225308 NR Description: pectinesterase family [Arabidopsis thaliana]
MSNDRVLIYVKEGVYDENIDIPIYKTNIVLIGDGSDVTFITGNRSVGDGWTTFRSATLAVSGEGFLARDIMITNTAGPEKHQAVALRVNADFVALYRCVIDGYQDTLYTHSFRQFYRECDIYGTIDYIFGNAAVVFQGCNIVSKLPMPGQFTVITAQSRDTQDEDTGISMQNCSILASEDLFNSSNKVKSYLGRPWREFSRTVVMESYIDEFIDGSGWSKWNGGEALDTLYYGEYNNNGPGSETVKRVNWPGFHIMGYEDAFNFTATEFITGDGWLGSTSFPYDNGI

SEQ ID NO: 44804 - DNA, 2256 bp, Arabidopsis thaliana; identical to SEQ ID NO: 22038
  misc_feature (1)..(2256): Ceres Seq. ID no. 13646318
  misc_feature: MA Experiment ID: 108434 Result: Up-regulated in Transcription
  misc_feature: MA Experiment 108434 PARAMETER Experiment Name: At_Root_Tips_cDNA_P Parameter: Tissue Value: Root Tips
  misc_feature: MA Experiment ID: 108462 Result: Down-regulated in Transcription
  misc_feature: MA Experiment 108462 PARAMETER Experiment Name: At_Germinating_Seeds_cDNA_P Parameter: Age (day) Value: 2 vs. 0
  misc_feature: MA Experiment 108462 PARAMETER Experiment Name: At_Germinating_Seeds_cDNA_P Parameter: Tissue Value: Germinating Seeds
  misc_feature: MA Experiment ID: 108463 Result: Down-regulated in Transcription
  misc_feature: MA Experiment 108463 PARAMETER Experiment Name: At_Germinating_Seeds_cDNA_P Parameter: Age (day) Value: 3 vs. 0
  misc_feature: MA Experiment 108463 PARAMETER Experiment Name: At_Germinating_Seeds_cDNA_P Parameter: Tissue Value: Germinating Seeds
  misc_feature: MA Experiment ID: 108464 Result: Down-regulated in Transcription
  misc_feature: MA Experiment 108464 PARAMETER Experiment Name: At_Germinating_Seeds_cDNA_P Parameter: Age (day) Value: 4 vs. 0
  misc_feature: MA Experiment 108464 PARAMETER Experiment Name: At_Germinating_Seeds_cDNA_P Parameter: Tissue Value: Germinating Seeds
  misc_feature: MA Experiment ID: 108501 Result: Up-regulated in Transcription
  misc_feature: MA Experiment 108501 PARAMETER Experiment Name: At_ap2_floral_buds_cDNA_P Parameter: Plant Line Value: ap2 (Ler.)
  misc_feature: MA Experiment 108501 PARAMETER Experiment Name: At_ap2_floral_buds_cDNA_P Parameter: Tissue Value: Closed Flower
  misc_feature: MA Experiment ID: 108573 Result: Up-regulated in Transcription
  misc_feature: MA Experiment 108573 PARAMETER Experiment Name: At_Drought_cDNA_P Parameter: Timepoint (hr) Value: 6
  misc_feature: MA Experiment 108573 PARAMETER Experiment Name: At_Drought_cDNA_P Parameter: Tissue Value: Aerial
  misc_feature: MA Experiment 108573 PARAMETER Experiment Name: At_Drought_cDNA_P Parameter: Treatment Value: Drought vs. No Drought
  misc_feature: MA Experiment ID: 108576 Result: Up-regulated in Transcription
  misc_feature: MA Experiment 108576 PARAMETER Experiment Name: At_42deg_Heat_cDNA_P Parameter: Temperature (deg C) Value: 42 vs. 22
  misc_feature: MA Experiment 108576 PARAMETER Experiment Name: At_42deg_Heat_cDNA_P Parameter: Timepoint (hr) Value: 1
  misc_feature: MA Experiment 108576 PARAMETER Experiment Name: At_42deg_Heat_cDNA_P Parameter: Tissue Value: Aerial
  misc_feature: MA Experiment ID: 108577 Result: Up-regulated in Transcription
  misc_feature: MA Experiment 108577 PARAMETER Experiment Name: At_42deg_Heat_cDNA_P Parameter: Temperature (deg C) Value: 42 vs. 22
  misc_feature: MA Experiment 108577 PARAMETER Experiment Name: At_42deg_Heat_cDNA_P Parameter: Timepoint (hr) Value: 6
  misc_feature: MA Experiment 108577 PARAMETER Experiment Name: At_42deg_Heat_cDNA_P Parameter: Tissue Value: Aerial
  misc_feature: MA Experiment ID: 108585 Result: Up-regulated in Transcription
  misc_feature: MA Experiment 108585 PARAMETER Experiment Name: At_5mM_NaNP_cDNA_P Parameter: Timepoint (hr) Value: 6
  misc_feature: MA Experiment 108585 PARAMETER Experiment Name: At_5mM_NaNP_cDNA_P Parameter: Tissue Value: Aerial
  misc_feature: MA Experiment 108585 PARAMETER Experiment Name: At_5mM_NaNP_cDNA_P Parameter: Treatment Value: null
  misc_feature: MA Experiment ID: 108595 Result: Down-regulated in Transcription
  misc_feature: MA Experiment 108595 PARAMETER Experiment Name: At_Ler-pi_Ovule_cDNA_P Parameter: Plant Line Value: null
  misc_feature: MA Experiment ID: 20000069 Result: Down-regulated in Transcription
  misc_feature: MA Experiment 20000069 PARAMETER Experiment Name: At_100uM_ABA_Mutants_cDNA_P Parameter: Plant Line Value: CS23
  misc_feature: MA Experiment 20000069 PARAMETER Experiment Name: At_100uM_ABA_Mutants_cDNA_P Parameter: Timepoint (hr) Value: 6
  misc_feature: MA Experiment 20000069 PARAMETER Experiment Name: At_100uM_ABA_Mutants_cDNA_P Parameter: Tissue Value: Aerial
  misc_feature: MA Experiment 20000069 PARAMETER Experiment Name: At_100uM_ABA_Mutants_cDNA_P Parameter: Treatment Value: 100uM ABA vs. No Treatment
  misc_feature: MA Experiment ID: 20000087 Result: Down-regulated in Transcription
  misc_feature: MA Experiment 20000087 PARAMETER Experiment Name: At_100uM_ABA_Mutants_cDNA_P Parameter: Plant Line Value: WS
  misc_feature: MA Experiment 20000087 PARAMETER Experiment Name: At_100uM_ABA_Mutants_cDNA_P Parameter: Timepoint (hr) Value: 6
  misc_feature: MA Experiment 20000087 PARAMETER Experiment Name: At_100uM_ABA_Mutants_cDNA_P Parameter: Tissue Value: Aerial
  misc_feature: MA Experiment 20000087 PARAMETER Experiment Name: At_100uM_ABA_Mutants_cDNA_P Parameter: Treatment Value: 100uM ABA vs. No Treatment
  misc_feature: MA Experiment ID: 20000111 Result: Up-regulated in Transcription
  misc_feature: MA Experiment 20000111 PARAMETER Experiment Name: At_42deg_Heat_cDNA_P Parameter: Temperature (deg C) Value: 42 vs. 22
  misc_feature: MA Experiment 20000111 PARAMETER Experiment Name: At_42deg_Heat_cDNA_P Parameter: Timepoint (hr) Value: 6
  misc_feature: MA Experiment 20000111 PARAMETER Experiment Name: At_42deg_Heat_cDNA_P Parameter: Tissue Value: Aerial
  misc_feature: MA Experiment ID: 20000112 Result: Up-regulated in Transcription
  misc_feature: MA Experiment 20000112 PARAMETER Experiment Name: At_42deg_Heat_cDNA_P Parameter: Temperature (deg C) Value: 42 vs. 22
  misc_feature: MA Experiment 20000112 PARAMETER Experiment Name: At_42deg_Heat_cDNA_P Parameter: Timepoint (hr) Value: 2
  misc_feature: MA Experiment 20000112 PARAMETER Experiment Name: At_42deg_Heat_cDNA_P Parameter: Tissue Value: Aerial
  misc_feature: MA Experiment ID: 20000113 Result: Up-regulated in Transcription
  misc_feature: MA Experiment 20000113 PARAMETER Experiment Name: At_42deg_Heat_cDNA_P Parameter: Temperature (deg C) Value: 42 vs. 22
  misc_feature: MA Experiment 20000113 PARAMETER Experiment Name: At_42deg_Heat_cDNA_P Parameter: Timepoint (hr) Value: 8
  misc_feature: MA Experiment 20000113 PARAMETER Experiment Name: At_42deg_Heat_cDNA_P Parameter: Tissue Value: Aerial
  misc_feature: MA Experiment ID: 20000144 Result: Up-regulated in Transcription
  misc_feature: MA Experiment 20000144 PARAMETER Experiment Name: At_42deg_Heat_cDNA_P Parameter: Temperature (deg C) Value: 42 vs. 22
  misc_feature: MA Experiment 20000144 PARAMETER Experiment Name: At_42deg_Heat_cDNA_P Parameter: Timepoint (hr) Value: 1
  misc_feature: MA Experiment 20000144 PARAMETER Experiment Name: At_42deg_Heat_cDNA_P Parameter: Tissue Value: Aerial
  misc_feature: MA Experiment ID: 20000314 Result: Down-regulated in Transcription
  misc_feature: MA Experiment 20000314 PARAMETER Experiment Name: At_14day_Shoots-Roots_Sub_P Parameter: Age (day) Value: 14
  misc_feature: MA Experiment 20000314 PARAMETER Experiment Name: At_14day_Shoots-Roots_Sub_P Parameter: Organism Value: A. thaliana
  misc_feature: MA Experiment 20000314 PARAMETER Experiment Name: At_14day_Shoots-Roots_Sub_P Parameter: Plant Line Value: WS
  misc_feature: MA Experiment 20000314 PARAMETER Experiment Name: At_14day_Shoots-Roots_Sub_P Parameter: Tissue Value: Roots vs. Whole Plant
  misc_feature: MA Experiment ID: 20000327 Result: Up-regulated in Transcription
  misc_feature: MA Experiment 20000327 PARAMETER Experiment Name: At_42deg_Heat_Sub_P Parameter: Age (day) Value: 14
  misc_feature: MA Experiment 20000327 PARAMETER Experiment Name: At_42deg_Heat_Sub_P Parameter: Organism Value: A. thaliana
  misc_feature: MA Experiment 20000327 PARAMETER Experiment Name: At_42deg_Heat_Sub_P Parameter: Plant Line Value: WS
  misc_feature: MA Experiment 20000327 PARAMETER Experiment Name: At_42deg_Heat_Sub_P Parameter: Temperature (deg C) Value: 42 vs. 22
  misc_feature: MA Experiment 20000327 PARAMETER Experiment Name: At_42deg_Heat_Sub_P Parameter: Timepoint (hr) Value: 1
  misc_feature: MA Experiment 20000327 PARAMETER Experiment Name: At_42deg_Heat_Sub_P Parameter: Tissue Value: Aerial
  misc_feature: MA Experiment ID: 20000328 Result: Up-regulated in Transcription
  misc_feature: MA Experiment 20000328 PARAMETER Experiment Name: At_42deg_Heat_Sub_P Parameter: Age (day) Value: 14
  misc_feature: MA Experiment 20000328 PARAMETER Experiment Name: At_42deg_Heat_Sub_P Parameter: Organism Value: A. thaliana
  misc_feature: MA Experiment 20000328 PARAMETER Experiment Name: At_42deg_Heat_Sub_P Parameter: Plant Line Value: WS
  misc_feature: MA Experiment 20000328 PARAMETER Experiment Name: At_42deg_Heat_Sub_P Parameter: Temperature (deg C) Value: 42 vs. 22
  misc_feature: MA Experiment 20000328 PARAMETER Experiment Name: At_42deg_Heat_Sub_P Parameter: Timepoint (hr) Value: 6
  misc_feature: MA Experiment 20000328 PARAMETER Experiment Name: At_42deg_Heat_Sub_P Parameter: Tissue Value: Aerial
  misc_feature: MA Experiment ID: 20000355 Result: Down-regulated in Transcription
  misc_feature: MA Experiment 20000355 PARAMETER Experiment Name: At_Siliques_Sub_P Parameter: Age (day) Value: 21
  misc_feature: MA Experiment 20000355 PARAMETER Experiment Name: At_Siliques_Sub_P Parameter: Organism Value: A. thaliana
  misc_feature: MA Experiment 20000355 PARAMETER Experiment Name: At_Siliques_Sub_P Parameter: Plant Line Value: WS
  misc_feature: MA Experiment 20000355 PARAMETER Experiment Name: At_Siliques_Sub_P Parameter: Tissue Value: Less Than 5mm Siliques vs. Whole Plant
  misc_feature: MA Experiment ID: 20001807 Result: Up-regulated in Transcription
  misc_feature: MA Experiment 20001807 PARAMETER Experiment Name: At_50mM_NH4NO3_L-to-H_Sub_P Parameter: Timepoint (hr) Value: 6
  misc_feature: MA Experiment 20001807 PARAMETER Experiment Name: At_50mM_NH4NO3_L-to-H_Sub_P Parameter: Tissue Value: Leaf
  misc_feature: MA Experiment 20001807 PARAMETER Experiment Name: At_50mM_NH4NO3_L-to-H_Sub_P Parameter: Treatment Value: 50mM NH4NO3 vs 100mM Mannitol

SEQ ID NO: 44805 - protein, 651 aa, Arabidopsis thaliana; identical to SEQ ID NO: 22039
  peptide (1)..(651): Ceres Seq. ID no. 13646319
  misc_feature (124)..(646): Homolog of NCBI NO: 4164594 NR Description: heat shock protein 70 [Paracoccidioides
  misc_feature (1)..(635): Homolog of NCBI NO: 23480384 NR Description: heat shock protein [Plasmodium yoelii yoelii]
  misc_feature (3)..(635): Homolog of NCBI NO: 29539338 NR Description: Heat shock 70 kDa protein [Cyanidioschyzon
  misc_feature (1)..(626): Homolog of NCBI NO: 481576 NR Description: dnaK-type molecular chaperone GRP78/BiP -
  misc_feature (3)..(635): Homolog of NCBI NO: 1037176 NR Description: immunoglobulin heavy chain binding protein
  misc_feature (1)..(635): Homolog of NCBI NO: 6016151 NR Description: Luminal binding protein 3 precursor (BiP3)
  misc_feature (8)..(651): Homolog of NCBI NO: 14423732 NR Description: Heat shock 70 kDa protein
  misc_feature (6)..(626): Homolog of NCBI NO: 21263753 NR Description: Heat shock cognate 71 kDa protein (Hsc70.1)
  misc_feature (124)..(646): Homolog of NCBI NO: 4164594 NR Description: heat shock protein 70 [Paracoccidioides
  misc_feature (1)..(635): Homolog of NCBI NO: 23480384 NR Description: heat shock protein [Plasmodium yoelii yoelii]
  misc_feature (3)..(635): Homolog of NCBI NO: 29539338 NR Description: Heat shock 70 kDa protein [Cyanidioschyzon
  misc_feature (1)..(626): Homolog of NCBI NO: 481576 NR Description: dnaK-type molecular chaperone GRP78/BiP -
  misc_feature (3)..(635): Homolog of NCBI NO: 1037176 NR Description: immunoglobulin heavy chain binding protein
  misc_feature (1)..(635): Homolog of NCBI NO: 6016151 NR Description: Luminal binding protein 3 precursor (BiP3)
  misc_feature (8)..(651): Homolog of NCBI NO: 14423732 NR Description: Heat shock 70 kDa protein
  misc_feature (6)..(626): Homolog of NCBI NO: 21263753 NR Description: Heat shock cognate 71 kDa protein (Hsc70.1)
  misc_feature (124)..(646): Homolog of NCBI NO: 4164594 NR Description: heat shock protein 70 [Paracoccidioides
  misc_feature (1)..(635): Homolog of NCBI NO: 23480384 NR Description: heat shock protein [Plasmodium yoelii yoelii]
  misc_feature (3)..(635): Homolog of NCBI NO: 29539338 NR Description: Heat shock 70 kDa protein [Cyanidioschyzon
  misc_feature (1)..(626): Homolog of NCBI NO: 481576 NR Description: dnaK-type molecular chaperone GRP78/BiP -
  misc_feature (3)..(635): Homolog of NCBI NO: 1037176 NR Description: immunoglobulin heavy chain binding protein
  misc_feature (1)..(635): Homolog of NCBI NO: 6016151 NR Description: Luminal binding protein 3 precursor (BiP3)
  misc_feature (8)..(651): Homolog of NCBI NO: 14423732 NR Description: Heat shock 70 kDa protein
  misc_feature (6)..(626): Homolog of NCBI NO: 21263753 NR Description: Heat shock cognate 71 kDa protein (Hsc70.1)
  misc_feature (124)..(646): Homolog of NCBI NO: 4164594 NR Description: heat shock protein 70 [Paracoccidioides
  misc_feature (1)..(635): Homolog of NCBI NO: 23480384 NR Description: heat shock protein [Plasmodium yoelii yoelii]
  misc_feature (3)..(635): Homolog of NCBI NO: 29539338 NR Description: Heat shock 70 kDa protein [Cyanidioschyzon
  misc_feature (1)..(626): Homolog of NCBI NO: 481576 NR Description: dnaK-type molecular chaperone GRP78/BiP -
  misc_feature (3)..(635): Homolog of NCBI NO: 1037176 NR Description: immunoglobulin heavy chain binding protein
  misc_feature (1)..(635): Homolog of NCBI NO: 6016151 NR Description: Luminal binding protein 3 precursor (BiP3)
  misc_feature (8)..(651): Homolog of NCBI NO: 14423732 NR Description: Heat shock 70 kDa protein
  misc_feature (6)..(626): Homolog of NCBI NO: 21263753 NR Description: Heat shock cognate 71 kDa protein (Hsc70.1)
  misc_feature (124)..(646): Homolog of NCBI NO: 4164594 NR Description: heat shock protein 70 [Paracoccidioides
  misc_feature (1)..(635): Homolog of NCBI NO: 23480384 NR Description: heat shock protein [Plasmodium yoelii yoelii]
  misc_feature (3)..(635): Homolog of NCBI NO: 29539338 NR Description: Heat shock 70 kDa protein [Cyanidioschyzon
  misc_feature (1)..(626): Homolog of NCBI NO: 481576 NR Description: dnaK-type molecular chaperone GRP78/BiP -
  misc_feature (3)..(635): Homolog of NCBI NO: 1037176 NR Description: immunoglobulin heavy chain binding protein
  misc_feature (1)..(635): Homolog of NCBI NO: 6016151 NR Description: Luminal binding protein 3 precursor (BiP3)
  misc_feature (8)..(651): Homolog of NCBI NO: 14423732 NR Description: Heat shock 70 kDa protein
  misc_feature (6)..(626): Homolog of NCBI NO: 21263753 NR Description: Heat shock cognate 71 kDa protein (Hsc70.1)
  misc_feature (124)..(646): Homolog of NCBI NO: 4164594 NR Description: heat shock protein 70 [Paracoccidioides
  misc_feature (1)..(635): Homolog of NCBI NO: 23480384 NR Description: heat shock protein [Plasmodium yoelii yoelii]
  misc_feature (3)..(635): Homolog of NCBI NO: 29539338 NR Description: Heat shock 70 kDa protein [Cyanidioschyzon
  misc_feature (1)..(626): Homolog of NCBI NO: 481576 NR Description: dnaK-type molecular chaperone GRP78/BiP -
  misc_feature (3)..(635): Homolog of NCBI NO: 1037176 NR Description: immunoglobulin heavy chain binding protein
  misc_feature (1)..(635): Homolog of NCBI NO: 6016151 NR Description: Luminal binding protein 3 precursor (BiP3)
  misc_feature (8)..(651): Homolog of NCBI NO: 14423732 NR Description: Heat shock 70 kDa protein
  misc_feature (6)..(626): Homolog of NCBI NO: 21263753 NR Description: Heat shock cognate 71 kDa protein (Hsc70.1)
  misc_feature (124)..(646): Homolog of NCBI NO: 4164594 NR Description: heat shock protein 70 [Paracoccidioides
  misc_feature (1)..(635): Homolog of NCBI NO: 23480384 NR Description: heat shock protein [Plasmodium yoelii yoelii]
  misc_feature (3)..(635): Homolog of NCBI NO: 29539338 NR Description: Heat shock 70 kDa protein [Cyanidioschyzon
  misc_feature (1)..(626): Homolog of NCBI NO: 481576 NR Description: dnaK-type molecular chaperone GRP78/BiP -
  misc_feature (3)..(635): Homolog of NCBI NO: 1037176 NR Description: immunoglobulin heavy chain binding protein
  misc_feature (1)..(635): Homolog of NCBI NO: 6016151 NR Description: Luminal binding protein 3 precursor (BiP3)
  misc_feature (8)..(651): Homolog of NCBI NO: 14423732 NR Description: Heat shock 70 kDa protein
  misc_feature (6)..(626): Homolog of NCBI NO: 21263753 NR Description: Heat shock cognate 71 kDa protein (Hsc70.1)

SEQ ID NO: 44806 - protein, 588 aa, Arabidopsis thaliana; identical to SEQ ID NO: 22040
  peptide (1)..(588): Ceres Seq. ID no. 13646320
  misc_feature (61)..(583): Homolog of NCBI NO: 4164594 NR Description: heat shock protein 70 [Paracoccidioides
  misc_feature (1)..(572): Homolog of NCBI NO: 23480384 NR Description: heat shock protein [Plasmodium yoelii yoelii]
  misc_feature (1)..(572): Homolog of NCBI NO: 29539338 NR Description: Heat shock 70 kDa protein [Cyanidioschyzon
  misc_feature (1)..(563): Homolog of NCBI NO: 481576 NR Description: dnaK-type molecular chaperone GRP78/BiP -
  misc_feature (1)..(572): Homolog of NCBI NO: 1037176 NR Description: immunoglobulin heavy chain binding protein
  misc_feature (1)..(572): Homolog of NCBI NO: 6016151 NR Description: Luminal binding protein 3 precursor (BiP3)
  misc_feature (1)..(588): Homolog of NCBI NO: 14423732 NR Description: Heat shock 70 kDa protein
  misc_feature (1)..(563): Homolog of NCBI NO: 21263753 NR Description: Heat shock cognate 71 kDa protein (Hsc70.1)
  misc_feature (61)..(583): Homolog of NCBI NO: 4164594 NR Description: heat shock protein 70 [Paracoccidioides
  misc_feature (1)..(572): Homolog of NCBI NO: 23480384 NR Description: heat shock protein [Plasmodium yoelii yoelii]
  misc_feature (1)..(572): Homolog of NCBI NO: 29539338 NR Description: Heat shock 70 kDa protein [Cyanidioschyzon
  misc_feature (1)..(563): Homolog of NCBI NO: 481576 NR Description: dnaK-type molecular chaperone GRP78/BiP -
  misc_feature (1)..(572): Homolog of NCBI NO: 1037176 NR Description: immunoglobulin heavy chain binding protein
  misc_feature (1)..(572): Homolog of NCBI NO: 6016151 NR Description: Luminal binding protein 3 precursor (BiP3)
  misc_feature (1)..(588): Homolog of NCBI NO: 14423732 NR Description: Heat shock 70 kDa protein
  misc_feature (1)..(563): Homolog of NCBI NO: 21263753 NR Description: Heat shock cognate 71 kDa protein (Hsc70.1)
  misc_feature (61)..(583): Homolog of NCBI NO: 4164594 NR Description: heat shock protein 70 [Paracoccidioides
  misc_feature (1)..(572): Homolog of NCBI NO: 23480384 NR Description: heat shock protein [Plasmodium yoelii yoelii]
  misc_feature (1)..(572): Homolog of NCBI NO: 29539338 NR Description: Heat shock 70 kDa protein [Cyanidioschyzon
  misc_feature (1)..(563): Homolog of NCBI NO: 481576 NR Description: dnaK-type molecular chaperone GRP78/BiP -
  misc_feature (1)..(572): Homolog of NCBI NO: 1037176 NR Description: immunoglobulin heavy chain binding protein
  misc_feature (1)..(572): Homolog of NCBI NO: 6016151 NR Description: Luminal binding protein 3 precursor (BiP3)
  misc_feature (1)..(588): Homolog of NCBI NO: 14423732 NR Description: Heat shock 70 kDa protein
  misc_feature (1)..(563): Homolog of NCBI NO: 21263753 NR Description: Heat shock cognate 71 kDa protein (Hsc70.1)
  misc_feature (61)..(583): Homolog of NCBI NO: 4164594 NR Description: heat shock protein 70 [Paracoccidioides
  misc_feature (1)..(572): Homolog of NCBI NO: 23480384 NR Description: heat shock protein [Plasmodium yoelii yoelii]
  misc_feature (1)..(572): Homolog of NCBI NO: 29539338 NR Description: Heat shock 70 kDa protein [Cyanidioschyzon
  misc_feature (1)..(563): Homolog of NCBI NO: 481576 NR Description: dnaK-type molecular chaperone GRP78/BiP -
  misc_feature (1)..(572): Homolog of NCBI NO: 1037176 NR Description: immunoglobulin heavy chain binding protein
  misc_feature (1)..(572): Homolog of NCBI NO: 6016151 NR Description: Luminal binding protein 3 precursor (BiP3)
  misc_feature (1)..(588): Homolog of NCBI NO: 14423732 NR Description: Heat shock 70 kDa protein
  misc_feature (1)..(563): Homolog of NCBI NO: 21263753 NR Description: Heat shock cognate 71 kDa protein (Hsc70.1)
  misc_feature (61)..(583): Homolog of NCBI NO: 4164594 NR Description: heat shock protein 70 [Paracoccidioides
  misc_feature (1)..(572): Homolog of NCBI NO: 23480384 NR Description: heat shock protein [Plasmodium yoelii yoelii]
  misc_feature (1)..(572): Homolog of NCBI NO: 29539338 NR Description: Heat shock 70 kDa protein [Cyanidioschyzon
  misc_feature (1)..(563): Homolog of NCBI NO: 481576 NR Description: dnaK-type molecular chaperone GRP78/BiP -
  misc_feature (1)..(572): Homolog of NCBI NO: 1037176 NR Description: immunoglobulin heavy chain binding protein
  misc_feature (1)..(572): Homolog of NCBI NO: 6016151 NR Description: Luminal binding protein 3 precursor (BiP3)
  misc_feature (1)..(588): Homolog of NCBI NO: 14423732 NR Description: Heat shock 70 kDa protein
  misc_feature (1)..(563): Homolog of NCBI NO: 21263753 NR Description: Heat shock cognate 71 kDa protein (Hsc70.1)
  misc_feature (61)..(583): Homolog of NCBI NO: 4164594 NR Description: heat shock protein 70 [Paracoccidioides
  misc_feature (1)..(572): Homolog of NCBI NO: 23480384 NR Description: heat shock protein [Plasmodium yoelii yoelii]
  misc_feature (1)..(572): Homolog of NCBI NO: 29539338 NR Description: Heat shock 70 kDa protein [Cyanidioschyzon
  misc_feature (1)..(563): Homolog of NCBI NO: 481576 NR Description: dnaK-type molecular chaperone GRP78/BiP -
  misc_feature (1)..(572): Homolog of NCBI NO: 1037176 NR Description: immunoglobulin heavy chain binding protein
  misc_feature (1)..(572): Homolog of NCBI NO: 6016151 NR Description: Luminal binding protein 3 precursor (BiP3)
  misc_feature (1)..(588): Homolog of NCBI NO: 14423732 NR Description: Heat shock 70 kDa protein
  misc_feature (1)..(563): Homolog of NCBI NO: 21263753 NR Description: Heat shock cognate 71 kDa protein (Hsc70.1)
  misc_feature (61)..(583): Homolog of NCBI NO: 4164594 NR Description: heat shock protein 70 [Paracoccidioides
  misc_feature (1)..(572): Homolog of NCBI NO: 23480384 NR Description: heat shock protein [Plasmodium yoelii yoelii]
  misc_feature (1)..(572): Homolog of NCBI NO: 29539338 NR Description: Heat shock 70 kDa protein [Cyanidioschyzon
  misc_feature (1)..(563): Homolog of NCBI NO: 481576 NR Description: dnaK-type molecular chaperone GRP78/BiP -
  misc_feature (1)..(572): Homolog of NCBI NO: 1037176 NR Description: immunoglobulin heavy chain binding protein
  misc_feature (1)..(572): Homolog of NCBI NO: 6016151 NR Description: Luminal binding protein 3 precursor (BiP3)
  misc_feature (1)..(588): Homolog of NCBI NO: 14423732 NR Description: Heat shock 70 kDa protein
  misc_feature (1)..(563): Homolog of NCBI NO: 21263753 NR Description: Heat shock cognate 71 kDa protein (Hsc70.1)

SEQ ID NO: 44807 - protein, 562 aa, Arabidopsis thaliana; identical to SEQ ID NO: 22041
  peptide (1)..(562): Ceres Seq. ID no. 13646321
  misc_feature (35)..(557): Homolog of NCBI NO: 4164594 NR Description: heat shock protein 70 [Paracoccidioides
  misc_feature (1)..(546): Homolog of NCBI NO: 23480384 NR Description: heat shock protein [Plasmodium yoelii yoelii]
  misc_feature (1)..(546): Homolog of NCBI NO: 29539338 NR Description: Heat shock 70 kDa protein [Cyanidioschyzon
  misc_feature (1)..(537): Homolog of NCBI NO: 481576 NR Description: dnaK-type molecular chaperone GRP78/BiP -
  misc_feature (1)..(546): Homolog of NCBI NO: 1037176 NR Description: immunoglobulin heavy chain binding protein
  misc_feature (1)..(546): Homolog of NCBI NO: 6016151 NR Description: Luminal binding protein 3 precursor (BiP3)
  misc_feature (1)..(562): Homolog of NCBI NO: 14423732 NR Description: Heat shock 70 kDa protein
  misc_feature (1)..(537): Homolog of NCBI NO: 21263753 NR Description: Heat shock cognate 71 kDa protein (Hsc70.1)
  misc_feature (35)..(557): Homolog of NCBI NO: 4164594 NR Description: heat shock protein 70 [Paracoccidioides
  misc_feature (1)..(546): Homolog of NCBI NO: 23480384 NR Description: heat shock protein [Plasmodium yoelii yoelii]
  misc_feature (1)..(546): Homolog of NCBI NO: 29539338 NR Description: Heat shock 70 kDa protein [Cyanidioschyzon
  misc_feature (1)..(537): Homolog of NCBI NO: 481576 NR Description: dnaK-type molecular chaperone GRP78/BiP -
  misc_feature (1)..(546): Homolog of NCBI NO: 1037176 NR Description: immunoglobulin heavy chain binding protein
  misc_feature (1)..(546): Homolog of NCBI NO: 6016151 NR Description: Luminal binding protein 3 precursor (BiP3)
  misc_feature (1)..(562): Homolog of NCBI NO: 14423732 NR Description: Heat shock 70 kDa protein
  misc_feature (1)..(537): Homolog of NCBI NO: 21263753 NR Description: Heat shock cognate 71 kDa protein (Hsc70.1)
  misc_feature (35)..(557): Homolog of NCBI NO: 4164594 NR Description: heat shock protein 70 [Paracoccidioides
  misc_feature (1)..(546): Homolog of NCBI NO: 23480384 NR Description: heat shock protein [Plasmodium yoelii yoelii]
  misc_feature (1)..(546): Homolog of NCBI NO: 29539338 NR Description: Heat shock 70 kDa protein [Cyanidioschyzon
  misc_feature (1)..(537): Homolog of NCBI NO: 481576 NR Description: dnaK-type molecular chaperone GRP78/BiP -
  misc_feature (1)..(546): Homolog of NCBI NO: 1037176 NR Description: immunoglobulin heavy chain binding protein
  misc_feature (1)..(546): Homolog of NCBI NO: 6016151 NR Description: Luminal binding protein 3 precursor (BiP3)
  misc_feature (1)..(562): Homolog of NCBI NO: 14423732 NR Description: Heat shock 70 kDa protein
  misc_feature (1)..(537): Homolog of NCBI NO: 21263753 NR Description: Heat shock cognate 71 kDa protein (Hsc70.1)
  misc_feature (35)..(557): Homolog of NCBI NO: 4164594 NR Description: heat shock protein 70 [Paracoccidioides
  misc_feature (1)..(546): Homolog of NCBI NO: 23480384 NR Description: heat shock protein [Plasmodium yoelii yoelii]
  misc_feature (1)..(546): Homolog of NCBI NO: 29539338 NR Description: Heat shock 70 kDa protein [Cyanidioschyzon
  misc_feature (1)..(537): Homolog of NCBI NO: 481576 NR Description: dnaK-type molecular chaperone GRP78/BiP -
  misc_feature (1)..(546): Homolog of NCBI NO: 1037176 NR Description: immunoglobulin heavy chain binding protein
  misc_feature (1)..(546): Homolog of NCBI NO: 6016151 NR Description: Luminal binding protein 3 precursor (BiP3)
  misc_feature (1)..(562): Homolog of NCBI NO: 14423732 NR Description: Heat shock 70 kDa protein
  misc_feature (1)..(537): Homolog of NCBI NO: 21263753 NR Description: Heat shock cognate 71 kDa protein (Hsc70.1)
  misc_feature (35)..(557): Homolog of NCBI NO: 4164594 NR Description: heat shock protein 70 [Paracoccidioides
  misc_feature (1)..(546): Homolog of NCBI NO: 23480384 NR Description: heat shock protein [Plasmodium yoelii yoelii]
  misc_feature (1)..(546): Homolog of NCBI NO: 29539338 NR Description: Heat shock 70 kDa protein [Cyanidioschyzon
  misc_feature (1)..(537): Homolog of NCBI NO: 481576 NR Description: dnaK-type molecular chaperone GRP78/BiP -
  misc_feature (1)..(546): Homolog of NCBI NO: 1037176 NR Description: immunoglobulin heavy chain binding protein
  misc_feature (1)..(546): Homolog of NCBI NO: 6016151 NR Description: Luminal binding protein 3 precursor (BiP3)
  misc_feature (1)..(562): Homolog of NCBI NO: 14423732 NR Description: Heat shock 70 kDa protein
  misc_feature (1)..(537): Homolog of NCBI NO: 21263753 NR Description: Heat shock cognate 71 kDa protein (Hsc70.1)
  misc_feature (1)..(546): Homolog of NCBI NO: 29539338 NR Description: Heat shock 70 kDa protein [Cyanidioschyzon
  misc_feature (1)..(537): Homolog of NCBI NO: 481576 NR Description: dnaK-type molecular chaperone GRP78/BiP -
  misc_feature (1)..(546): Homolog of NCBI NO: 1037176 NR Description: immunoglobulin heavy chain binding protein
  misc_feature (1)..(546): Homolog of NCBI NO: 6016151 NR Description: Luminal binding protein 3 precursor (BiP3)
  misc_feature (1)..(562): Homolog of NCBI NO: 14423732 NR Description: Heat shock 70 kDa protein
  misc_feature (1)..(537): Homolog of NCBI NO: 21263753 NR Description: Heat shock cognate 71 kDa protein (Hsc70.1)
  misc_feature (35)..(557): Homolog of NCBI NO: 4164594 NR Description: heat shock protein 70 [Paracoccidioides
  misc_feature (1)..(546): Homolog of NCBI NO: 23480384 NR Description: heat shock protein [Plasmodium yoelii yoelii]
  misc_feature (35)..(557): Homolog of NCBI NO: 4164594 NR Description: heat shock protein 70 [Paracoccidioides
  misc_feature (1)..(546): Homolog of NCBI NO: 23480384 NR Description: heat shock protein [Plasmodium yoelii yoelii]
  misc_feature (1)..(546): Homolog of NCBI NO: 29539338 NR Description: Heat shock 70 kDa protein [Cyanidioschyzon
  misc_feature (1)..(537): Homolog of NCBI NO: 481576 NR Description: dnaK-type molecular chaperone GRP78/BiP -
  misc_feature (1)..(546): Homolog of NCBI NO: 1037176 NR Description: immunoglobulin heavy chain binding protein
  misc_feature (1)..(546): Homolog of NCBI NO: 6016151 NR Description: Luminal binding protein 3 precursor (BiP3)
  misc_feature (1)..(562): Homolog of NCBI NO: 14423732 NR Description: Heat shock 70 kDa protein
  misc_feature (1)..(537): Homolog of NCBI NO: 21263753 NR Description: Heat shock cognate 71 kDa protein (Hsc70.1)

SEQ ID NO: 44808 - DNA, 2575 bp, Arabidopsis thaliana
  misc_feature (1)..(2575): Ceres Seq. ID no. 12603727
  misc_feature: MA Experiment ID: 20000171 Result: Down-regulated in Transcription
  misc_feature: MA Experiment 20000171 PARAMETER Experiment Name: At_42deg_Heat_P Parameter: Age (day) Value: 14
  misc_feature: MA Experiment 20000171 PARAMETER Experiment Name: At_42deg_Heat_P Parameter: Organism Value: A. thaliana
  misc_feature: MA Experiment 20000171 PARAMETER Experiment Name: At_42deg_Heat_P Parameter: Plant Line Value: WS
  misc_feature: MA Experiment 20000171 PARAMETER Experiment Name: At_42deg_Heat_P Parameter: Temperature (deg C) Value: 42 vs. 22
  misc_feature: MA Experiment 20000171 PARAMETER Experiment Name: At_42deg_Heat_P Parameter: Timepoint (hr) Value: 1
  misc_feature: MA Experiment 20000171 PARAMETER Experiment Name: At_42deg_Heat_P Parameter: Tissue Value: Aerial
  misc_feature: MA Experiment ID: 20000185 Result: Up-regulated in Transcription
  misc_feature: MA Experiment 20000185 PARAMETER Experiment Name: At_Roots__P Parameter: Age (day) Value: 7 vs. 21
  misc_feature: MA Experiment 20000185 PARAMETER Experiment Name: At_Roots__P Parameter: Organism Value: A. thaliana
  misc_feature: MA Experiment 20000185 PARAMETER Experiment Name: At_Roots__P Parameter: Tissue Value: Roots vs. Whole Plant
  misc_feature: MA Experiment ID: 20000227 Result: Up-regulated in Transcription
  misc_feature: MA Experiment 20000227 PARAMETER Experiment Name: At_Root-Tips-vs-Tops_P Parameter: Tissue Value: Root Tips vs. Root Tops
  misc_feature: MA Experiment ID: 20000234 Result: Up-regulated in Transcription
  misc_feature: MA Experiment 20000234 PARAMETER Experiment Name: At_Siliques_P Parameter: Age (day) Value: 21
  misc_feature: MA Experiment 20000234 PARAMETER Experiment Name: At_Siliques_P Parameter: Organism Value: A. thaliana
  misc_feature: MA Experiment 20000234 PARAMETER Experiment Name: At_Siliques_P Parameter: Plant Line Value: WS
  misc_feature: MA Experiment 20000234 PARAMETER Experiment Name: At_Siliques_P Parameter: Tissue Value: Less Than 5mm Siliques vs. Whole Plant
  misc_feature: MA Experiment ID: 20000264 Result: Up-regulated in Transcription
  misc_feature: MA Experiment 20000264 PARAMETER Experiment Name: At_Open_Flower_P Parameter: Age (day) Value: 21
  misc_feature: MA Experiment 20000264 PARAMETER Experiment Name: At_Open_Flower_P Parameter: Plant Line Value: WS
  misc_feature: MA Experiment 20000264 PARAMETER Experiment Name: At_Open_Flower_P Parameter: Tissue Value: Open Flower vs. Whole Plant
  misc_feature: MA Experiment ID: 20000265 Result: Up-regulated in Transcription
  misc_feature: MA Experiment 20000265 PARAMETER Experiment Name: At_Open_Flower_P Parameter: Age (day) Value: 21
  misc_feature: MA Experiment 20000265 PARAMETER Experiment Name: At_Open_Flower_P Parameter: Plant Line Value: WS
  misc_feature: MA Experiment 20000265 PARAMETER Experiment Name: At_Open_Flower_P Parameter: Tissue Value: Closed Flower vs. Whole Plant
  misc_feature: MA Experiment ID: 20000286 Result: Up-regulated in Transcription
  misc_feature: MA Experiment 20000286 PARAMETER Experiment Name: At_Open_Flower_P Parameter: Age (day) Value: 21
  misc_feature: MA Experiment 20000286 PARAMETER Experiment Name: At_Open_Flower_P Parameter: Plant Line Value: WS
  misc_feature: MA Experiment 20000286 PARAMETER Experiment Name: At_Open_Flower_P Parameter: Tissue Value: Half Open vs. Whole Plant
  misc_feature: MA Experiment ID: 20000437 Result: Down-regulated in Transcription
  misc_feature: MA Experiment 20000437 PARAMETER Experiment Name: At_Drought_P Parameter: Age (day) Value: 8
  misc_feature: MA Experiment 20000437 PARAMETER Experiment Name: At_Drought_P Parameter: Organism Value: A. thaliana
  misc_feature: MA Experiment 20000437 PARAMETER Experiment Name: At_Drought_P Parameter: Plant Line Value: WS
  misc_feature: MA Experiment 20000437 PARAMETER Experiment Name: At_Drought_P Parameter: Timepoint (hr) Value: 24
  misc_feature: MA Experiment 20000437 PARAMETER Experiment Name: At_Drought_P Parameter: Tissue Value: Whole Plant
  misc_feature: MA Experiment 20000437 PARAMETER Experiment Name: At_Drought_P Parameter: Treatment Value: Drought vs. No Drought
  misc_feature: MA Experiment ID: 20000495 Result: Up-regulated in Transcription
  misc_feature: MA Experiment 20000495 PARAMETER Experiment Name: At_Guard_Cells_P Parameter: Harvest Date Value: 8/2/2002
  misc_feature: MA Experiment 20000495 PARAMETER Experiment Name: At_Guard_Cells_P Parameter: Organism Value: A. thaliana
  misc_feature: MA Experiment 20000495 PARAMETER Experiment Name: At_Guard_Cells_P Parameter: Tissue Value: Guard Cells vs. Leaves
  misc_feature: MA Experiment ID: 20001451 Result: Down-regulated in Transcription
  misc_feature: MA Experiment 20001451 PARAMETER Experiment Name: At_Far-red-induction_P Parameter: Age (day) Value: 7
  misc_feature: MA Experiment 20001451 PARAMETER Experiment Name: At_Far-red-induction_P Parameter: Light Value: Far-red vs. White
  misc_feature: MA Experiment 20001451 PARAMETER Experiment Name: At_Far-red-induction_P Parameter: Organism Value: A. thaliana
  misc_feature: MA Experiment 20001451 PARAMETER Experiment Name: At_Far-red-induction_P Parameter: Plant Line Value: Columbia
  misc_feature: MA Experiment 20001451 PARAMETER Experiment Name: At_Far-red-induction_P Parameter: Timepoint (hr) Value: 24
  misc_feature: MA Experiment 20001451 PARAMETER Experiment Name: At_Far-red-induction_P Parameter: Tissue Value: Whole Plant
tttcagatcgagacgaagatggaaaagatctgtgtcgcagtcagggtaagaccgccggcgccggaaaacggagcttcactctggaaagtcgaagataatcggatctctcttcataaatcactcgacactccaatcacaaccgcttctcacgcttttgatcatgtgttcgacgaaagttctacgaatgctagtgtctacgagcttcttactaaggatatcatacatgccgctgttgagggttttaatggtactgcatttgcttatgggcaaactagtagtgggaagacgtttacgatgacgggctctgaaactgatcctggaattattcgaagatctgttcgagatgtgtttgaaagaatacatatgatatctgatcgtgagtttctcatccgggtttcgtacatggaaatttacaacgaagaaattaatgatcttttagctgttgagaaccagagactgcaaattcatgagcatttggagcgtggagtgtttgttgctggtcttaaggaagaaattgttagtgatgctgaacagattctaaagcttatagattctggagaagttaataggcactttggcgagacaaacatgaatgttcatagtagcaggtctcacaccatattcagaatggtgattgagagcaggggaaaagataatagttcttcagatgctattcgtgtctcagtcttgaatttggtcgatttagctggatctgagcgaattgctaaaactggtgctggtggtgtacgcttgcaagaagggaagtacattaataagagcttaatgattcttggtaatgtcatcaataaattaagtgacagtacaaagctaagggcacatattccgtaccgagatagtaagctgactcgaattcttcagcctgcacttggtggtaatgcaaagacctgcattatatgcactatcgcaccagaagagcatcatattgaggaatcaaaaggaactctccaatttgcaagcagagcaaagcgcatcaccaactgtgctcaagtgaatgagatcttgactgatgccgctttattgaagcgccaaaagttggagatagaagagctacgcatgaagcttcagggatctcatgcggaagtgttggaacaagagatcttaaatttaagcaatcagatgctgaagtatgagttggaatgtgaaaggctaaaaacacaactggaagaagagaaaaggaagcagaaggagcaggaaaattgcatcaaggagcaacagatgaaaattgagaaccttaacaattttgtcactaattctgacttcaagaggaaccagtcagaggactttatcatttcaagaaagactccagatgggctatgcaatgtcaatgacactagcgatgttcctggaaccccttgctttaaatcagcttcccgttcctttgtggttgctcggtcaaataattattcaggactatctgattttagtccgatggttcattccctgggggacgtggccgatgaagatacttggatgaaactaaacaagggttttgttgcagaccttgatcaaatccaatttacacctgctgttaaatgtcaacccactcctttaagtattgcaaccacggagtgcccgcgtgaaaatcactcagaggtggaagatctcaaaagtcggattcagttgctgaccaatgagaatgacagtcttcaggtaaaatttaatgaacaagtactcctgagcaacaatctgatgcaagagatgtctgagctcaaacaagaaacgcttactgtgaaagaaattccgaataggttatctgagtcagttgctaattgcaaagatgtctacaaggatgtcatagtcactatgaagagcttaatcactgacaaggaatctccaacggcaaacctgctcctgggtacaactgaaatcacaacgagcctactggcaactctagaaacacaattctcaatgataatggatggtcagaaaacgggtagtagcatagatcatcctttatctgaccattgggaaacacttcgtgtgaatctgaagaacacaacgacgttgttgctgtcagacgcacaagcaaaagatgaatttttgaactcccacaacaagggacaagaaacagctgctttggaggagaagaaactgaagtctgagctcatcatcatcaaggaaagatacaacgagctcgagaaagagttgtgtttggataaacagcttctagaagcttcaagagaaagtcatgagaagctgataaaagaggtacagttcctgaaggaagaaagagattctttagatagaaaaatctctcaatcaactcagagattgagagtgattgcaagtgataaagagaatgctttgaaagatcttaatgtggaagtgaagaggaggaaagatatggaggaagagattaagcacatcagcattgctttcgctaccaggcacaaatcttttgtgtcttttcacagtgaaatcaagtccaaaatgcagaaactaaccactcaaaactcaaaagctccttagcaaaaacagttaagtttgttgaatttgtatgtttaatttatcaccggattcgctaatgttgattaagaaagtgaagaacctattt

SEQ ID NO: 44809 - protein, 829 aa, Arabidopsis thaliana
  peptide (1)..(829): Ceres Seq. ID no. 12603728
  misc_feature (335)..(418): Pfam Name: Myosin tail Pfam Description: Myosin tail
  misc_feature (40)..(432): Homolog of NCBI NO: 40074465 NR Description: kinesin family member 11 [Dictyostelium
  misc_feature (10)..(84): Homolog of NCBI NO: 34860597 NR Description: similar to CENTROMERIC PROTEIN E (CENP-E PROTEIN)
  misc_feature (84)..(793): Homolog of NCBI NO: 34860597 NR Description: similar to CENTROMERIC PROTEIN E (CENP-E PROTEIN)
  misc_feature (9)..(773): Homolog of NCBI NO: 7512169 NR Description: kinesin-related protein - African clawed frog
  misc_feature (10)..(816): Homolog of NCBI NO: 382658 NR Description: CENP-E protein
  misc_feature (10)..(816): Homolog of NCBI NO: 4502781 NR Description: centromere protein E
  misc_feature (10)..(806): Homolog of NCBI NO: 40789293 NR Description: cDNA sequence BC049989 [Mus musculus]
  misc_feature (339)..(829): Homolog of NCBI NO: 25404863 NR Description: protein T30E16.9 [imported] - Arabidopsis
  misc_feature (53)..(431): Homolog of NCBI NO: 6056206 NR Description: putative kinesin-like centromere protein
  misc_feature (7)..(817): Homolog of NCBI NO: 22330953 NR Description: kinesin-related protein; protein id: At3g10180.1
FQIETKMEKICVAVRVRPPAPENGASLWKVEDNRISLHKSLDTPITTASHAFDHVFDESSTNASVYELLTKDIIHAAVEGFNGTAFAYGQTSSGKTFTMTGSETDPGIIRRSVRDVFERIHMISDREFLIRVSYMEIYNEEINDLLAVENQRLQIHEHLERGVFVAGLKEEIVSDAEQILKLIDSGEVNRHFGETNMNVHSSRSHTIFRMVIESRGKDNSSSDAIRVSVLNLVDLAGSERIAKTGAGGVRLQEGKYINKSLMILGNVINKLSDSTKLRAHIPYRDSKLTRILQPALGGNAKTCIICTIAPEEHHIEESKGTLQFASRAKRITNCAQVNEILTDAALLKRQKLEIEELRMKLQGSHAEVLEQEILNLSNQMLKYELECERLKTQLEEEKRKQKEQENCIKEQQMKIENLNNFVTNSDFKRNQSEDFIISRKTPDGLCNVNDTSDVPGTPCFKSASRSFVVARSNNYSGLSDFSPMVHSLGDVADEDTWMKLNKGFVADLDQIQFTPAVKCQPTPLSIATTECPRENHSEVEDLKSRIQLLTNENDSLQVKFNEQVLLSNNLMQEMSELKQETLTVKEIPNRLSESVANCKDVYKDVIVTMKSLITDKESPTANLLLGTTEITTSLLATLETQFSMIMDGQKTGSSIDHPLSDHWETLRVNLKNTTTLLLSDAQAKDEFLNSHNKGQETAALEEKKLKSELIIIKERYNELEKELCLDKQLLEASRESHEKLIKEVQFLKEERDSLDRKISQSTQRLRVIASDKENALKDLNVEVKRRKDMEEEIKHISIAFATRHKSFVSFHSEIKSKMQKLTTQNSKAP

SEQ ID NO: 44810 - protein, 823 aa, Arabidopsis thaliana
  peptide (1)..(823): Ceres Seq. ID no. 12603729
  misc_feature (329)..(412): Pfam Name: Myosin tail Pfam Description: Myosin tail
  misc_feature (34)..(426): Homolog of NCBI NO: 40074465 NR Description: kinesin family member 11 [Dictyostelium
  misc_feature (4)..(78): Homolog of NCBI NO: 34860597 NR Description: similar to CENTROMERIC PROTEIN E (CENP-E PROTEIN)
  misc_feature (78)..(787): Homolog of NCBI NO: 34860597 NR Description: similar to CENTROMERIC PROTEIN E (CENP-E PROTEIN)
  misc_feature (3)..(767): Homolog of NCBI NO: 7512169 NR Description: kinesin-related protein - African clawed frog
  misc_feature (4)..(810): Homolog of NCBI NO: 382658 NR Description: CENP-E protein
  misc_feature (4)..(810): Homolog of NCBI NO: 4502781 NR Description: centromere protein E
  misc_feature (4)..(800): Homolog of NCBI NO: 40789293 NR Description: cDNA sequence BC049989 [Mus musculus]
  misc_feature (333)..(823): Homolog of NCBI NO: 25404863 NR Description: protein T30E16.9 [imported] - Arabidopsis
  misc_feature (47)..(425): Homolog of NCBI NO: 6056206 NR Description: putative kinesin-like centromere protein
  misc_feature (1)..(811): Homolog of NCBI NO: 22330953 NR Description: kinesin-related protein; protein id: At3g10180.1
MEKICVAVRVRPPAPENGASLWKVEDNRISLHKSLDTPITTASHAFDHVFDESSTNASVYELLTKDIIHAAVEGFNGTAFAYGQTSSGKTFTMTGSETDPGIIRRSVRDVFERIHMISDREFLIRVSYMEIYNEEINDLLAVENQRLQIHEHLERGVFVAGLKEEIVSDAEQILKLIDSGEVNRHFGETNMNVHSSRSHTIFRMVIESRGKDNSSSDAIRVSVLNLVDLAGSERIAKTGAGGVRLQEGKYINKSLMILGNVINKLSDSTKLRAHIPYRDSKLTRILQPALGGNAKTCIICTIAPEEHHIEESKGTLQFASRAKRITNCAQVNEILTDAALLKRQKLEIEELRMKLQGSHAEVLEQEILNLSNQMLKYELECERLKTQLEEEKRKQKEQENCIKEQQMKIENLNNFVTNSDFKRNQSEDFIISRKTPDGLCNVNDTSDVPGTPCFKSASRSFVVARSNNYSGLSDFSPMVHSLGDVADEDTWMKLNKGFVADLDQIQFTPAVKCQPTPLSIATTECPRENHSEVEDLKSRIQLLTNENDSLQVKFNEQVLLSNNLMQEMSELKQETLTVKEIPNRLSESVANCKDVYKDVIVTMKSLITDKESPTANLLLGTTEITTSLLATLETQFSMIMDGQKTGSSIDHPLSDHWETLRVNLKNTTTLLLSDAQAKDEFLNSHNKGQETAALEEKKLKSELIIIKERYNELEKELCLDKQLLEASRESHEKLIKEVQFLKEERDSLDRKISQSTQRLRVIASDKENALKDLNVEVKRRKDMEEEIKHISIAFATRHKSFVSFHSEIKSKMQKLTTQNSKAP

SEQ ID NO: 44811 - protein, 731 aa, Arabidopsis thaliana
  peptide (1)..(731): Ceres Seq. ID no. 12603730
  misc_feature (237)..(320): Pfam Name: Myosin tail Pfam Description: Myosin tail
  misc_feature (1)..(300): Homolog of NCBI NO: 31217360 NR Description: Unknown (protein for IMAGE:30053884) [Mus
  misc_feature (1)..(334): Homolog of NCBI NO: 40074465 NR Description: kinesin family member 11 [Dictyostelium
  misc_feature (1)..(695): Homolog of NCBI NO: 34860597 NR Description: similar to CENTROMERIC PROTEIN E (CENP-E PROTEIN)
  misc_feature (1)..(675): Homolog of NCBI NO: 7512169 NR Description: kinesin-related protein - African clawed frog
  misc_feature (1)..(718): Homolog of NCBI NO: 382658 NR Description: CENP-E protein
  misc_feature (1)..(718): Homolog of NCBI NO: 4502781 NR Description: centromere protein E
  misc_feature (1)..(708): Homolog of NCBI NO: 40789293 NR Description: cDNA sequence BC049989 [Mus musculus]
  misc_feature (241)..(731): Homolog of NCBI NO: 25404863 NR Description: protein T30E16.9 [imported] - Arabidopsis
  misc_feature (1)..(333): Homolog of NCBI NO: 6056206 NR Description: putative kinesin-like centromere protein
  misc_feature (1)..(719): Homolog of NCBI NO: 22330953 NR Description: kinesin-related protein; protein id: At3g10180.1
MTGSETDPGIIRRSVRDVFERIHMISDREFLIRVSYMEIYNEEINDLLAVENQRLQIHEHLERGVFVAGLKEEIVSDAEQILKLIDSGEVNRHFGETNMNVHSSRSHTIFRMVIESRGKDNSSSDAIRVSVLNLVDLAGSERIAKTGAGGVRLQEGKYINKSLMILGNVINKLSDSTKLRAHIPYRDSKLTRILQPALGGNAKTCIICTIAPEEHHIEESKGTLQFASRAKRITNCAQVNEILTDAALLKRQKLEIEELRMKLQGSHAEVLEQEILNLSNQMLKYELECERLKTQLEEEKRKQKEQENCIKEQQMKIENLNNFVTNSDFKRNQSEDFIISRKTPDGLCNVNDTSDVPGTPCFKSASRSFVVARSNNYSGLSDFSPMVHSLGDVADEDTWMKLNKGFVADLDQIQFTPAVKCQPTPLSIATTECPRENHSEVEDLKSRIQLLTNENDSLQVKFNEQVLLSNNLMQEMSELKQETLTVKEIPNRLSESVANCKDVYKDVIVTMKSLITDKESPTANLLLGTTEITTSLLATLETQFSMIMDGQKTGSSIDHPLSDHWETLRVNLKNTTTLLLSDAQAKDEFLNSHNKGQETAALEEKKLKSELIIIKERYNELEKELCLDKQLLEASRESHEKLIKEVQFLKEERDSLDRKISQSTQRLRVIASDKENALKDLNVEVKRRKDMEEEIKHISIAFATRHKSFVSFHSEIKSKMQKLTTQNSKAP

SEQ ID NO: 44812 - DNA, 3209 bp, Arabidopsis thaliana; identical to SEQ ID NO: 39832
  misc_feature (1)..(3209): Ceres Seq. ID no. 12599971
  misc_feature: MA Experiment ID: 20000495 Result: Up-regulated in Transcription
  misc_feature: MA Experiment 20000495 PARAMETER Experiment Name: At_Guard_Cells_P Parameter: Harvest Date Value: 8/2/2002
  misc_feature: MA Experiment 20000495 PARAMETER Experiment Name: At_Guard_Cells_P Parameter: Organism Value: A. thaliana
  misc_feature: MA Experiment 20000495 PARAMETER Experiment Name: At_Guard_Cells_P Parameter: Tissue Value: Guard Cells vs. Leaves
  misc_feature: MA Experiment ID: 20000496 Result: Up-regulated in Transcription
  misc_feature: MA Experiment 20000496 PARAMETER Experiment Name: At_Guard_Cells_P Parameter: Harvest Date Value: 7/19/2002
  misc_feature: MA Experiment 20000496 PARAMETER Experiment Name: At_Guard_Cells_P Parameter: Organism Value: Canola
  misc_feature: MA Experiment 20000496 PARAMETER Experiment Name: At_Guard_Cells_P Parameter: Tissue Value: Guard Cells vs. Leaves
  misc_feature: MA Experiment ID: 20001557 Result: Up-regulated in Transcription
  misc_feature: MA Experiment 20001557 PARAMETER Experiment Name: At_Drought_Soil_Dry_P Parameter: Age (day) Value: 27
  misc_feature: MA Experiment 20001557 PARAMETER Experiment Name: At_Drought_Soil_Dry_P Parameter: Organism Value: A. thaliana
  misc_feature: MA Experiment 20001557 PARAMETER Experiment Name: At_Drought_Soil_Dry_P Parameter: Plant Line Value: WS
  misc_feature: MA Experiment 20001557 PARAMETER Experiment Name: At_Drought_Soil_Dry_P Parameter: Post Timepoint (hr) Value: 3
  misc_feature: MA Experiment 20001557 PARAMETER Experiment Name: At_Drought_Soil_Dry_P Parameter: Post-Treatment Value: Re-Water vs. No Drought
  misc_feature: MA Experiment 20001557 PARAMETER Experiment Name: At_Drought_Soil_Dry_P Parameter: Timepoint (day) Value: 13
  misc_feature: MA Experiment 20001557 PARAMETER Experiment Name: At_Drought_Soil_Dry_P Parameter: Treatment Value: Drought vs. No Drought

SEQ ID NO: 44813 - protein, 949 aa, Arabidopsis thaliana; identical to SEQ ID NO: 39833
  peptide (1)..(949): Ceres Seq. ID no. 12599972
  misc_feature (323)..(609): Pfam Name: haloacid dehalogenase-like hydrolase Pfam Description: haloacid dehalogenase-like hydrolase
  misc_feature (323)..(609): Pfam Name: haloacid dehalogenase-like hydrolase Pfam Description: haloacid dehalogenase-like hydrolase
  misc_feature (753)..(804): Homolog of NCBI NO: 16751320 NR Description: putative plasma membrane-type proton ATPase
  misc_feature (10)..(750): Homolog of NCBI NO: 16751320 NR Description: putative plasma membrane-type proton ATPase
  misc_feature (744)..(804): Homolog of NCBI NO: 1709665 NR Description: Plasma membrane ATPase (Proton pump)
  misc_feature (10)..(736): Homolog of NCBI NO: 1709665 NR Description: Plasma membrane ATPase (Proton pump)
  misc_feature (757)..(811): Homolog of NCBI NO: 1709666 NR Description: Plasma membrane ATPase (Proton pump)
  misc_feature (753)..(804): Homolog of NCBI NO: 16751320 NR Description: putative plasma membrane-type proton ATPase
  misc_feature (744)..(804): Homolog of NCBI NO: 1709665 NR Description: Plasma membrane ATPase (Proton pump)
  misc_feature (757)..(811): Homolog of NCBI NO: 1709666 NR Description: Plasma membrane ATPase (Proton pump)
  misc_feature (1)..(842): Homolog of NCBI NO: 3348073 NR Description: plasma membrane H(+)-ATPase 1 [Filobasidiella
  misc_feature (1)..(842): Homolog of NCBI NO: 6691153 NR Description: plasma membrane H(+)-ATPase [Filobasidiella
  misc_feature (1)..(845): Homolog of NCBI NO: 2652922 NR Description: plasma membrane (H+) ATPase [Uromyces fabae]
  misc_feature (10)..(848): Homolog of NCBI NO: 1709664 NR Description: Probable plasma membrane ATPase (Proton pump)
  misc_feature (10)..(748): Homolog of NCBI NO: 1709666 NR Description: Plasma membrane ATPase (Proton pump)
  misc_feature (10)..(736): Homolog of NCBI NO: 1709665 NR Description: Plasma membrane ATPase (Proton pump)
  misc_feature (10)..(750): Homolog of NCBI NO: 16751320 NR Description: putative plasma membrane-type proton ATPase
  misc_feature (10)..(748): Homolog of NCBI NO: 1709666 NR Description: Plasma membrane ATPase (Proton pump)
  misc_feature (10)..(848): Homolog of NCBI NO: 1709664 NR Description: Probable plasma membrane ATPase (Proton pump)
  misc_feature (1)..(845): Homolog of NCBI NO: 2652922 NR Description: plasma membrane (H+) ATPase [Uromyces fabae]
  misc_feature (1)..(842): Homolog of NCBI NO: 6691153 NR Description: plasma membrane H(+)-ATPase [Filobasidiella
  misc_feature (1)..(842): Homolog of NCBI NO: 3348073 NR Description: plasma membrane H(+)-ATPase 1 [Filobasidiella

SEQ ID NO: 44814 - protein, 885 aa, Arabidopsis thaliana; identical to SEQ ID NO: 39834
  peptide (1)..(885): Ceres Seq. ID no. 12599973
  misc_feature (259)..(545): Pfam Name: haloacid dehalogenase-like hydrolase Pfam Description: haloacid dehalogenase-like hydrolase
  misc_feature (259)..(545): Pfam Name: haloacid dehalogenase-like hydrolase Pfam Description: haloacid dehalogenase-like hydrolase
  misc_feature (689)..(740): Homolog of NCBI NO: 16751320 NR Description: putative plasma membrane-type proton ATPase
  misc_feature (1)..(686): Homolog of NCBI NO: 16751320 NR Description: putative plasma membrane-type proton ATPase
  misc_feature (680)..(740): Homolog of NCBI NO: 1709665 NR Description: Plasma membrane ATPase (Proton pump)
  misc_feature (1)..(672): Homolog of NCBI NO: 1709665 NR Description: Plasma membrane ATPase (Proton pump)
  misc_feature (693)..(747): Homolog of NCBI NO: 1709666 NR Description: Plasma membrane ATPase (Proton pump)
  misc_feature (689)..(740): Homolog of NCBI NO: 16751320 NR Description: putative plasma membrane-type proton ATPase
  misc_feature (680)..(740): Homolog of NCBI NO: 1709665 NR Description: Plasma membrane ATPase (Proton pump)
  misc_feature (693)..(747): Homolog of NCBI NO: 1709666 NR Description: Plasma membrane ATPase (Proton pump)
  misc_feature (1)..(778): Homolog of NCBI NO: 3348073 NR Description: plasma membrane H(+)-ATPase 1 [Filobasidiella
  misc_feature (1)..(778): Homolog of NCBI NO: 6691153 NR Description: plasma membrane H(+)-ATPase [Filobasidiella
  misc_feature (1)..(781): Homolog of NCBI NO: 2652922 NR Description: plasma membrane (H+) ATPase [Uromyces fabae]
  misc_feature (1)..(784): Homolog of NCBI NO: 1709664 NR Description: Probable plasma membrane ATPase (Proton pump)
  misc_feature (1)..(684): Homolog of NCBI NO: 1709666 NR Description: Plasma membrane ATPase (Proton pump)
  misc_feature (1)..(672): Homolog of NCBI NO: 1709665 NR Description: Plasma membrane ATPase (Proton pump)
  misc_feature (1)..(686): Homolog of NCBI NO: 16751320 NR Description: putative plasma membrane-type proton ATPase
  misc_feature (1)..(684): Homolog of NCBI NO: 1709666 NR Description: Plasma membrane ATPase (Proton pump)
  misc_feature (1)..(784): Homolog of NCBI NO: 1709664 NR Description: Probable plasma membrane ATPase (Proton pump)
  misc_feature (1)..(781): Homolog of NCBI NO: 2652922 NR Description: plasma membrane (H+) ATPase [Uromyces fabae]
  misc_feature (1)..(778): Homolog of NCBI NO: 6691153 NR Description: plasma membrane H(+)-ATPase [Filobasidiella
  misc_feature (1)..(778): Homolog of NCBI NO: 3348073 NR Description: plasma membrane H(+)-ATPase 1 [Filobasidiella

SEQ ID NO: 44815 - protein, 877 aa, Arabidopsis thaliana; identical to SEQ ID NO: 39835
  peptide (1)..(877): Ceres Seq. ID no. 12599974
  misc_feature (251)..(537): Pfam Name: haloacid dehalogenase-like hydrolase Pfam Description: haloacid dehalogenase-like hydrolase
  misc_feature (251)..(537): Pfam Name: haloacid dehalogenase-like hydrolase Pfam Description: haloacid dehalogenase-like hydrolase
  misc_feature (681)..(732): Homolog of NCBI NO: 16751320 NR Description: putative plasma membrane-type proton ATPase
  misc_feature (1)..(678): Homolog of NCBI NO: 16751320 NR Description: putative plasma membrane-type proton ATPase
  misc_feature (672)..(732): Homolog of NCBI NO: 1709665 NR Description: Plasma membrane ATPase (Proton pump)
  misc_feature (1)..(664): Homolog of NCBI NO: 1709665 NR Description: Plasma membrane ATPase (Proton pump)
  misc_feature (685)..(739): Homolog of NCBI NO: 1709666 NR Description: Plasma membrane ATPase (Proton pump)
  misc_feature (681)..(732): Homolog of NCBI NO: 16751320 NR Description: putative plasma membrane-type proton ATPase
  misc_feature (672)..(732): Homolog of NCBI NO: 1709665 NR Description: Plasma membrane ATPase (Proton pump)
  misc_feature (685)..(739): Homolog of NCBI NO: 1709666 NR Description: Plasma membrane ATPase (Proton pump)
  misc_feature (1)..(770): Homolog of NCBI NO: 3348073 NR Description: plasma membrane H(+)-ATPase 1 [Filobasidiella
  misc_feature (1)..(770): Homolog of NCBI NO: 6691153 NR Description: plasma membrane H(+)-ATPase [Filobasidiella
  misc_feature (1)..(773): Homolog of NCBI NO: 2652922 NR Description: plasma membrane (H+) ATPase [Uromyces fabae]
  misc_feature (1)..(776): Homolog of NCBI NO: 1709664 NR Description: Probable plasma membrane ATPase (Proton pump)
  misc_feature (1)..(676): Homolog of NCBI NO: 1709666 NR Description: Plasma membrane ATPase (Proton pump)
  misc_feature (1)..(664): Homolog of NCBI NO: 1709665 NR Description: Plasma membrane ATPase (Proton pump)
  misc_feature (1)..(678): Homolog of NCBI NO: 16751320 NR Description: putative plasma membrane-type proton ATPase
  misc_feature (1)..(676): Homolog of NCBI NO: 1709666 NR Description: Plasma membrane ATPase (Proton pump)
  misc_feature (1)..(776): Homolog of NCBI NO: 1709664 NR Description: Probable plasma membrane ATPase (Proton pump)
  misc_feature (1)..(773): Homolog of NCBI NO: 2652922 NR Description: plasma membrane (H+) ATPase [Uromyces fabae]
  misc_feature (1)..(770): Homolog of NCBI NO: 6691153 NR Description: plasma membrane H(+)-ATPase [Filobasidiella
  misc_feature (1)..(770): Homolog of NCBI NO: 3348073 NR Description: plasma membrane H(+)-ATPase 1 [Filobasidiella

SEQ ID NO: 44816 - DNA, 2764 bp, Arabidopsis thaliana
  misc_feature (1)..(2764): Ceres Seq. ID no. 13646330
  misc_feature: MA Experiment ID: 20000439 Result: Down-regulated in Transcription
  misc_feature: MA Experiment 20000439 PARAMETER Experiment Name: At_Roots__P Parameter: Age (day) Value: 14 vs. 21
  misc_feature: MA Experiment 20000439 PARAMETER Experiment Name: At_Roots__P Parameter: Organism Value: A. thaliana
  misc_feature: MA Experiment 20000439 PARAMETER Experiment Name: At_Roots__P Parameter: Tissue Value: Roots vs. Whole Plant
  misc_feature: MA Experiment ID: 20001557 Result: Down-regulated in Transcription
  misc_feature: MA Experiment 20001557 PARAMETER Experiment Name: At_Drought_Soil_Dry_P Parameter: Age (day) Value: 27
  misc_feature: MA Experiment 20001557 PARAMETER Experiment Name: At_Drought_Soil_Dry_P Parameter: Organism Value: A. thaliana
  misc_feature: MA Experiment 20001557 PARAMETER Experiment Name: At_Drought_Soil_Dry_P Parameter: Plant Line Value: WS
  misc_feature: MA Experiment 20001557 PARAMETER Experiment Name: At_Drought_Soil_Dry_P Parameter: Post Timepoint (hr) Value: 3
  misc_feature: MA Experiment 20001557 PARAMETER Experiment Name: At_Drought_Soil_Dry_P Parameter: Post-Treatment Value: Re-Water vs. No Drought
  misc_feature: MA Experiment 20001557 PARAMETER Experiment Name: At_Drought_Soil_Dry_P Parameter: Timepoint (day) Value: 13
  misc_feature: MA Experiment 20001557 PARAMETER Experiment Name: At_Drought_Soil_Dry_P Parameter: Treatment Value: Drought vs. No Drought
  misc_feature: MA Experiment ID: 20001558 Result: Down-regulated in Transcription
  misc_feature: MA Experiment 20001558 PARAMETER Experiment Name: At_Drought_Soil_Dry_P Parameter: Age (day) Value: 27
  misc_feature: MA Experiment 20001558 PARAMETER Experiment Name: At_Drought_Soil_Dry_P Parameter: Organism Value: A. thaliana
  misc_feature: MA Experiment 20001558 PARAMETER Experiment Name: At_Drought_Soil_Dry_P Parameter: Plant Line Value: WS
  misc_feature: MA Experiment 20001558 PARAMETER Experiment Name: At_Drought_Soil_Dry_P Parameter: Post Timepoint (hr) Value: 6
  misc_feature: MA Experiment 20001558 PARAMETER Experiment Name: At_Drought_Soil_Dry_P Parameter: Post-Treatment Value: Re-Water vs. No Drought
  misc_feature: MA Experiment 20001558 PARAMETER Experiment Name: At_Drought_Soil_Dry_P Parameter: Timepoint (day) Value: 13
  misc_feature: MA Experiment 20001558 PARAMETER Experiment Name: At_Drought_Soil_Dry_P Parameter: Treatment Value: Drought vs. No Drought
  misc_feature: MA Experiment ID: 20001560 Result: Down-regulated in Transcription
  misc_feature: MA Experiment 20001560 PARAMETER Experiment Name: At_Drought_Soil_Dry_P Parameter: Age (day) Value: 28
  misc_feature: MA Experiment 20001560 PARAMETER Experiment Name: At_Drought_Soil_Dry_P Parameter: Organism Value: A. thaliana
  misc_feature: MA Experiment 20001560 PARAMETER Experiment Name: At_Drought_Soil_Dry_P Parameter: Plant Line Value: WS
  misc_feature: MA Experiment 20001560 PARAMETER Experiment Name: At_Drought_Soil_Dry_P Parameter: Post Timepoint (hr) Value: None
  misc_feature: MA Experiment 20001560 PARAMETER Experiment Name: At_Drought_Soil_Dry_P Parameter: Post-Treatment Value: None
  misc_feature: MA Experiment 20001560 PARAMETER Experiment Name: At_Drought_Soil_Dry_P Parameter: Timepoint (day) Value: 14
  misc_feature: MA Experiment 20001560 PARAMETER Experiment Name: At_Drought_Soil_Dry_P Parameter: Treatment Value: Drought vs. No Drought
  misc_feature: MA Experiment ID: 20001904 Result: Down-regulated in Transcription
  misc_feature: MA Experiment 20001904 PARAMETER Experiment Name: At_Drought_Reproduction_P Parameter: Age (day) Value: 37
  misc_feature: MA Experiment 20001904 PARAMETER Experiment Name: At_Drought_Reproduction_P Parameter: Organism Value: A. thaliana
  misc_feature: MA Experiment 20001904 PARAMETER Experiment Name: At_Drought_Reproduction_P Parameter: Plant Line Value: WS
  misc_feature: MA Experiment 20001904 PARAMETER Experiment Name: At_Drought_Reproduction_P Parameter: Timepoint (day) Value: 7
  misc_feature: MA Experiment 20001904 PARAMETER Experiment Name: At_Drought_Reproduction_P Parameter: Tissue Value: Rosettes
  misc_feature: MA Experiment 20001904 PARAMETER Experiment Name: At_Drought_Reproduction_P Parameter: Treatment Value: Drought vs. No Drought
  misc_feature: MA Experiment ID: 20001905 Result: Down-regulated in Transcription
  misc_feature: MA Experiment 20001905 PARAMETER Experiment Name: At_Drought_Reproduction_P Parameter: Age (day) Value: 40
  misc_feature: MA Experiment 20001905 PARAMETER Experiment Name: At_Drought_Reproduction_P Parameter: Organism Value: A. thaliana
  misc_feature: MA Experiment 20001905 PARAMETER Experiment Name: At_Drought_Reproduction_P Parameter: Plant Line Value: WS
  misc_feature: MA Experiment 20001905 PARAMETER Experiment Name: At_Drought_Reproduction_P Parameter: Timepoint (day) Value: 10
  misc_feature: MA Experiment 20001905 PARAMETER Experiment Name: At_Drought_Reproduction_P Parameter: Tissue Value: Rosettes
  misc_feature: MA Experiment 20001905 PARAMETER Experiment Name: At_Drought_Reproduction_P Parameter: Treatment Value: Drought vs. No Drought
actgacgaatcagtgaaacaatatctcaaacccagaaaccaacaataattcatagattactactatacaaaattctatataactataatctgttctcttgtgtgtttctcgcgtggcttgcgtgttacttcattcatcactgctttagcttctcctcatatgaatctcgaggcaatccagtcactgacttttctcactccccatctctagggttaaaactgtgagcatttggagtagcaaaagtaacaaagcatggcaacacttaaagacattggtgtatcagcagggataaacatcctcactgcattcattttcttcataatctttgcgtttttaaggcttcagccattcaacgacagagtttacttctccaaatggtacctcagggggttaagaagcagccctgcaagtggcggcggattcgcggggcggtttgtgaatttggagttgagatcatacctcaagttcttgcattggatgcctgaagctcttaagatgcctgagcgtgagctgattgatcatgctggtttagactctgttgtctatctccggatttactggctcgggcttaagatttttgctccaatagcaatgcttgcttgggcagttcttgtaccggttaattggacaaacaacgagttggagttggctaagcattttaagaatgtgacttcaagtgatattgacaaactaacaatttcgaatatcccagaaggttcaaataggttttgggctcatatcataatggcttatgcctttacaatctggacttgttatatgctgatgaaggagtatgagacagttgctaacatgaggcttcagtttcttgcctcagaaggccgtcgacctgaccagttcactgttcttgttaggaatgtacctccggacccagacgaaactgtgagtgagcttgtggagcattttttcctagttaatcaccctgataactacctcacacatcaggttgtatgcaatgcaaacaagctcgcggatttggttagtaaaaagacgaagctgcagaactggcttgactattatcagctcaaatacactagaaataattctcagatcagacctataacgaagcttgggtgccttggcttgtgtggacaaaaagttgacgcaatcgaacattacattgctgaagtagataaaacatcaaaagagattgctgaagagagagagaatgtggtgaatgatcaaaagtcagtcatgccagcatcttttgtctctttcaaaacccgttgggctgctgctgtttgcgctcagaccacgcagacccgaaacccaactgaatggttaaccgaatgggctgcagagccgcgtgatatatattggccaaacctagcgattccatatgtttctttgactgtgagaagattggttatgaatgtagccttcttcttccttaccttctttttcatcatccctatcgcgtttgtacaatctcttgctaccattgaaggaattgagaaagttgcaccgttcttgaaagtcattatcgaaaaagatttcataaaatcgctgatacaaggtttgctagccggtattgcgttgaagcttttcctcatctttctgccagccatactgatgaccatgtccaaatttgaaggctttacttcagtttcattcttagaaagacgatccgcgtctagatattacatctttaacttagtgaacgtctttcttggaagtgttatcgctggagctgcgtttgagcagcttaactctttcctcaatcaatcgcctaatcaaatccctaagactattggcatggcgataccgatgaaagcaaccttctttatcacatatataatggttgatggttgggcaggagttgcaggagagattcttatgttgaaacctctcattatataccacctcaaaaacgcattcttggtgaaaacagagaaagacagagaggaagcaatgaacccgggaagcatcggtttcaacactggagagcctcagatacagctttacttccttcttggtcttgtctatgctcctgtgacaccaatgcttcttccttttatcttagtctttttcgctcttgcttatgtcgtataccgccatcagatcataaatgtgtataatcaagagtatgagagcgctgctgcgttttggccggatgttcatggacgggttataacggcattgatcatatctcagttgcttctgatgggtttgttaggtacaaaacatgccgcttcagctgctccgtttctcattgctcttcctgtgattactatcggtttccaccgcttctgtaaaggccgtttcgaacctgcctttgtccgttaccccttacaggaagctatgatgaaagatacattggaaagagcaagagagccaaatctgaacctgaaaggttacttgcaagacgcttatattcatccggtttttaaaggcggtgataatgatgacgacggtgacatgatcggaaaattggagaatgaagtcatcatagtgccaacaaaacgccaatcgcggaggaacactcctgcaccgagcagaatcagcggtgaatcgtctccatctttggccgttattaacggtaaagaagtctagtttaacggtttcaattcagtaaaagcatctgcatacgatttaagtatgaatatagttcgtgtatgtatgtacttttatgtgtacatagagaggtttgtgtttttgcttagacgttgttgatgggttttaattgttgaagtattgaagtttcagggtatttttagaataatatcattttaattgggtgtttttc

SEQ ID NO: 44817 - protein, 772 aa, Arabidopsis thaliana
  peptide (1)..(772): Ceres Seq. ID no. 13646331
  misc_feature (306)..(731): Pfam Name: Domain of unknown function DUF221 Pfam Description: Domain of unknown function DUF221
  misc_feature (306)..(731): Pfam Name: Domain of unknown function DUF221 Pfam Description: Domain of unknown function DUF221
  misc_feature (1)..(772): Homolog of NCBI NO: 15222569 NR Description: ERD4 protein-related [Arabidopsis thaliana]
  misc_feature (1)..(749): Homolog of NCBI NO: 37537172 NR Description: unknown protein [Oryza sativa (japonica
  misc_feature (1)..(768): Homolog of NCBI NO: 15236212 NR Description: ERD4 protein-related [Arabidopsis thaliana]
  misc_feature (1)..(160): Homolog of NCBI NO: 7486105 NR Description: hypothetical protein F24O1.3 - Arabidopsis
  misc_feature (237)..(763): Homolog of NCBI NO: 7486105 NR Description: hypothetical protein F24O1.3 - Arabidopsis
  misc_feature (1)..(772): Homolog of NCBI NO: 15222569 NR Description: ERD4 protein-related [Arabidopsis thaliana]
  misc_feature (1)..(768): Homolog of NCBI NO: 15236212 NR Description: ERD4 protein-related [Arabidopsis thaliana]
  misc_feature (237)..(763): Homolog of NCBI NO: 7486105 NR Description: hypothetical protein F24O1.3 - Arabidopsis
  misc_feature (1)..(763): Homolog of NCBI NO: 25404887 NR Description: protein F24O1.4 [imported] - Arabidopsis thaliana
  misc_feature (1)..(763): Homolog of NCBI NO: 25402694 NR Description: hypothetical protein [imported] - Arabidopsis
  misc_feature (1)..(748): Homolog of NCBI NO: 15233100 NR Description: ERD4 protein-related [Arabidopsis thaliana]
  misc_feature (1)..(763): Homolog of NCBI NO: 15220762 NR Description: ERD4 protein-related [Arabidopsis thaliana]
  misc_feature (1)..(762): Homolog of NCBI NO: 17381104 NR Description: unknown protein [Arabidopsis thaliana]
  misc_feature (1)..(160): Homolog of NCBI NO: 7486105 NR Description: hypothetical protein F24O1.3 - Arabidopsis
  misc_feature (1)..(749): Homolog of NCBI NO: 37537172 NR Description: unknown protein [Oryza sativa (japonica
  misc_feature (1)..(762): Homolog of NCBI NO: 17381104 NR Description: unknown protein [Arabidopsis thaliana]
  misc_feature (1)..(763): Homolog of NCBI NO: 15220762 NR Description: ERD4 protein-related [Arabidopsis thaliana]
  misc_feature (1)..(748): Homolog of NCBI NO: 15233100 NR Description: ERD4 protein-related [Arabidopsis thaliana]
  misc_feature (1)..(763): Homolog of NCBI NO: 25402694 NR Description: hypothetical protein [imported] - Arabidopsis
  misc_feature (1)..(763): Homolog of NCBI NO: 25404887 NR Description: protein F24O1.4 [imported] - Arabidopsis thaliana
MATLKDIGVSAGINILTAFIFFIIFAFLRLQPFNDRVYFSKWYLRGLRSSPASGGGFAGRFVNLELRSYLKFLHWMPEALKMPERELIDHAGLDSVVYLRIYWLGLKIFAPIAMLAWAVLVPVNWTNNELELAKHFKNVTSSDIDKLTISNIPEGSNRFWAHIIMAYAFTIWTCYMLMKEYETVANMRLQFLASEGRRPDQFTVLVRNVPPDPDETVSELVEHFFLVNHPDNYLTHQVVCNANKLADLVSKKTKLQNWLDYYQLKYTRNNSQIRPITKLGCLGLCGQKVDAIEHYIAEVDKTSKEIAEERENVVNDQKSVMPASFVSFKTRWAAAVCAQTTQTRNPTEWLTEWAAEPRDIYWPNLAIPYVSLTVRRLVMNVAFFFLTFFFIIPIAFVQSLATIEGIEKVAPFLKVIIEKDFIKSLIQGLLAGIALKLFLIFLPAILMTMSKFEGFTSVSFLERRSASRYYIFNLVNVFLGSVIAGAAFEQLNSFLNQSPNQIPKTIGMAIPMKATFFITYIMVDGWAGVAGEILMLKPLIIYHLKNAFLVKTEKDREEAMNPGSIGFNTGEPQIQLYFLLGLVYAPVTPMLLPFILVFFALAYVVYRHQIINVYNQEYESAAAFWPDVHGRVITALIISQLLLMGLLGTKHAASAAPFLIALPVITIGFHRFCKGRFEPAFVRYPLQEAMMKDTLERAREPNLNLKGYLQDAYIHPVFKGGDNDDDGDMIGKLENEVIIVPTKRQSRRNTPAPSRISGESSPSLAVINGKEV

SEQ ID NO: 44818 - protein, 697 aa, Arabidopsis thaliana
  peptide (1)..(697): Ceres Seq. ID no. 13646332
  misc_feature (231)..(656): Pfam Name: Domain of unknown function DUF221 Pfam Description: Domain of unknown function DUF221
  misc_feature (231)..(656): Pfam Name: Domain of unknown function DUF221 Pfam Description: Domain of unknown function DUF221
  misc_feature (1)..(697): Homolog of NCBI NO: 15222569 NR Description: ERD4 protein-related [Arabidopsis thaliana]
  misc_feature (1)..(674): Homolog of NCBI NO: 37537172 NR Description: unknown protein [Oryza sativa (japonica
  misc_feature (1)..(693): Homolog of NCBI NO: 15236212 NR Description: ERD4 protein-related [Arabidopsis thaliana]
  misc_feature (1)..(85): Homolog of NCBI NO: 7486105 NR Description: hypothetical protein F24O1.3 - Arabidopsis
  misc_feature (162)..(688): Homolog of NCBI NO: 7486105 NR Description: hypothetical protein F24O1.3 - Arabidopsis
  misc_feature (1)..(697): Homolog of NCBI NO: 15222569 NR Description: ERD4 protein-related [Arabidopsis thaliana]
  misc_feature (1)..(693): Homolog of NCBI NO: 15236212 NR Description: ERD4 protein-related [Arabidopsis thaliana]
  misc_feature (162)..(688): Homolog of NCBI NO: 7486105 NR Description: hypothetical protein F24O1.3 - Arabidopsis
  misc_feature (1)..(688): Homolog of NCBI NO: 25404887 NR Description: protein F24O1.4 [imported] - Arabidopsis thaliana
  misc_feature (1)..(688): Homolog of NCBI NO: 25402694 NR Description: hypothetical protein [imported] - Arabidopsis
  misc_feature (1)..(673): Homolog of NCBI NO: 15233100 NR Description: ERD4 protein-related [Arabidopsis thaliana]
  misc_feature (1)..(688): Homolog of NCBI NO: 15220762 NR Description: ERD4 protein-related [Arabidopsis thaliana]
  misc_feature (1)..(687): Homolog of NCBI NO: 17381104 NR Description: unknown protein [Arabidopsis thaliana]
  misc_feature (1)..(85): Homolog of NCBI NO: 7486105 NR Description: hypothetical protein F24O1.3 - Arabidopsis
  misc_feature (1)..(674): Homolog of NCBI NO: 37537172 NR Description: unknown protein [Oryza sativa (japonica
  misc_feature (1)..(687): Homolog of NCBI NO: 17381104 NR Description: unknown protein [Arabidopsis thaliana]
  misc_feature (1)..(688): Homolog of NCBI NO: 15220762 NR Description: ERD4 protein-related [Arabidopsis thaliana]
  misc_feature (1)..(673): Homolog of NCBI NO: 15233100 NR Description: ERD4 protein-related [Arabidopsis thaliana]
  misc_feature (1)..(688): Homolog of NCBI NO: 25402694 NR Description: hypothetical protein [imported] - Arabidopsis
  misc_feature (1)..(688): Homolog of NCBI NO: 25404887 NR Description: protein F24O1.4 [imported] - Arabidopsis thaliana
MPEALKMPERELIDHAGLDSVVYLRIYWLGLKIFAPIAMLAWAVLVPVNWTNNELELAKHFKNVTSSDIDKLTISNIPEGSNRFWAHIIMAYAFTIWTCYMLMKEYETVANMRLQFLASEGRRPDQFTVLVRNVPPDPDETVSELVEHFFLVNHPDNYLTHQVVCNANKLADLVSKKTKLQNWLDYYQLKYTRNNSQIRPITKLGCLGLCGQKVDAIEHYIAEVDKTSKEIAEERENVVNDQKSVMPASFVSFKTRWAAAVCAQTTQTRNPTEWLTEWAAEPRDIYWPNLAIPYVSLTVRRLVMNVAFFFLTFFFIIPIAFVQSLATIEGIEKVAPFLKVIIEKDFIKSLIQGLLAGIALKLFLIFLPAILMTMSKFEGFTSVSFLERRSASRYYIFNLVNVFLGSVIAGAAFEQLNSFLNQSPNQIPKTIGMAIPMKATFFITYIMVDGWAGVAGEILMLKPLIIYHLKNAFLVKTEKDREEAMNPGSIGFNTGEPQIQLYFLLGLVYAPVTPMLLPFILVFFALAYVVYRHQIINVYNQEYESAAAFWPDVHGRVITALIISQLLLMGLLGTKHAASAAPFLIALPVITIGFHRFCKGRFEPAFVRYPLQEAMMKDTLERAREPNLNLKGYLQDAYIHPVFKGGDNDDDGDMIGKLENEVIIVPTKRQSRRNTPAPSRISGESSPSLAVINGKEV

SEQ ID NO: 44819 - protein, 691 aa, Arabidopsis thaliana
  peptide (1)..(691): Ceres Seq. ID no. 13646333
  misc_feature (225)..(650): Pfam Name: Domain of unknown function DUF221 Pfam Description: Domain of unknown function DUF221
  misc_feature (225)..(650): Pfam Name: Domain of unknown function DUF221 Pfam Description: Domain of unknown function DUF221
  misc_feature (1)..(691): Homolog of NCBI NO: 15222569 NR Description: ERD4 protein-related [Arabidopsis thaliana]
  misc_feature (1)..(668): Homolog of NCBI NO: 37537172 NR Description: unknown protein [Oryza sativa (japonica
  misc_feature (1)..(687): Homolog of NCBI NO: 15236212 NR Description: ERD4 protein-related [Arabidopsis thaliana]
  misc_feature (1)..(79): Homolog of NCBI NO: 7486105 NR Description: hypothetical protein F24O1.3 - Arabidopsis
  misc_feature (156)..(682): Homolog of NCBI NO: 7486105 NR Description: hypothetical protein F24O1.3 - Arabidopsis
  misc_feature (1)..(691): Homolog of NCBI NO: 15222569 NR Description: ERD4 protein-related [Arabidopsis thaliana]
  misc_feature (1)..(687): Homolog of NCBI NO: 15236212 NR Description: ERD4 protein-related [Arabidopsis thaliana]
  misc_feature (156)..(682): Homolog of NCBI NO: 7486105 NR Description: hypothetical protein F24O1.3 - Arabidopsis
  misc_feature (1)..(682): Homolog of NCBI NO: 25404887 NR Description: protein F24O1.4 [imported] - Arabidopsis thaliana
  misc_feature (1)..(682): Homolog of NCBI NO: 25402694 NR Description: hypothetical protein [imported] - Arabidopsis
  misc_feature (1)..(667): Homolog of NCBI NO: 15233100 NR Description: ERD4 protein-related [Arabidopsis thaliana]
  misc_feature (1)..(682): Homolog of NCBI NO: 15220762 NR Description: ERD4 protein-related [Arabidopsis thaliana]
  misc_feature (1)..(681): Homolog of NCBI NO: 17381104 NR Description: unknown protein [Arabidopsis thaliana]
  misc_feature (1)..(79): Homolog of NCBI NO: 7486105 NR Description: hypothetical protein F24O1.3 - Arabidopsis
  misc_feature (1)..(668): Homolog of NCBI NO: 37537172 NR Description: unknown protein [Oryza sativa (japonica
  misc_feature (1)..(681): Homolog of NCBI NO: 17381104 NR Description: unknown protein [Arabidopsis thaliana]
  misc_feature (1)..(682): Homolog of NCBI NO: 15220762 NR Description: ERD4 protein-related [Arabidopsis thaliana]
  misc_feature (1)..(667): Homolog of NCBI NO: 15233100 NR Description: ERD4 protein-related [Arabidopsis thaliana]
  misc_feature (1)..(682): Homolog of NCBI NO: 25402694 NR Description: hypothetical protein [imported] - Arabidopsis
  misc_feature (1)..(682): Homolog of NCBI NO: 25404887 NR Description: protein F24O1.4 [imported] - Arabidopsis thaliana
MPERELIDHAGLDSVVYLRIYWLGLKIFAPIAMLAWAVLVPVNWTNNELELAKHFKNVTSSDIDKLTISNIPEGSNRFWAHIIMAYAFTIWTCYMLMKEYETVANMRLQFLASEGRRPDQFTVLVRNVPPDPDETVSELVEHFFLVNHPDNYLTHQVVCNANKLADLVSKKTKLQNWLDYYQLKYTRNNSQIRPITKLGCLGLCGQKVDAIEHYIAEVDKTSKEIAEERENVVNDQKSVMPASFVSFKTRWAAAVCAQTTQTRNPTEWLTEWAAEPRDIYWPNLAIPYVSLTVRRLVMNVAFFFLTFFFIIPIAFVQSLATIEGIEKVAPFLKVIIEKDFIKSLIQGLLAGIALKLFLIFLPAILMTMSKFEGFTSVSFLERRSASRYYIFNLVNVFLGSVIAGAAFEQLNSFLNQSPNQIPKTIGMAIPMKATFFITYIMVDGWAGVAGEILMLKPLIIYHLKNAFLVKTEKDREEAMNPGSIGFNTGEPQIQLYFLLGLVYAPVTPMLLPFILVFFALAYVVYRHQIINVYNQEYESAAAFWPDVHGRVITALIISQLLLMGLLGTKHAASAAPFLIALPVITIGFHRFCKGRFEPAFVRYPLQEAMMKDTLERAREPNLNLKGYLQDAYIHPVFKGGDNDDDGDMIGKLENEVIIVPTKRQSRRNTPAPSRISGESSPSLAVINGKEV

SEQ ID NO: 44820 - DNA, 2965 bp, Arabidopsis thaliana
  misc_feature (1)..(2965): Ceres Seq. ID no. 12562108
  misc_feature: MA Experiment ID: 108573 Result: Down-regulated in Transcription
  misc_feature: MA Experiment 108573 PARAMETER Experiment Name: At_Drought_cDNA_P Parameter: Timepoint (hr) Value: 6
  misc_feature: MA Experiment 108573 PARAMETER Experiment Name: At_Drought_cDNA_P Parameter: Tissue Value: Aerial
  misc_feature: MA Experiment 108573 PARAMETER Experiment Name: At_Drought_cDNA_P Parameter: Treatment Value: Drought vs. No Drought
  misc_feature: MA Experiment ID: 108576 Result: Up-regulated in Transcription
  misc_feature: MA Experiment 108576 PARAMETER Experiment Name: At_42deg_Heat_cDNA_P Parameter: Temperature (deg C) Value: 42 vs. 22
  misc_feature: MA Experiment 108576 PARAMETER Experiment Name: At_42deg_Heat_cDNA_P Parameter: Timepoint (hr) Value: 1
  misc_feature: MA Experiment 108576 PARAMETER Experiment Name: At_42deg_Heat_cDNA_P Parameter: Tissue Value: Aerial
  misc_feature: MA Experiment ID: 108577 Result: Up-regulated in Transcription
  misc_feature: MA Experiment 108577 PARAMETER Experiment Name: At_42deg_Heat_cDNA_P Parameter: Temperature (deg C) Value: 42 vs. 22
  misc_feature: MA Experiment 108577 PARAMETER Experiment Name: At_42deg_Heat_cDNA_P Parameter: Timepoint (hr) Value: 6
  misc_feature: MA Experiment 108577 PARAMETER Experiment Name: At_42deg_Heat_cDNA_P Parameter: Tissue Value: Aerial
  misc_feature: MA Experiment ID: 108668 Result: Up-regulated in Transcription
  misc_feature: MA Experiment 108668 PARAMETER Experiment Name: At_2mM_SA_cDNA_P Parameter: Plant Line Value: WS
  misc_feature: MA Experiment 108668 PARAMETER Experiment Name: At_2mM_SA_cDNA_P Parameter: Timepoint (hr) Value: 6
  misc_feature: MA Experiment 108668 PARAMETER Experiment Name: At_2mM_SA_cDNA_P Parameter: Treatment Value: 2mM SA vs. No Treatment
  misc_feature: MA Experiment ID: 20000090 Result: Up-regulated in Transcription
  misc_feature: MA Experiment ID: 20000093 Result: Up-regulated in Transcription
  misc_feature: MA Experiment 20000093 PARAMETER Experiment Name: At_42deg_Heat_cDNA_P Parameter: Temperature (deg C) Value: 42 vs. 22
  misc_feature: MA Experiment 20000093 PARAMETER Experiment Name: At_42deg_Heat_cDNA_P Parameter: Timepoint (hr) Value: 0.5
  misc_feature: MA Experiment 20000093 PARAMETER Experiment Name: At_42deg_Heat_cDNA_P Parameter: Tissue Value: Aerial
  misc_feature: MA Experiment ID: 20000112 Result: Up-regulated in Transcription
  misc_feature: MA Experiment 20000112 PARAMETER Experiment Name: At_42deg_Heat_cDNA_P Parameter: Temperature (deg C) Value: 42 vs. 22
  misc_feature: MA Experiment 20000112 PARAMETER Experiment Name: At_42deg_Heat_cDNA_P Parameter: Timepoint (hr) Value: 2
  misc_feature: MA Experiment 20000112 PARAMETER Experiment Name: At_42deg_Heat_cDNA_P Parameter: Tissue Value: Aerial
  misc_feature: MA Experiment ID: 20000144 Result: Up-regulated in Transcription
  misc_feature: MA Experiment 20000144 PARAMETER Experiment Name: At_42deg_Heat_cDNA_P Parameter: Temperature (deg C) Value: 42 vs. 22
  misc_feature: MA Experiment 20000144 PARAMETER Experiment Name: At_42deg_Heat_cDNA_P Parameter: Timepoint (hr) Value: 1
  misc_feature: MA Experiment 20000144 PARAMETER Experiment Name: At_42deg_Heat_cDNA_P Parameter: Tissue Value: Aerial
  misc_feature: MA Experiment ID: 20000171 Result: Up-regulated in Transcription
  misc_feature: MA Experiment 20000171 PARAMETER Experiment Name: At_42deg_Heat_P Parameter: Age (day) Value: 14
  misc_feature: MA Experiment 20000171 PARAMETER Experiment Name: At_42deg_Heat_P Parameter: Organism Value: A. thaliana
  misc_feature: MA Experiment 20000171 PARAMETER Experiment Name: At_42deg_Heat_P Parameter: Plant Line Value: WS
  misc_feature: MA Experiment 20000171 PARAMETER Experiment Name: At_42deg_Heat_P Parameter: Temperature (deg C) Value: 42 vs. 22
  misc_feature: MA Experiment 20000171 PARAMETER Experiment Name: At_42deg_Heat_P Parameter: Timepoint (hr) Value: 1
  misc_feature: MA Experiment 20000171 PARAMETER Experiment Name: At_42deg_Heat_P Parameter: Tissue Value: Aerial
  misc_feature: MA Experiment ID: 20000173 Result: Up-regulated in Transcription
  misc_feature: MA Experiment 20000173 PARAMETER Experiment Name: At_42deg_Heat_P Parameter: Age (day) Value: 14
  misc_feature: MA Experiment 20000173 PARAMETER Experiment Name: At_42deg_Heat_P Parameter: Organism Value: A. thaliana
  misc_feature: MA Experiment 20000173 PARAMETER Experiment Name: At_42deg_Heat_P Parameter: Plant Line Value: WS
  misc_feature: MA Experiment 20000173 PARAMETER Experiment Name: At_42deg_Heat_P Parameter: Temperature (deg C) Value: 42 vs. 22
  misc_feature: MA Experiment 20000173 PARAMETER Experiment Name: At_42deg_Heat_P Parameter: Timepoint (hr) Value: 6
  misc_feature: MA Experiment 20000173 PARAMETER Experiment Name: At_42deg_Heat_P Parameter: Tissue Value: Aerial
  misc_feature: MA Experiment ID: 20000179 Result: Up-regulated in Transcription
  misc_feature: MA Experiment 20000179 PARAMETER Experiment Name: At_Germinating_Seeds_P Parameter: Age (hr) Value: 6 vs. 0
  misc_feature: MA Experiment 20000179 PARAMETER Experiment Name: At_Germinating_Seeds_P Parameter: Tissue Value: Germinating Seeds
  misc_feature: MA Experiment ID: 20000180 Result: Up-regulated in Transcription
  misc_feature: MA Experiment 20000180 PARAMETER Experiment Name: At_Germinating_Seeds_P Parameter: Age (hr) Value: 24 vs. 0
  misc_feature: MA Experiment 20000180 PARAMETER Experiment Name: At_Germinating_Seeds_P Parameter: Tissue Value: Germinating Seeds
  misc_feature: MA Experiment ID: 20000184 Result: Down-regulated in Transcription
  misc_feature: MA Experiment 20000184 PARAMETER Experiment Name: At_Shoots__P Parameter: Age (day) Value: 7
  misc_feature: MA Experiment 20000184 PARAMETER Experiment Name: At_Shoots__P Parameter: Tissue Value: Shoots vs. Whole Plant
  misc_feature: MA Experiment ID: 20000227 Result: Up-regulated in Transcription
  misc_feature: MA Experiment 20000227 PARAMETER Experiment Name: At_Root-Tips-vs-Tops_P Parameter: Tissue Value: Root Tips vs. Root Tops
  misc_feature: MA Experiment ID: 20000234 Result: Up-regulated in Transcription
  misc_feature: MA Experiment 20000234 PARAMETER Experiment Name: At_Siliques_P Parameter: Age (day) Value: 21
  misc_feature: MA Experiment 20000234 PARAMETER Experiment Name: At_Siliques_P Parameter: Organism Value: A. thaliana
  misc_feature: MA Experiment 20000234 PARAMETER Experiment Name: At_Siliques_P Parameter: Plant Line Value: WS
  misc_feature: MA Experiment 20000234 PARAMETER Experiment Name: At_Siliques_P Parameter: Tissue Value: Less Than 5mm Siliques vs. Whole Plant
  misc_feature: MA Experiment ID: 20001248 Result: Down-regulated in Transcription
  misc_feature: MA Experiment 20001248 PARAMETER Experiment Name: At_Far-red-induction_P Parameter: Age (day) Value: 7
  misc_feature: MA Experiment 20001248 PARAMETER Experiment Name: At_Far-red-induction_P Parameter: Light Value: Far-red vs. White
  misc_feature: MA Experiment 20001248 PARAMETER Experiment Name: At_Far-red-induction_P Parameter: Organism Value: A. thaliana
  misc_feature: MA Experiment 20001248 PARAMETER Experiment Name: At_Far-red-induction_P Parameter: Plant Line Value: Columbia
  misc_feature: MA Experiment 20001248 PARAMETER Experiment Name: At_Far-red-induction_P Parameter: Timepoint (hr) Value: 4
  misc_feature: MA Experiment 20001248 PARAMETER Experiment Name: At_Far-red-induction_P Parameter: Tissue Value: Whole Plant
aagttttctccagaacctgacggaaaaaaacttgaatctgcaaatcgacttcccccggagaatgcgatcggagatcggaaactgaggaattgctgctctctactcgcggtgtttagtttacgattggaatatggggaagatatttagctggttagtggtgttattgtcattgatctcattagtccctgttccatcggaatcggctgttttgagtgtagatctaggttcagaatgggttaaagttgccgtagttaatctgaaacgaggacagagtccaatctctgtagccattaatgagatgtccaagaggaaatccccagctttagtagcatttcaatctggagaccggttactaggcgaggaggctgcgggaataacggctcgttatccgaataaagtttattcacaactgagggatatggtgggaaaacctttcaaacatgttaaggatttcattgattctgtctacttgccttttgatattgtagaagattctagaggtgcagttggtattaagatcgatgacggttcgactgtttactcagtggaggagttgttagctatgatcttgggttatgcctcaaatctagctgagttccatgctaaaatcccagtgaaggatatggttgtttcagttccaccttactttggacaggctgagagacggggtttgatccaggcttctcagttggctggggttaatgtcctctccctggttaatgagcattccggtgctgctttgcaatatgggattgataaggattttgctaatgggtcgagacatgtcatattttatgacatgggttcaagtagtacttacgcagcccttgtctattactcagcttacagtgagaaggaatatggcaagactgtttctgtcaaccaatttcaggtcaaggatgttagatgggacttgggacttggaggacagagtatggagatgcgcttggtagagcactttgcagatgagtttaataaacagctcggtaatggagttgatgtgaggaagttccccaaagcaatggctaaattgaaaaaacaagtcaagcgtacaaaggaaattttgagtgcaaacactgcggctccaatatctgtggaatctcttcatgatgatcgtgacttcaggagcacaattacccgtgagaagtttgaggaactgtgtaaagatctgtgggagagatctcttacacctttaaaagatgtgctcaagcattcaggtttgaagattgatgatatatctgcagtggaactaataggaggagctactagagttcccaaactacagagcacaatccaggaatttattgggaaacaacagttagacaaacatctagacgctgatgaggctattgtcctcggctcagcactacatgctgctaacttgagcgatggaattaaattgaaacgtaggctaggtatagttgatggttccccctatggttttctggttgagttggaaggccctaatgttaagaaagatgagagcacaaagcagcaactcgtaccacggatgaaaaagctacccagcaagatgttcagatcctttgtccttgacaaagattttgacgtgtcacttgcttatgagtctgagggtattctaccaccaggaaccacctcccctgtgtttgcacagtattctgtctctggtttggcggatgcatctgagaaatattcttctcggaatctatcagcacctatcaaggcaaatctgcatttctctctaagtagaagtgggattctcagtctagatcgaggagatgctgtaattgaaatcacagaatgggtagacgttcctaagaagaacgtgactattgatagtaacacaactacatcaacaggcaatgccactgacgagaattcacaagaaaataaagaagacctgcaaaccgatgctgaaaacagcactgcttcaaatacaacagcagaagagccagctgttgcttctctgggcacagaaaaaaagctgaagaagcggacattcagaatacctctgaaggtagttgagaaaactgttggacctggagcaccattttcgaaagagtctcttgctgaagctaagataaaattagaagccttggacaagaaagatagggaaagaagaagaacggctgagttaaaaaacaaccttgaatcttatatatatgctaccaaagagaagctggaaacacccgagtttgaaaagatatccacccaagaagagcgcaaggcgtttgttgaaaagcttgatgaggtgcaagattggctttacatggatggagaagatgctaatgccacagagtttgagaagcggcttgactcacttaaagccatcggcagtcccatatctttccgatcagaggagcttacagcacgaccagtagcaattgaatatgctaggaaatacctaactgaactcaaagagatcataaaagaatgggagacgaacaaaacttggcttccaaaagaaaaaatcgacgaggtctcaaaggaagcagagaaagtaaaaagctggttagataagaatgtggctgagcaagaaaagacttctctgtggagcaaaccggtgttcacgtccactgaagtgtacgctaaagtatttactctacaagacaaggtcacaaaggtgaataagatcccaaagccaaagccaaagatagagaaagtaaccaagacggagaacacaacaaaggaggaggaacaatcaaaatcctctgatgaagctgccaaagaagaagaaagtcacgacgagctttgattaaggatatataataaatagagttttcgttaatttttgtgtttttaagagggaaaataggattaaaagtaggcagctgagatgagcaaaaggattttattcctttctcctcaacttcttcacatcaccattagaaacggaatattctgtgtttttgtttttcattatatcaagttttggtctctctatttctataactgaatcttcaatatatttagtagaagtttataa

SEQ ID NO: 44821 - protein, 867 aa, Arabidopsis thaliana
  peptide (1)..(867): Ceres Seq. ID no. 12562109
  misc_feature (25)..(860): Homolog of NCBI NO: 40788905 NR Description: KIAA0201 [Homo sapiens]
  misc_feature (25)..(846): Homolog of NCBI NO: 30525062 NR Description: heat shock protein 4 [Cyprinus carpio]
  misc_feature (3)..(789): Homolog of NCBI NO: 10720182 NR Description: 150 kDa oxygen-regulated protein precursor
  misc_feature (3)..(789): Homolog of NCBI NO: 40807010 NR Description: Orp150 protein [Rattus norvegicus]
  misc_feature (3)..(850): Homolog of NCBI NO: 28838718 NR Description: Similar to oxygen regulated protein (150kD)
  misc_feature (3)..(425): Homolog of NCBI NO: 28828809 NR Description: similar to heat shock protein
  misc_feature (446)..(866): Homolog of NCBI NO: 28828809 NR Description: similar to heat shock protein
  misc_feature (537)..(826): Homolog of NCBI NO: 7488120 NR Description: probable heat shock protein 110 - Arabidopsis
  misc_feature (537)..(867): Homolog of NCBI NO: 25407544 NR Description: HSP like protein [imported] - Arabidopsis
  misc_feature (2)..(468): Homolog of NCBI NO: 7488118 NR Description: probable growth regulator - Arabidopsis thaliana
  misc_feature (25)..(860): Homolog of NCBI NO: 40788905 NR Description: KIAA0201 [Homo sapiens]
  misc_feature (25)..(846): Homolog of NCBI NO: 30525062 NR Description: heat shock protein 4 [Cyprinus carpio]
  misc_feature (3)..(789): Homolog of NCBI NO: 10720182 NR Description: 150 kDa oxygen-regulated protein precursor
  misc_feature (3)..(789): Homolog of NCBI NO: 40807010 NR Description: Orp150 protein [Rattus norvegicus]
  misc_feature (3)..(850): Homolog of NCBI NO: 28838718 NR Description: Similar to oxygen regulated protein (150kD)
  misc_feature (3)..(425): Homolog of NCBI NO: 28828809 NR Description: similar to heat shock protein
  misc_feature (446)..(866): Homolog of NCBI NO: 28828809 NR Description: similar to heat shock protein
  misc_feature (537)..(826): Homolog of NCBI NO: 7488120 NR Description: probable heat shock protein 110 - Arabidopsis
  misc_feature (537)..(867): Homolog of NCBI NO: 25407544 NR Description: HSP like protein [imported] - Arabidopsis
  misc_feature (2)..(468): Homolog of NCBI NO: 7488118 NR Description: probable growth regulator - Arabidopsis thaliana
MGKIFSWLVVLLSLISLVPVPSESAVLSVDLGSEWVKVAVVNLKRGQSPISVAINEMSKRKSPALVAFQSGDRLLGEEAAGITARYPNKVYSQLRDMVGKPFKHVKDFIDSVYLPFDIVEDSRGAVGIKIDDGSTVYSVEELLAMILGYASNLAEFHAKIPVKDMVVSVPPYFGQAERRGLIQASQLAGVNVLSLVNEHSGAALQYGIDKDFANGSRHVIFYDMGSSSTYAALVYYSAYSEKEYGKTVSVNQFQVKDVRWDLGLGGQSMEMRLVEHFADEFNKQLGNGVDVRKFPKAMAKLKKQVKRTKEILSANTAAPISVESLHDDRDFRSTITREKFEELCKDLWERSLTPLKDVLKHSGLKIDDISAVELIGGATRVPKLQSTIQEFIGKQQLDKHLDADEAIVLGSALHAANLSDGIKLKRRLGIVDGSPYGFLVELEGPNVKKDESTKQQLVPRMKKLPSKMFRSFVLDKDFDVSLAYESEGILPPGTTSPVFAQYSVSGLADASEKYSSRNLSAPIKANLHFSLSRSGILSLDRGDAVIEITEWVDVPKKNVTIDSNTTTSTGNATDENSQENKEDLQTDAENSTASNTTAEEPAVASLGTEKKLKKRTFRIPLKVVEKTVGPGAPFSKESLAEAKIKLEALDKKDRERRRTAELKNNLESYIYATKEKLETPEFEKISTQEERKAFVEKLDEVQDWLYMDGEDANATEFEKRLDSLKAIGSPISFRSEELTARPVAIEYARKYLTELKEIIKEWETNKTWLPKEKIDEVSKEAEKVKSWLDKNVAEQEKTSLWSKPVFTSTEVYAKVFTLQDKVTKVNKIPKPKPKIEKVTKTENTTKEEEQSKSSDEAAKEEESHDEL

SEQ ID NO: 44822 - protein, 811 aa, Arabidopsis thaliana
  peptide (1)..(811): Ceres Seq. ID no. 12562110
  misc_feature (1)..(804): Homolog of NCBI NO: 40788905 NR Description: KIAA0201 [Homo sapiens]
  misc_feature (1)..(790): Homolog of NCBI NO: 30525062 NR Description: heat shock protein 4 [Cyprinus carpio]
  misc_feature (1)..(733): Homolog of NCBI NO: 10720182 NR Description: 150 kDa oxygen-regulated protein precursor
  misc_feature (1)..(733): Homolog of NCBI NO: 40807010 NR Description: Orp150 protein [Rattus norvegicus]
  misc_feature (1)..(794): Homolog of NCBI NO: 28838718 NR Description: Similar to oxygen regulated protein (150kD)
  misc_feature (1)..(369): Homolog of NCBI NO: 28828809 NR Description: similar to heat shock protein
  misc_feature (390)..(810): Homolog of NCBI NO: 28828809 NR Description: similar to heat shock protein
  misc_feature (481)..(770): Homolog of NCBI NO: 7488120 NR Description: probable heat shock protein 110 - Arabidopsis
  misc_feature (481)..(811): Homolog of NCBI NO: 25407544 NR Description: HSP like protein [imported] - Arabidopsis
  misc_feature (1)..(412): Homolog of NCBI NO: 7488118 NR Description: probable growth regulator - Arabidopsis thaliana
  misc_feature (1)..(804): Homolog of NCBI NO: 40788905 NR Description: KIAA0201 [Homo sapiens]
  misc_feature (1)..(790): Homolog of NCBI NO: 30525062 NR Description: heat shock protein 4 [Cyprinus carpio]
  misc_feature (1)..(733): Homolog of NCBI NO: 10720182 NR Description: 150 kDa oxygen-regulated protein precursor
  misc_feature (1)..(733): Homolog of NCBI NO: 40807010 NR Description: Orp150 protein [Rattus norvegicus]
  misc_feature (1)..(794): Homolog of NCBI NO: 28838718 NR Description: Similar to oxygen regulated protein (150kD)
  misc_feature (1)..(369): Homolog of NCBI NO: 28828809 NR Description: similar to heat shock protein
  misc_feature (390)..(810): Homolog of NCBI NO: 28828809 NR Description: similar to heat shock protein
  misc_feature (481)..(770): Homolog of NCBI NO: 7488120 NR Description: probable heat shock protein 110 - Arabidopsis
  misc_feature (481)..(811): Homolog of NCBI NO: 25407544 NR Description: HSP like protein [imported] - Arabidopsis
  misc_feature (1)..(412): Homolog of NCBI NO: 7488118 NR Description: probable growth regulator - Arabidopsis thaliana
MSKRKSPALVAFQSGDRLLGEEAAGITARYPNKVYSQLRDMVGKPFKHVKDFIDSVYLPFDIVEDSRGAVGIKIDDGSTVYSVEELLAMILGYASNLAEFHAKIPVKDMVVSVPPYFGQAERRGLIQASQLAGVNVLSLVNEHSGAALQYGIDKDFANGSRHVIFYDMGSSSTYAALVYYSAYSEKEYGKTVSVNQFQVKDVRWDLGLGGQSMEMRLVEHFADEFNKQLGNGVDVRKFPKAMAKLKKQVKRTKEILSANTAAPISVESLHDDRDFRSTITREKFEELCKDLWERSLTPLKDVLKHSGLKIDDISAVELIGGATRVPKLQSTIQEFIGKQQLDKHLDADEAIVLGSALHAANLSDGIKLKRRLGIVDGSPYGFLVELEGPNVKKDESTKQQLVPRMKKLPSKMFRSFVLDKDFDVSLAYESEGILPPGTTSPVFAQYSVSGLADASEKYSSRNLSAPIKANLHFSLSRSGILSLDRGDAVIEITEWVDVPKKNVTIDSNTTTSTGNATDENSQENKEDLQTDAENSTASNTTAEEPAVASLGTEKKLKKRTFRIPLKVVEKTVGPGAPFSKESLAEAKIKLEALDKKDRERRRTAELKNNLESYIYATKEKLETPEFEKISTQEERKAFVEKLDEVQDWLYMDGEDANATEFEKRLDSLKAIGSPISFRSEELTARPVAIEYARKYLTELKEIIKEWETNKTWLPKEKIDEVSKEAEKVKSWLDKNVAEQEKTSLWSKPVFTSTEVYAKVFTLQDKVTKVNKIPKPKPKIEKVTKTENTTKEEEQSKSSDEAAKEEESHDEL

SEQ ID NO: 44823 - protein, 771 aa, Arabidopsis thaliana
  peptide (1)..(771): Ceres Seq. ID no. 12562111
  misc_feature (1)..(764): Homolog of NCBI NO: 40788905 NR Description: KIAA0201 [Homo sapiens]
  misc_feature (1)..(750): Homolog of NCBI NO: 30525062 NR Description: heat shock protein 4 [Cyprinus carpio]
  misc_feature (1)..(693): Homolog of NCBI NO: 10720182 NR Description: 150 kDa oxygen-regulated protein precursor
  misc_feature (1)..(693): Homolog of NCBI NO: 40807010 NR Description: Orp150 protein [Rattus norvegicus]
  misc_feature (1)..(754): Homolog of NCBI NO: 28838718 NR Description: Similar to oxygen regulated protein (150kD)
  misc_feature (1)..(329): Homolog of NCBI NO: 28828809 NR Description: similar to heat shock protein
  misc_feature (350)..(770): Homolog of NCBI NO: 28828809 NR Description: similar to heat shock protein
  misc_feature (441)..(730): Homolog of NCBI NO: 7488120 NR Description: probable heat shock protein 110 - Arabidopsis
  misc_feature (441)..(771): Homolog of NCBI NO: 25407544 NR Description: HSP like protein [imported] - Arabidopsis
  misc_feature (1)..(372): Homolog of NCBI NO: 7488118 NR Description: probable growth regulator - Arabidopsis thaliana
  misc_feature (1)..(764): Homolog of NCBI NO: 40788905 NR Description: KIAA0201 [Homo sapiens]
  misc_feature (1)..(750): Homolog of NCBI NO: 30525062 NR Description: heat shock protein 4 [Cyprinus carpio]
  misc_feature (1)..(693): Homolog of NCBI NO: 10720182 NR Description: 150 kDa oxygen-regulated protein precursor
  misc_feature (1)..(693): Homolog of NCBI NO: 40807010 NR Description: Orp150 protein [Rattus norvegicus]
  misc_feature (1)..(754): Homolog of NCBI NO: 28838718 NR Description: Similar to oxygen regulated protein (150kD)
  misc_feature (1)..(329): Homolog of NCBI NO: 28828809 NR Description: similar to heat shock protein
  misc_feature (350)..(770): Homolog of NCBI NO: 28828809 NR Description: similar to heat shock protein
  misc_feature (441)..(730): Homolog of NCBI NO: 7488120 NR Description: probable heat shock protein 110 - Arabidopsis
  misc_feature (441)..(771): Homolog of NCBI NO: 25407544 NR Description: HSP like protein [imported] - Arabidopsis
  misc_feature (1)..(372): Homolog of NCBI NO: 7488118 NR Description: probable growth regulator - Arabidopsis thaliana
MVGKPFKHVKDFIDSVYLPFDIVEDSRGAVGIKIDDGSTVYSVEELLAMILGYASNLAEFHAKIPVKDMVVSVPPYFGQAERRGLIQASQLAGVNVLSLVNEHSGAALQYGIDKDFANGSRHVIFYDMGSSSTYAALVYYSAYSEKEYGKTVSVNQFQVKDVRWDLGLGGQSMEMRLVEHFADEFNKQLGNGVDVRKFPKAMAKLKKQVKRTKEILSANTAAPISVESLHDDRDFRSTITREKFEELCKDLWERSLTPLKDVLKHSGLKIDDISAVELIGGATRVPKLQSTIQEFIGKQQLDKHLDADEAIVLGSALHAANLSDGIKLKRRLGIVDGSPYGFLVELEGPNVKKDESTKQQLVPRMKKLPSKMFRSFVLDKDFDVSLAYESEGILPPGTTSPVFAQYSVSGLADASEKYSSRNLSAPIKANLHFSLSRSGILSLDRGDAVIEITEWVDVPKKNVTIDSNTTTSTGNATDENSQENKEDLQTDAENSTASNTTAEEPAVASLGTEKKLKKRTFRIPLKVVEKTVGPGAPFSKESLAEAKIKLEALDKKDRERRRTAELKNNLESYIYATKEKLETPEFEKISTQEERKAFVEKLDEVQDWLYMDGEDANATEFEKRLDSLKAIGSPISFRSEELTARPVAIEYARKYLTELKEIIKEWETNKTWLPKEKIDEVSKEAEKVKSWLDKNVAEQEKTSLWSKPVFTSTEVYAKVFTLQDKVTKVNKIPKPKPKIEKVTKTENTTKEEEQSKSSDEAAKEEESHDEL

SEQ ID NO: 44824 - DNA, 3102 bp, Arabidopsis thaliana
  misc_feature (1)..(3102): Ceres Seq. ID no. 12559357
  misc_feature: MA Experiment ID: 20001450 Result: Up-regulated in Transcription
  misc_feature: MA Experiment 20001450 PARAMETER Experiment Name: At_Far-red-induction_P Parameter: Age (day) Value: 7
  misc_feature: MA Experiment 20001450 PARAMETER Experiment Name: At_Far-red-induction_P Parameter: Light Value: Far-red vs. White
  misc_feature: MA Experiment 20001450 PARAMETER Experiment Name: At_Far-red-induction_P Parameter: Organism Value: A. thaliana
  misc_feature: MA Experiment 20001450 PARAMETER Experiment Name: At_Far-red-induction_P Parameter: Plant Line Value: Columbia
  misc_feature: MA Experiment 20001450 PARAMETER Experiment Name: At_Far-red-induction_P Parameter: Timepoint (hr) Value: 8
  misc_feature: MA Experiment 20001450 PARAMETER Experiment Name: At_Far-red-induction_P Parameter: Tissue Value: Whole Plant
gagaaactttcttctctctctctctctccgccattgttcgttccctctccacggtaatctatatccacccgtcgtcaatcggaactttacgaactccttatcaatcgtattttcactttccaattctgagttctcttctcgtttcgtcctctcttcctccgtatccacgggtctcgctttcggtttctagggtttcgcggttctgatcacaagttctgcttcaattgtaagcgatttgatcgcaagtagctgttaaatcggtgcgtaattcaacttttgaaatctcaaggtttagtctctgcaattctgattttgaacacagctagctagtagcagatttaagagttcgtcaaattaggattttgggtttgtttgggtccctttctcaccgaagttctgtatggcggctgggaggaatataagatatccagaccatgaactgagagaccaggaatcgaattctagattttccaggcgggatagtgcttatgcgaacgaggattataatcatgttaggaacggtgctattgataatggaaagggacgggttagtaatctaagacacggggatagagatagaattaagtctggagctagacaggaagagaacaaaatggttagtagtgggtttcggttatcgaagagcaatccaggtagtagagaagtatttatcgatcttggtcctaaaagatgcgggttttcagctaggtctgtggacagggaaccaggcgagctctctagtgagagtgggtcggatgatttgattgagtcggaatcactggcgaaagttaatggagttgtgaaggaggtagagaatagagctcaaagtcctgtggaaaagaagagaaagttttcaccaatagtatgggatagggatgaccatgagagaagtaatttgagcagaaatgaaaaacctgtggaggtcactcctcttcctcccccaccaccactagttaagaggtcaagccagtcacctagtgtcagttgtggtggtaattctcattattcacctgcaaagagtgacatgcatcaagatcctgtggaagttggtgtttctgcggtttctatgcctgctttgtcaccttcggtagagatgtcctctttgtgtgtggtagaacagtcatcaaatgctgagcaggatgacaaacaagagcatgcaacacacctggaagaggatgaaaacatgccaacacggcatatatcatcctctaggtgggctgctggtaatagttctccaactgatgaagttgaaatagtagaagaagttggggaaaagaaaaggaggaagaaaccatttcccgtgcaggggagatttcgcaatacctctcaaacacctgaggtcggggagttagtgagggaaggttatagatcatctgattccgatgaaagggggcaccattctttaccgggaagcagagatgattttgaggagagagatgctgttaagagtgacaagatggaaatagatgaggaggaacacagaagagaaaactctgttgacagccttagtgaaacagattcagatgacgaatatgtacggcatgagacacctgaacctgccagtactccactgagaagtataaacatgctccagggttgtagaagtgttgatgaatttgagaggttaaataagatcgatgaaggtacttatggtgttgtttatagagcaaaggataagaagacaggcgaaattgtggcattgaagaaggtgaagatggaaaaagaaagagaaggttttccattgacttctcttagggaaattaacatcctcctttcttttcatcatccatcaatagtggatgttaaagaggtggtcgtgggtagcagccttgatagcatattcatggtgatggaatacatggaacatgatcttaaagcattgatggagacaatgaagcagcgttttagtcaaagtgaagttaagtgcttaatgcttcaacttttagagggcgtcaagtatcttcacgacaactgggtgcttcatcgagatttgaaaacatctaacctgcttttaaacaatcggggtgagttgaagatatgtgactttggtttggctcggcaatatggcagcccgctcaagccttatactcatctggttgttacgctttggtacagggcacctgaacttctcttgggagcaaaacaatattctacagccattgacatgtggtcactgggctgtatcatggcagaactattaatgaaggcgccattgttcaatgggaaaacggagtttgatcaacttgacaagattttcagaatccttggtactcccaatgaatctatttggcctgggttctctaaactacctggagtcaaggtcaactttgtcaagcatcagtataacctattacgtaagaaattcccagccacttcgttcactggtgcaccagttctgtccgatgctgggtttgacttactgaacaagctcctaacgtacgatcctgaaaggagaataactgttaatgaagctctaaagcatgattggttccgcgaagtccctctgccaaaatccaaagatttcatgcctacttttcctgctcaacatgcccaagacaggcgtgggaggagaatggtaaagagccctgatcctttggaagagcaacgtaggaaggaattaacgcaaaccgaacttgggtctggcggtctgtttggctgaagtacagcacaccggtcgaagatagcagttggaatacaaccttgatattctcaaataccttggaattaccacattttaggcgagggctgctgcttaagcggaggttggaatatttgtatctcagaatatcattcatgctttctttattcactttgagggtccgtggtgatttgtgaagatgattttcctcctttcgccactgagaatccttgcaggtttaatgtgttcacaagctaggctggccagttagtgctatggctttctgacagtgcttgttttgtaagacaatctccaatgtatagctctatatcttactctaaaatagagttgctttctctccaatgtatatttctattttctagtctaaaaaagaatatttttagaaatattctatttctatttatatactaataccttttaattatataatttacaatttactc

SEQ ID NO: 44825 - protein, 752 aa, Arabidopsis thaliana
  peptide (1)..(752): Ceres Seq. ID no. 12559358
  misc_feature (406)..(697): Pfam Name: Protein kinase domain Pfam Description: Protein kinase domain
  misc_feature (199)..(733): Homolog of NCBI NO: 16332362 NR Description: cell division cycle 2-like 1 (PITSLRE proteins)
  misc_feature (199)..(733): Homolog of NCBI NO: 3978440 NR Description: PITSLRE protein kinase alpha SV5 isoform [Homo
  misc_feature (238)..(733): Homolog of NCBI NO: 507164 NR Description: PITSLRE alpha 2-4
  misc_feature (238)..(733): Homolog of NCBI NO: 2134385 NR Description: protein kinase - chicken
  misc_feature (199)..(733): Homolog of NCBI NO: 507168 NR Description: PITSLRE alpha 2-1
  misc_feature (199)..(733): Homolog of NCBI NO: 507162 NR Description: PITSLRE alpha 2-3
  misc_feature (199)..(733): Homolog of NCBI NO: 507160 NR Description: PITSLRE alpha 2-2
  misc_feature (374)..(713): Homolog of NCBI NO: 15242731 NR Description: protein kinase
  misc_feature (229)..(752): Homolog of NCBI NO: 38344237 NR Description: OJ991113_30.14 [Oryza sativa (japonica
  misc_feature (1)..(572): Homolog of NCBI NO: 11072020 NR Description: F12A21.29 [Arabidopsis thaliana]
MAAGRNIRYPDHELRDQESNSRFSRRDSAYANEDYNHVRNGAIDNGKGRVSNLRHGDRDRIKSGARQEENKMVSSGFRLSKSNPGSREVFIDLGPKRCGFSARSVDREPGELSSESGSDDLIESESLAKVNGVVKEVENRAQSPVEKKRKFSPIVWDRDDHERSNLSRNEKPVEVTPLPPPPPLVKRSSQSPSVSCGGNSHYSPAKSDMHQDPVEVGVSAVSMPALSPSVEMSSLCVVEQSSNAEQDDKQEHATHLEEDENMPTRHISSSRWAAGNSSPTDEVEIVEEVGEKKRRKKPFPVQGRFRNTSQTPEVGELVREGYRSSDSDERGHHSLPGSRDDFEERDAVKSDKMEIDEEEHRRENSVDSLSETDSDDEYVRHETPEPASTPLRSINMLQGCRSVDEFERLNKIDEGTYGVVYRAKDKKTGEIVALKKVKMEKEREGFPLTSLREINILLSFHHPSIVDVKEVVVGSSLDSIFMVMEYMEHDLKALMETMKQRFSQSEVKCLMLQLLEGVKYLHDNWVLHRDLKTSNLLLNNRGELKICDFGLARQYGSPLKPYTHLVVTLWYRAPELLLGAKQYSTAIDMWSLGCIMAELLMKAPLFNGKTEFDQLDKIFRILGTPNESIWPGFSKLPGVKVNFVKHQYNLLRKKFPATSFTGAPVLSDAGFDLLNKLLTYDPERRITVNEALKHDWFREVPLPKSKDFMPTFPAQHAQDRRGRRMVKSPDPLEEQRRKELTQTELGSGGLFG

SEQ ID NO: 44826 - protein, 681 aa, Arabidopsis thaliana
  peptide (1)..(681): Ceres Seq. ID no. 12559359
  misc_feature (335)..(626): Pfam Name: Protein kinase domain Pfam Description: Protein kinase domain
  misc_feature (128)..(662): Homolog of NCBI NO: 16332362 NR Description: cell division cycle 2-like 1 (PITSLRE proteins)
  misc_feature (128)..(662): Homolog of NCBI NO: 3978440 NR Description: PITSLRE protein kinase alpha SV5 isoform [Homo
  misc_feature (167)..(662): Homolog of NCBI NO: 507164 NR Description: PITSLRE alpha 2-4
  misc_feature (167)..(662): Homolog of NCBI NO: 2134385 NR Description: protein kinase - chicken
  misc_feature (128)..(662): Homolog of NCBI NO: 507168 NR Description: PITSLRE alpha 2-1
  misc_feature (128)..(662): Homolog of NCBI NO: 507162 NR Description: PITSLRE alpha 2-3
  misc_feature (128)..(662): Homolog of NCBI NO: 507160 NR Description: PITSLRE alpha 2-2
  misc_feature (303)..(642): Homolog of NCBI NO: 15242731 NR Description: protein kinase
  misc_feature (158)..(681): Homolog of NCBI NO: 38344237 NR Description: OJ991113_30.14 [Oryza sativa (japonica
  misc_feature (1)..(501): Homolog of NCBI NO: 11072020 NR Description: F12A21.29 [Arabidopsis thaliana]
MVSSGFRLSKSNPGSREVFIDLGPKRCGFSARSVDREPGELSSESGSDDLIESESLAKVNGVVKEVENRAQSPVEKKRKFSPIVWDRDDHERSNLSRNEKPVEVTPLPPPPPLVKRSSQSPSVSCGGNSHYSPAKSDMHQDPVEVGVSAVSMPALSPSVEMSSLCVVEQSSNAEQDDKQEHATHLEEDENMPTRHISSSRWAAGNSSPTDEVEIVEEVGEKKRRKKPFPVQGRFRNTSQTPEVGELVREGYRSSDSDERGHHSLPGSRDDFEERDAVKSDKMEIDEEEHRRENSVDSLSETDSDDEYVRHETPEPASTPLRSINMLQGCRSVDEFERLNKIDEGTYGVVYRAKDKKTGEIVALKKVKMEKEREGFPLTSLREINILLSFHHPSIVDVKEVVVGSSLDSIFMVMEYMEHDLKALMETMKQRFSQSEVKCLMLQLLEGVKYLHDNWVLHRDLKTSNLLLNNRGELKICDFGLARQYGSPLKPYTHLVVTLWYRAPELLLGAKQYSTAIDMWSLGCIMAELLMKAPLFNGKTEFDQLDKIFRILGTPNESIWPGFSKLPGVKVNFVKHQYNLLRKKFPATSFTGAPVLSDAGFDLLNKLLTYDPERRITVNEALKHDWFREVPLPKSKDFMPTFPAQHAQDRRGRRMVKSPDPLEEQRRKELTQTELGSGGLFG

SEQ ID NO: 44827 - protein, 544 aa, Arabidopsis thaliana
  peptide (1)..(544): Ceres Seq. ID no. 12559360
  misc_feature (198)..(489): Pfam Name: Protein kinase domain Pfam Description: Protein kinase domain
  misc_feature (1)..(525): Homolog of NCBI NO: 16332358 NR Description: cell division cycle 2-like 1 (PITSLRE proteins)
  misc_feature (1)..(525): Homolog of NCBI NO: 3978440 NR Description: PITSLRE protein kinase alpha SV5 isoform [Homo
  misc_feature (30)..(525): Homolog of NCBI NO: 507164 NR Description: PITSLRE alpha 2-4
  misc_feature (30)..(525): Homolog of NCBI NO: 2134385 NR Description: protein kinase - chicken
  misc_feature (1)..(525): Homolog of NCBI NO: 507168 NR Description: PITSLRE alpha 2-1
  misc_feature (1)..(525): Homolog of NCBI NO: 507162 NR Description: PITSLRE alpha 2-3
  misc_feature (1)..(525): Homolog of NCBI NO: 507160 NR Description: PITSLRE alpha 2-2
  misc_feature (166)..(505): Homolog of NCBI NO: 15242731 NR Description: protein kinase
  misc_feature (21)..(544): Homolog of NCBI NO: 38344237 NR Description: OJ991113_30.14 [Oryza sativa (japonica
  misc_feature (1)..(364): Homolog of NCBI NO: 11072020 NR Description: F12A21.29 [Arabidopsis thaliana]
MHQDPVEVGVSAVSMPALSPSVEMSSLCVVEQSSNAEQDDKQEHATHLEEDENMPTRHISSSRWAAGNSSPTDEVEIVEEVGEKKRRKKPFPVQGRFRNTSQTPEVGELVREGYRSSDSDERGHHSLPGSRDDFEERDAVKSDKMEIDEEEHRRENSVDSLSETDSDDEYVRHETPEPASTPLRSINMLQGCRSVDEFERLNKIDEGTYGVVYRAKDKKTGEIVALKKVKMEKEREGFPLTSLREINILLSFHHPSIVDVKEVVVGSSLDSIFMVMEYMEHDLKALMETMKQRFSQSEVKCLMLQLLEGVKYLHDNWVLHRDLKTSNLLLNNRGELKICDFGLARQYGSPLKPYTHLVVTLWYRAPELLLGAKQYSTAIDMWSLGCIMAELLMKAPLFNGKTEFDQLDKIFRILGTPNESIWPGFSKLPGVKVNFVKHQYNLLRKKFPATSFTGAPVLSDAGFDLLNKLLTYDPERRITVNEALKHDWFREVPLPKSKDFMPTFPAQHAQDRRGRRMVKSPDPLEEQRRKELTQTELGSGGLFG

SEQ ID NO: 44828 - DNA, 1580 bp, Arabidopsis thaliana
  misc_feature (1)..(1580): Ceres Seq. ID no. 12603792
  misc_feature: MA Experiment ID: 20000180 Result: Up-regulated in Transcription
  misc_feature: MA Experiment 20000180 PARAMETER Experiment Name: At_Germinating_Seeds_P Parameter: Age (hr) Value: 24 vs. 0
  misc_feature: MA Experiment 20000180 PARAMETER Experiment Name: At_Germinating_Seeds_P Parameter: Tissue Value: Germinating Seeds
  misc_feature: MA Experiment ID: 20000185 Result: Up-regulated in Transcription
  misc_feature: MA Experiment 20000185 PARAMETER Experiment Name: At_Roots__P Parameter: Age (day) Value: 7 vs. 21
  misc_feature: MA Experiment 20000185 PARAMETER Experiment Name: At_Roots__P Parameter: Organism Value: A. thaliana
  misc_feature: MA Experiment 20000185 PARAMETER Experiment Name: At_Roots__P Parameter: Tissue Value: Roots vs. Whole Plant
  misc_feature: MA Experiment ID: 20000265 Result: Up-regulated in Transcription
  misc_feature: MA Experiment 20000265 PARAMETER Experiment Name: At_Open_Flower_P Parameter: Age (day) Value: 21
  misc_feature: MA Experiment 20000265 PARAMETER Experiment Name: At_Open_Flower_P Parameter: Plant Line Value: WS
  misc_feature: MA Experiment 20000265 PARAMETER Experiment Name: At_Open_Flower_P Parameter: Tissue Value: Closed Flower vs. Whole Plant
  misc_feature: MA Experiment ID: 20000286 Result: Up-regulated in Transcription
  misc_feature: MA Experiment 20000286 PARAMETER Experiment Name: At_Open_Flower_P Parameter: Age (day) Value: 21
  misc_feature: MA Experiment 20000286 PARAMETER Experiment Name: At_Open_Flower_P Parameter: Plant Line Value: WS
  misc_feature: MA Experiment 20000286 PARAMETER Experiment Name: At_Open_Flower_P Parameter: Tissue Value: Half Open vs. Whole Plant
  misc_feature: MA Experiment ID: 20000438 Result: Down-regulated in Transcription
  misc_feature: MA Experiment 20000438 PARAMETER Experiment Name: At_Shoots__P Parameter: Age (day) Value: 14
  misc_feature: MA Experiment 20000438 PARAMETER Experiment Name: At_Shoots__P Parameter: Tissue Value: Shoots vs. Whole Plant
  misc_feature: MA Experiment ID: 20000439 Result: Up-regulated in Transcription
  misc_feature: MA Experiment 20000439 PARAMETER Experiment Name: At_Roots__P Parameter: Age (day) Value: 14 vs. 21
  misc_feature: MA Experiment 20000439 PARAMETER Experiment Name: At_Roots__P Parameter: Organism Value: A. thaliana
  misc_feature: MA Experiment 20000439 PARAMETER Experiment Name: At_Roots__P Parameter: Tissue Value: Roots vs. Whole Plant
  misc_feature: MA Experiment ID: 20000453 Result: Up-regulated in Transcription
  misc_feature: MA Experiment 20000453 PARAMETER Experiment Name: At_100uM_ABA_P Parameter: Age (day) Value: 15
  misc_feature: MA Experiment 20000453 PARAMETER Experiment Name: At_100uM_ABA_P Parameter: Organism Value: A. thaliana
  misc_feature: MA Experiment 20000453 PARAMETER Experiment Name: At_100uM_ABA_P Parameter: Plant Line Value: WS
  misc_feature: MA Experiment 20000453 PARAMETER Experiment Name: At_100uM_ABA_P Parameter: Timepoint (hr) Value: 24
  misc_feature: MA Experiment 20000453 PARAMETER Experiment Name: At_100uM_ABA_P Parameter: Tissue Value: Aerial
  misc_feature: MA Experiment 20000453 PARAMETER Experiment Name: At_100uM_ABA_P Parameter: Treatment Value: 100uM ABA vs. No Treatment
  misc_feature: MA Experiment ID: 20000455 Result: Up-regulated in Transcription
  misc_feature: MA Experiment 20000455 PARAMETER Experiment Name: At_100uM_ABA_P Parameter: Age (day) Value: 16
  misc_feature: MA Experiment 20000455 PARAMETER Experiment Name: At_100uM_ABA_P Parameter: Organism Value: A. thaliana
  misc_feature: MA Experiment 20000455 PARAMETER Experiment Name: At_100uM_ABA_P Parameter: Plant Line Value: WS
  misc_feature: MA Experiment 20000455 PARAMETER Experiment Name: At_100uM_ABA_P Parameter: Timepoint (hr) Value: 48
  misc_feature: MA Experiment 20000455 PARAMETER Experiment Name: At_100uM_ABA_P Parameter: Tissue Value: Aerial
  misc_feature: MA Experiment 20000455 PARAMETER Experiment Name: At_100uM_ABA_P Parameter: Treatment Value: 100uM ABA vs. No Treatment
gcttattagcaacaatgacagtaatggtcagctttgatcttctaaattgtttcatctttaccctcatattcctcatctcaactctctttctctttgttttattctataagaaaccaaacgatggatttgatgtacctccaagccctccttctcttcccatcattggtcatcttcatcttctcctctttgcttcaatccacaagtgttttcaaaaaatctcatccaaatacggaccttttctccatcttcgcattttccatgtccccattgttcttgtatcctctgcctcaacggcttacgatatcttcaagacaaacgacattaatgtctcttatcgtggtgatgttgcaatcgatgaatgcattgtgtttggttcttttggatatttccgagctccatgtgaagattactggaaattcatgagaaagctcatcatggccagggcactcggaccccaagcgctagagcggacacgtggtgttcgtgcagctgagctagagaggtttcatagaaaattactcgataaggctatgaaaaaacaaagccttaagatcggtgaagaagcaaggatactcgttaacaacaccctcggaaaaatgagcctaggaagtagtttttcaatagagaacaatgatgggacaaaagtttcagaatattctatcaagttagctgatttgtctcaaatgttttgtgtggcacaaatatttcataagccgcttgagaagctagggatctctcttttaaagaagcagattatggatgtttcacacaaatttgaggagttgctagaaaatattgttgtgaagtacgaggaaaaaatggacaaccatcaaagtactgaattcatggatgcattattggcagcttatcaagacgaaaacgcagagtataagatcactagaaaccatatcaaggcactactagcggagcttttctttggagccggtgaatcatcttcttcaacaacaaggtgggcaatgggagaaattttcaacaatcctaggatctttgagaaactaagaacagaaatcgattcagtggtggggacaacaaggttgattcaagaaagtgatctaccaaaacttccttacttgcaagcagtcgtgaaagaatctctaagattacacccggtgggagcggtcttgccaagagaatttacgcaagattgtaacattggagggttctatatacatgagggaacatcacttgtcgttaatgcttatgctgtgatgagagatcctgatatttgggaagatcctaatgagtttaagccggaaaggtttctagatgcctcaagattagggcaagaggaggagaaaaaggagaaaacactaaagttcctcccatttggcgctggaaggagaggatgtcctggattatatcttggttataccttagtagaaaccacaattggagtgatggtgcaatgctttgactgggaaatcgaaggagataaagtcaacatgcaagaaggttccggattaagatttttcttggatttggctcatccccttaagtgcactcctattcctcgaatcataaatcatgaaccttctaatacgcagattccaaattcgtga

SEQ ID NO: 44829 - protein, 525 aa, Arabidopsis thaliana
  peptide (1)..(525): Ceres Seq. ID no. 12603793
  misc_feature (44)..(513): Homolog of NCBI NO: 38344759 NR Description: OSJNBa0068L06.2 [Oryza sativa (japonica
  misc_feature (107)..(525): Homolog of NCBI NO: 30686008 NR Description: cytochrome P450 family [Arabidopsis thaliana]
  misc_feature (5)..(511): Homolog of NCBI NO: 15231047 NR Description: cytochrome P450, putative; protein id:
  misc_feature (5)..(525): Homolog of NCBI NO: 9294003 NR Description: cytochrome P450-like protein [Arabidopsis
  misc_feature (18)..(517): Homolog of NCBI NO: 7430617 NR Description: cytochrome P450 - Arabidopsis thaliana
  misc_feature (18)..(517): Homolog of NCBI NO: 15233774 NR Description: cytochrome p450 family; protein id: At4g15350.1
  misc_feature (5)..(525): Homolog of NCBI NO: 30685997 NR Description: cytochrome P450 family [Arabidopsis thaliana]
  misc_feature (5)..(511): Homolog of NCBI NO: 15231052 NR Description: cytochrome p450 family; protein id: At3g20130.1
  misc_feature (12)..(510): Homolog of NCBI NO: 15233772 NR Description: cytochrome p450 family; protein id: At4g15330.1
  misc_feature (5)..(525): Homolog of NCBI NO: 15218658 NR Description: cytochrome p450 family; protein id: At1g28430.1
LLATMTVMVSFDLLNCFIFTLIFLISTLFLFVLFYKKPNDGFDVPPSPPSLPIIGHLHLLLFASIHKCFQKISSKYGPFLHLRIFHVPIVLVSSASTAYDIFKTNDINVSYRGDVAIDECIVFGSFGYFRAPCEDYWKFMRKLIMARALGPQALERTRGVRAAELERFHRKLLDKAMKKQSLKIGEEARILVNNTLGKMSLGSSFSIENNDGTKVSEYSIKLADLSQMFCVAQIFHKPLEKLGISLLKKQIMDVSHKFEELLENIVVKYEEKMDNHQSTEFMDALLAAYQDENAEYKITRNHIKALLAELFFGAGESSSSTTRWAMGEIFNNPRIFEKLRTEIDSVVGTTRLIQESDLPKLPYLQAVVKESLRLHPVGAVLPREFTQDCNIGGFYIHEGTSLVVNAYAVMRDPDIWEDPNEFKPERFLDASRLGQEEEKKEKTLKFLPFGAGRRGCPGLYLGYTLVETTIGVMVQCFDWEIEGDKVNMQEGSGLRFFLDLAHPLKCTPIPRIINHEPSNTQIPNS

SEQ ID NO: 44830 - protein, 521 aa, Arabidopsis thaliana
  peptide (1)..(521): Ceres Seq. ID no. 12603794
  misc_feature (40)..(509): Homolog of NCBI NO: 38344759 NR Description: OSJNBa0068L06.2 [Oryza sativa (japonica
  misc_feature (103)..(521): Homolog of NCBI NO: 30686008 NR Description: cytochrome P450 family [Arabidopsis thaliana]
  misc_feature (1)..(507): Homolog of NCBI NO: 15231047 NR Description: cytochrome P450, putative; protein id:
  misc_feature (1)..(521): Homolog of NCBI NO: 9294003 NR Description: cytochrome P450-like protein [Arabidopsis
  misc_feature (14)..(513): Homolog of NCBI NO: 7430617 NR Description: cytochrome P450 - Arabidopsis thaliana
  misc_feature (14)..(513): Homolog of NCBI NO: 15233774 NR Description: cytochrome p450 family; protein id: At4g15350.1
  misc_feature (1)..(521): Homolog of NCBI NO: 30685997 NR Description: cytochrome P450 family [Arabidopsis thaliana]
  misc_feature (1)..(507): Homolog of NCBI NO: 15231052 NR Description: cytochrome p450 family; protein id: At3g20130.1
  misc_feature (8)..(506): Homolog of NCBI NO: 15233772 NR Description: cytochrome p450 family; protein id: At4g15330.1
  misc_feature (1)..(521): Homolog of NCBI NO: 15218658 NR Description: cytochrome p450 family; protein id: At1g28430.1
MTVMVSFDLLNCFIFTLIFLISTLFLFVLFYKKPNDGFDVPPSPPSLPIIGHLHLLLFASIHKCFQKISSKYGPFLHLRIFHVPIVLVSSASTAYDIFKTNDINVSYRGDVAIDECIVFGSFGYFRAPCEDYWKFMRKLIMARALGPQALERTRGVRAAELERFHRKLLDKAMKKQSLKIGEEARILVNNTLGKMSLGSSFSIENNDGTKVSEYSIKLADLSQMFCVAQIFHKPLEKLGISLLKKQIMDVSHKFEELLENIVVKYEEKMDNHQSTEFMDALLAAYQDENAEYKITRNHIKALLAELFFGAGESSSSTTRWAMGEIFNNPRIFEKLRTEIDSVVGTTRLIQESDLPKLPYLQAVVKESLRLHPVGAVLPREFTQDCNIGGFYIHEGTSLVVNAYAVMRDPDIWEDPNEFKPERFLDASRLGQEEEKKEKTLKFLPFGAGRRGCPGLYLGYTLVETTIGVMVQCFDWEIEGDKVNMQEGSGLRFFLDLAHPLKCTPIPRIINHEPSNTQIPNS

SEQ ID NO: 44831 - protein, 518 aa, Arabidopsis thaliana
  peptide (1)..(518): Ceres Seq. ID no. 12603795
  misc_feature (37)..(506): Homolog of NCBI NO: 38344759 NR Description: OSJNBa0068L06.2 [Oryza sativa (japonica
  misc_feature (100)..(518): Homolog of NCBI NO: 30686008 NR Description: cytochrome P450 family [Arabidopsis thaliana]
  misc_feature (1)..(504): Homolog of NCBI NO: 15231047 NR Description: cytochrome P450, putative; protein id:
  misc_feature (1)..(518): Homolog of NCBI NO: 9294003 NR Description: cytochrome P450-like protein [Arabidopsis
  misc_feature (11)..(510): Homolog of NCBI NO: 7430617 NR Description: cytochrome P450 - Arabidopsis thaliana
  misc_feature (11)..(510): Homolog of NCBI NO: 15233774 NR Description: cytochrome p450 family; protein id: At4g15350.1
  misc_feature (1)..(518): Homolog of NCBI NO: 30685997 NR Description: cytochrome P450 family [Arabidopsis thaliana]
  misc_feature (1)..(504): Homolog of NCBI NO: 15231052 NR Description: cytochrome p450 family; protein id: At3g20130.1
  misc_feature (5)..(503): Homolog of NCBI NO: 15233772 NR Description: cytochrome p450 family; protein id: At4g15330.1
  misc_feature (1)..(518): Homolog of NCBI NO: 15218658 NR Description: cytochrome p450 family; protein id: At1g28430.1
MVSFDLLNCFIFTLIFLISTLFLFVLFYKKPNDGFDVPPSPPSLPIIGHLHLLLFASIHKCFQKISSKYGPFLHLRIFHVPIVLVSSASTAYDIFKTNDINVSYRGDVAIDECIVFGSFGYFRAPCEDYWKFMRKLIMARALGPQALERTRGVRAAELERFHRKLLDKAMKKQSLKIGEEARILVNNTLGKMSLGSSFSIENNDGTKVSEYSIKLADLSQMFCVAQIFHKPLEKLGISLLKKQIMDVSHKFEELLENIVVKYEEKMDNHQSTEFMDALLAAYQDENAEYKITRNHIKALLAELFFGAGESSSSTTRWAMGEIFNNPRIFEKLRTEIDSVVGTTRLIQESDLPKLPYLQAVVKESLRLHPVGAVLPREFTQDCNIGGFYIHEGTSLVVNAYAVMRDPDIWEDPNEFKPERFLDASRLGQEEEKKEKTLKFLPFGAGRRGCPGLYLGYTLVETTIGVMVQCFDWEIEGDKVNMQEGSGLRFFLDLAHPLKCTPIPRIINHEPSNTQIPNS

SEQ ID NO: 44832 - DNA, 2763 bp, Arabidopsis thaliana
  misc_feature (1)..(2763): Ceres Seq. ID no. 13646334
  misc_feature: MA Experiment ID: 20000495 Result: Down-regulated in Transcription
  misc_feature: MA Experiment 20000495 PARAMETER Experiment Name: At_Guard_Cells_P Parameter: Harvest Date Value: 8/2/2002
  misc_feature: MA Experiment 20000495 PARAMETER Experiment Name: At_Guard_Cells_P Parameter: Organism Value: A. thaliana
  misc_feature: MA Experiment 20000495 PARAMETER Experiment Name: At_Guard_Cells_P Parameter: Tissue Value: Guard Cells vs. Leaves
gaaaaaatcgaagaaaattagaaaaatcggaagagcgatcgaagaggattttgaaccgccatggcttcttcttcgctctctaatctgatgctcgccattcatgagaagaagacgagctccgttgatctctaccgtcctctccgcaactacgttactttcacctactctgagcgcgaggctcagcttatagacgacgatctcgagaccttgaagcagctccgatccgatatagaacgcgtttccgatccttctccagctgctcggcgagaccttctcatctcctattacaaagttctttgtcttgtggagacgcgatttccaatttcccctgacaaggatcatgtcaacgccgtctctttcgtatggtacgatgctttcaagcaaaagcataaagctactcagcagaacattcatttggagaaagcagctgttctattcaatcttggtgctagctacagccagattggactcggtcatgaccgcaccaccgtcgatgggcgtcgtcaggcttcacatgcgttcatggctgcagcaggggcgttcgctcacttgagggataacgagtccattaaggcgacgatcgggccgagcactaccgtggatgtgtcggttgagtgtgttggaatgttggaacggttgatggtggcgcaggcgcaggaatgtgtctttgaaaataccattgctaaaggaagtactcctggtgtctctgctaaaattgctaggcaggttggcatattttatgaggaggctttatctgcgctaatcatttcgccattgaaggatcatttcgacaaaggctggatttctcatgtgcagctgaaagcagcactcttctatggtgaagcttgctttagatatggaaaagagttgcacgagaaagaggaaattgcagaagaaattgcacggctgaggagtggagccagccgtttggcagaagcaaagaagtcttcaaggggagctcctgctcagcttatagaagcgatgaacacactagagtctagcattaatggcaatttggatagggctgtcaaggaaaacgacagagtgtacctcatgagagttccttctccttcttctttgtctccacttcccgccttctcaatggttaagccaatgaacatgactgatattttggatgcaagcaaggaaaaaatgttttcaatccttgttccagacagcagtgcaaaggctctctctagatacactgagatggtcgatgatgtaattagaactcaggcggagagattacagcaagctagcgaactaactcgagttaggctcaaagagatggatcttccagattctattctcgctgtggatggtaattcagctcttcctgttgatcttaaagaagatgtagaagctgttcagatcagtggtggtccagctggcttggaagctgaactgcagcaacttagagatttgaagagggttaatcaggaactgttggtgcacactgaagagcttttgcagaaagaagcaactgaagattctcagttcagaagtcaatttgggactcggtggactaggcctcaatctagcacactgacaaagaacttgcaggataggctaaatcggtttgcagccaatttgaaacaagctggcgaaagtgatgttaagattgagcgatcagtgagagataactccgccctcatgtctattcttgatcgacggccgatagagtctgctgtcccaactcttgctaggccaataatgtctctggacgcaacagaggatgctattgtgggaactttgaagcagagtctgaggcaactggaaaatcttggtgctcagcgggcaggtcttgaagacatgctcaaagagatgaagagaaaggatgacatactgccaaagctgatgaccataacaggctcctatgaagatatgttcaggaaagagatatcaaagtatgaccacatttgtgaagatatttcccaaaacattgaagttcaagaacaattattgatgcaaattcaggctcaaaatgaagagttttcaactattttcaatcttgaagattataaagcatccaaggagaagtgctacaagcagattcaagctgcaataatgaagtatcgagagatcaaggagaacatcaatgagggcctgaagttctatgtcactctccaagatgcaatcacgaatgtgaagcagcagtgcagtgattttgtgatgacaaggagtatccagtgccgagatatgattgaagatgtgcaacgacagatgtctggtttgagttttcaggatcatagaagctccggcccatacccatctgtgcatcaaccaacggcttcaagtccgcctcctccaccagaaactcagaatccatctcatcctcacccacatgcaccatactatagaccgcctgagcagatgtcaaggcctggctactctatcccaccctacggtccacctcccccataccatactcctcatggccaggcgccacaaccataccctcctcaggcacagcaacagcctcatccatcatggcaacaaggctcttactatgatccgcagggacagcagcctcggcctccttatcccggccagagcccataccaacctcctcaccaaggtggaggatactacaggcaatgagttactttgggagcaataaaattctggtgttatatatctattgttgtgtttcctgtgagtacttgatgtgtgtctatctctttgacatgtttctgtcatgaaattgaatatctggtttgatagtgactcaaattctttattcaaagtagagccgatgtgatg

SEQ ID NO: 44833 - protein, 846 aa, Arabidopsis thaliana
  peptide (1)..(846): Ceres Seq. ID no. 13646335
  misc_feature (9)..(168): Pfam Name: BRO1-like domain Pfam Description: BRO1-like domain
  misc_feature (524)..(814): Homolog of NCBI NO: 32410501 NR Description: hypothetical protein [Neurospora crassa]
  misc_feature (1)..(527): Homolog of NCBI NO: 32410501 NR Description: hypothetical protein [Neurospora crassa]
  misc_feature (7)..(833): Homolog of NCBI NO: 32436411 NR Description: PalA protein [Emericella nidulans]
  misc_feature (11)..(842): Homolog of NCBI NO: 22027538 NR Description: programmed cell death 6 interacting protein
  misc_feature (11)..(842): Homolog of NCBI NO: 13375569 NR Description: HP95 [Homo sapiens]
  misc_feature (16)..(842): Homolog of NCBI NO: 20071292 NR Description: programmed cell death 6 interacting protein [Mus
  misc_feature (16)..(842): Homolog of NCBI NO: 6755002 NR Description: programmed cell death 6 interacting protein
  misc_feature (11)..(842): Homolog of NCBI NO: 6424942 NR Description: ALG-2 interacting protein 1 [Homo sapiens]
  misc_feature (10)..(817): Homolog of NCBI NO: 19880054 NR Description: ALG-2 interacting protein X [Dictyostelium
  misc_feature (4)..(839): Homolog of NCBI NO: 37535674 NR Description: putative signal tranduction protein
MASSSLSNLMLAIHEKKTSSVDLYRPLRNYVTFTYSEREAQLIDDDLETLKQLRSDIERVSDPSPAARRDLLISYYKVLCLVETRFPISPDKDHVNAVSFVWYDAFKQKHKATQQNIHLEKAAVLFNLGASYSQIGLGHDRTTVDGRRQASHAFMAAAGAFAHLRDNESIKATIGPSTTVDVSVECVGMLERLMVAQAQECVFENTIAKGSTPGVSAKIARQVGIFYEEALSALIISPLKDHFDKGWISHVQLKAALFYGEACFRYGKELHEKEEIAEEIARLRSGASRLAEAKKSSRGAPAQLIEAMNTLESSINGNLDRAVKENDRVYLMRVPSPSSLSPLPAFSMVKPMNMTDILDASKEKMFSILVPDSSAKALSRYTEMVDDVIRTQAERLQQASELTRVRLKEMDLPDSILAVDGNSALPVDLKEDVEAVQISGGPAGLEAELQQLRDLKRVNQELLVHTEELLQKEATEDSQFRSQFGTRWTRPQSSTLTKNLQDRLNRFAANLKQAGESDVKIERSVRDNSALMSILDRRPIESAVPTLARPIMSLDATEDAIVGTLKQSLRQLENLGAQRAGLEDMLKEMKRKDDILPKLMTITGSYEDMFRKEISKYDHICEDISQNIEVQEQLLMQIQAQNEEFSTIFNLEDYKASKEKCYKQIQAAIMKYREIKENINEGLKFYVTLQDAITNVKQQCSDFVMTRSIQCRDMIEDVQRQMSGLSFQDHRSSGPYPSVHQPTASSPPPPPETQNPSHPHPHAPYYRPPEQMSRPGYSIPPYGPPPPYHTPHGQAPQPYPPQAQQQPHPSWQQGSYYDPQGQQPRPPYPGQSPYQPPHQGGGYYRQ

SEQ ID NO: 44834 - protein, 837 aa, Arabidopsis thaliana
  peptide (1)..(837): Ceres Seq. ID no. 13646336
  misc_feature (1)..(159): Pfam Name: BRO1-like domain Pfam Description: BRO1-like domain
  misc_feature (515)..(805): Homolog of NCBI NO: 32410501 NR Description: hypothetical protein [Neurospora crassa]
  misc_feature (1)..(518): Homolog of NCBI NO: 32410501 NR Description: hypothetical protein [Neurospora crassa]
  misc_feature (1)..(824): Homolog of NCBI NO: 32436411 NR Description: PalA protein [Emericella nidulans]
  misc_feature (2)..(833): Homolog of NCBI NO: 22027538 NR Description: programmed cell death 6 interacting protein
  misc_feature (2)..(833): Homolog of NCBI NO: 13375569 NR Description: HP95 [Homo sapiens]
  misc_feature (7)..(833): Homolog of NCBI NO: 20071292 NR Description: programmed cell death 6 interacting protein [Mus
  misc_feature (7)..(833): Homolog of NCBI NO: 6755002 NR Description: programmed cell death 6 interacting protein
  misc_feature (2)..(833): Homolog of NCBI NO: 6424942 NR Description: ALG-2 interacting protein 1 [Homo sapiens]
  misc_feature (1)..(808): Homolog of NCBI NO: 19880054 NR Description: ALG-2 interacting protein X [Dictyostelium
  misc_feature (1)..(830): Homolog of NCBI NO: 37535674 NR Description: putative signal tranduction protein
MLAIHEKKTSSVDLYRPLRNYVTFTYSEREAQLIDDDLETLKQLRSDIERVSDPSPAARRDLLISYYKVLCLVETRFPISPDKDHVNAVSFVWYDAFKQKHKATQQNIHLEKAAVLFNLGASYSQIGLGHDRTTVDGRRQASHAFMAAAGAFAHLRDNESIKATIGPSTTVDVSVECVGMLERLMVAQAQECVFENTIAKGSTPGVSAKIARQVGIFYEEALSALIISPLKDHFDKGWISHVQLKAALFYGEACFRYGKELHEKEEIAEEIARLRSGASRLAEAKKSSRGAPAQLIEAMNTLESSINGNLDRAVKENDRVYLMRVPSPSSLSPLPAFSMVKPMNMTDILDASKEKMFSILVPDSSAKALSRYTEMVDDVIRTQAERLQQASELTRVRLKEMDLPDSILAVDGNSALPVDLKEDVEAVQISGGPAGLEAELQQLRDLKRVNQELLVHTEELLQKEATEDSQFRSQFGTRWTRPQSSTLTKNLQDRLNRFAANLKQAGESDVKIERSVRDNSALMSILDRRPIESAVPTLARPIMSLDATEDAIVGTLKQSLRQLENLGAQRAGLEDMLKEMKRKDDILPKLMTITGSYEDMFRKEISKYDHICEDISQNIEVQEQLLMQIQAQNEEFSTIFNLEDYKASKEKCYKQIQAAIMKYREIKENINEGLKFYVTLQDAITNVKQQCSDFVMTRSIQCRDMIEDVQRQMSGLSFQDHRSSGPYPSVHQPTASSPPPPPETQNPSHPHPHAPYYRPPEQMSRPGYSIPPYGPPPPYHTPHGQAPQPYPPQAQQQPHPSWQQGSYYDPQGQQPRPPYPGQSPYQPPHQGGGYYRQ

SEQ ID NO: 44835 - protein, 692 aa, Arabidopsis thaliana
  peptide (1)..(692): Ceres Seq. ID no. 13646337
  misc_feature (569)..(683): Pfam Name: Extensin-like region Pfam Description: Extensin-like region
  misc_feature (370)..(660): Homolog of NCBI NO: 32410501 NR Description: hypothetical protein [Neurospora crassa]
  misc_feature (1)..(373): Homolog of NCBI NO: 32410501 NR Description: hypothetical protein [Neurospora crassa]
  misc_feature (1)..(679): Homolog of NCBI NO: 32436411 NR Description: PalA protein [Emericella nidulans]
  misc_feature (1)..(688): Homolog of NCBI NO: 22027538 NR Description: programmed cell death 6 interacting protein
  misc_feature (1)..(688): Homolog of NCBI NO: 13375569 NR Description: HP95 [Homo sapiens]
  misc_feature (1)..(688): Homolog of NCBI NO: 20071292 NR Description: programmed cell death 6 interacting protein [Mus
  misc_feature (1)..(688): Homolog of NCBI NO: 6755002 NR Description: programmed cell death 6 interacting protein
  misc_feature (1)..(688): Homolog of NCBI NO: 6424942 NR Description: ALG-2 interacting protein 1 [Homo sapiens]
  misc_feature (1)..(663): Homolog of NCBI NO: 19880054 NR Description: ALG-2 interacting protein X [Dictyostelium
  misc_feature (1)..(685): Homolog of NCBI NO: 37535674 NR Description: putative signal tranduction protein
MAAAGAFAHLRDNESIKATIGPSTTVDVSVECVGMLERLMVAQAQECVFENTIAKGSTPGVSAKIARQVGIFYEEALSALIISPLKDHFDKGWISHVQLKAALFYGEACFRYGKELHEKEEIAEEIARLRSGASRLAEAKKSSRGAPAQLIEAMNTLESSINGNLDRAVKENDRVYLMRVPSPSSLSPLPAFSMVKPMNMTDILDASKEKMFSILVPDSSAKALSRYTEMVDDVIRTQAERLQQASELTRVRLKEMDLPDSILAVDGNSALPVDLKEDVEAVQISGGPAGLEAELQQLRDLKRVNQELLVHTEELLQKEATEDSQFRSQFGTRWTRPQSSTLTKNLQDRLNRFAANLKQAGESDVKIERSVRDNSALMSILDRRPIESAVPTLARPIMSLDATEDAIVGTLKQSLRQLENLGAQRAGLEDMLKEMKRKDDILPKLMTITGSYEDMFRKEISKYDHICEDISQNIEVQEQLLMQIQAQNEEFSTIFNLEDYKASKEKCYKQIQAAIMKYREIKENINEGLKFYVTLQDAITNVKQQCSDFVMTRSIQCRDMIEDVQRQMSGLSFQDHRSSGPYPSVHQPTASSPPPPPETQNPSHPHPHAPYYRPPEQMSRPGYSIPPYGPPPPYHTPHGQAPQPYPPQAQQQPHPSWQQGSYYDPQGQQPRPPYPGQSPYQPPHQGGGYYRQ

SEQ ID NO: 44836 - DNA, 3978 bp, Arabidopsis thaliana
  misc_feature (1)..(3978): Ceres Seq. ID no. 13646346
  misc_feature: MA Experiment ID: 20000171 Result: Down-regulated in Transcription
  misc_feature: MA Experiment 20000171 PARAMETER Experiment Name: At_42deg_Heat_P Parameter: Age (day) Value: 14
  misc_feature: MA Experiment 20000171 PARAMETER Experiment Name: At_42deg_Heat_P Parameter: Organism Value: A. thaliana
  misc_feature: MA Experiment 20000171 PARAMETER Experiment Name: At_42deg_Heat_P Parameter: Plant Line Value: WS
  misc_feature: MA Experiment 20000171 PARAMETER Experiment Name: At_42deg_Heat_P Parameter: Temperature (deg C) Value: 42 vs. 22
  misc_feature: MA Experiment 20000171 PARAMETER Experiment Name: At_42deg_Heat_P Parameter: Timepoint (hr) Value: 1
  misc_feature: MA Experiment 20000171 PARAMETER Experiment Name: At_42deg_Heat_P Parameter: Tissue Value: Aerial
  misc_feature: MA Experiment ID: 20000184 Result: Down-regulated in Transcription
  misc_feature: MA Experiment 20000184 PARAMETER Experiment Name: At_Shoots__P Parameter: Age (day) Value: 7
  misc_feature: MA Experiment 20000184 PARAMETER Experiment Name: At_Shoots__P Parameter: Tissue Value: Shoots vs. Whole Plant
  misc_feature: MA Experiment ID: 20000234 Result: Up-regulated in Transcription
  misc_feature: MA Experiment 20000234 PARAMETER Experiment Name: At_Siliques_P Parameter: Age (day) Value: 21
  misc_feature: MA Experiment 20000234 PARAMETER Experiment Name: At_Siliques_P Parameter: Organism Value: A. thaliana
  misc_feature: MA Experiment 20000234 PARAMETER Experiment Name: At_Siliques_P Parameter: Plant Line Value: WS
  misc_feature: MA Experiment 20000234 PARAMETER Experiment Name: At_Siliques_P Parameter: Tissue Value: Less Than 5mm Siliques vs. Whole Plant
  misc_feature: MA Experiment ID: 20000265 Result: Up-regulated in Transcription
  misc_feature: MA Experiment 20000265 PARAMETER Experiment Name: At_Open_Flower_P Parameter: Age (day) Value: 21
  misc_feature: MA Experiment 20000265 PARAMETER Experiment Name: At_Open_Flower_P Parameter: Plant Line Value: WS
  misc_feature: MA Experiment 20000265 PARAMETER Experiment Name: At_Open_Flower_P Parameter: Tissue Value: Closed Flower vs. Whole Plant
  misc_feature: MA Experiment ID: 20000286 Result: Up-regulated in Transcription
  misc_feature: MA Experiment 20000286 PARAMETER Experiment Name: At_Open_Flower_P Parameter: Age (day) Value: 21
  misc_feature: MA Experiment 20000286 PARAMETER Experiment Name: At_Open_Flower_P Parameter: Plant Line Value: WS
  misc_feature: MA Experiment 20000286 PARAMETER Experiment Name: At_Open_Flower_P Parameter: Tissue Value: Half Open vs. Whole Plant
  misc_feature: MA Experiment ID: 20000439 Result: Up-regulated in Transcription
  misc_feature: MA Experiment 20000439 PARAMETER Experiment Name: At_Roots__P Parameter: Age (day) Value: 14 vs. 21
  misc_feature: MA Experiment 20000439 PARAMETER Experiment Name: At_Roots__P Parameter: Organism Value: A. thaliana
  misc_feature: MA Experiment 20000439 PARAMETER Experiment Name: At_Roots__P Parameter: Tissue Value: Roots vs. Whole Plant
  misc_feature: MA Experiment ID: 20000794 Result: Up-regulated in Transcription
  misc_feature: MA Experiment 20000794 PARAMETER Experiment Name: At_Petals_P Parameter: Age (day) Value: 23-25 days
  misc_feature: MA Experiment 20000794 PARAMETER Experiment Name: At_Petals_P Parameter: Plant Line Value: WS
  misc_feature: MA Experiment 20000794 PARAMETER Experiment Name: At_Petals_P Parameter: Tissue Value: Petals vs. Whole plant
  misc_feature: MA Experiment ID: 20001451 Result: Down-regulated in Transcription
  misc_feature: MA Experiment 20001451 PARAMETER Experiment Name: At_Far-red-induction_P Parameter: Age (day) Value: 7
  misc_feature: MA Experiment 20001451 PARAMETER Experiment Name: At_Far-red-induction_P Parameter: Light Value: Far-red vs. White
  misc_feature: MA Experiment 20001451 PARAMETER Experiment Name: At_Far-red-induction_P Parameter: Organism Value: A. thaliana
  misc_feature: MA Experiment 20001451 PARAMETER Experiment Name: At_Far-red-induction_P Parameter: Plant Line Value: Columbia
  misc_feature: MA Experiment 20001451 PARAMETER Experiment Name: At_Far-red-induction_P Parameter: Timepoint (hr) Value: 24
  misc_feature: MA Experiment 20001451 PARAMETER Experiment Name: At_Far-red-induction_P Parameter: Tissue Value: Whole Plant
gacaatcttaggctcctccttctctcgctctcttccctctgttgctcggaaagctttggcctttttggttttcttatggctaattctcttctcaaaactattcgtatctgagagagattgagataataaatatagagagagatccaaaccagaagcaatctttttttgtttgtctttctgtgaagattcgtatcatttttctccggcaaaccaacggcggcgatccactcttctctatagcttctattatgttggatttatcttcttctttggaagaaatgaacaagtttggttttttcgctttcatgaatgtgatccggtctatataagggtacttagagtttggtgaagcttgaatctaagagatgaagagggttagagaagaggtttacgttgaaccacaaatgcgaggacctactgtttcctctcgaggagaaacaaatggtaggccttcaacgattagtggcggaggaacaacgggagggctaacaacagttgatgctttgacatatcttaaagctgtgaaggatatgtttcaagacaacaaagagaaatatgagactttccttggagtcatgaaggacttcaaagctcagagagttgacactaatggcgtcatagcaagagtaaaagatttgttcaagggctatgacgacttacttttgggttttaataccttcttacctaaggggtacaaaattacccttcagcctgaggatgagaaacctaagaagccagtggatttccaagtagctatcgaatttgtcaacaggattaaggcgcgatttggaggtgatgaccgtgcatataaaaaatttctagacatcttgaacatgtatagaaaggaaaccaagtccatcaacgaggtctatcaagaggttactctgttgttccaggaccatgaagatctgctcggggagtttgttcatttcttaccagattttcgaggatcagtttctgttaatgaccctcttttccagaggaacacaataccgcgtgatagaaattctacatttcctggcatgcatccaaagcattttgagaagaaaataaaacggagtaggcatgatgagtatactgaactctctgatcaacgagaggatggtgatgagaaccttgtggcctactctgctgacatcggaagtcaaaaaaatctactgtctacaaaccatatggccaaggcaataaatgaactggatcttactgactgtgcacaatgtacaccaagttatcgtcgcttgccagatgattatcctattcagattccaagctacagaaattcacttggtgaaaaggtgcttaacgatcattgggtatctgtcacatcggggagtgaggattactcattcaaacacatgcgcaaaaatcagtatgaagaaagcttgtttcgatgtgaggatgataggtttgagttggacatgttactagagtctgtaagtgcagccatcaagcgtgtggaaagtcttctggaaaagattaacaacaatacaatctctatagagacaccaatttgtattagagaacacttatcaggcaaatgcattgagcggttgtacggggattatgggcttgatgtcatggattttctgaagaagaattctcatatcgccttacctgtgattctaacacgcttgaagcagaaacaagaagaatgggctaggtgtcgcgctgatttcaggaaagtatgggctgaagtatatgctaagaatcatcacaaatcactcgatcatcgtagtttctatttcaagcagcaggactccaagaatttaagcacaaaaggtttagtggcggagattaaagatatcagtgagagaaagcataaagaagacctgcttcgtgccattgctgttggaactaagccctctttcaccccagatgtggagttcatttatactgatacaaaagttcatactgacctatataagctaatcaagtattattgtgaggaaatatgtgctactgaacagtcggataaagtaatgaagctatgggtaacctttttggagcccatgtttggcgttccttctaggtctgaaactattgagacaatgaaagatgttgcaaagatcgaagacaaccaagagcaccatgatgcaagtgaggcagtgaaggaaaatacatgtgacggttctatggcctcaaaccttaaaccgttaacacctccaaaaatgcctaacaaagaaaacccaatgatacaaggaagctcttttgcgcaagatttgccagtcaacacaggagaaagcattcagcaagataaactgcatgatgttgcagctataactaatgaggatagccagccttccaaactggtgtcaaccagaaacgatttgataatggagggtgtagagaatcgtagtagggtcagtgatgtatcaatgggagggcataaggtcgagcgagaagagggtgaattatcccccactgaaagttgcgagcaagaaaatttcgaggtttataaagagaatgggctcgagcctgtgcagaaactaccagataatgaaataagtaatacagaccgagaacccaaagagggtgcatgtggtactgaagctgtaacaaggagcaatgccctccctgaagatgatgataataaaataactcaaaagttatcagaaggggatgaaaatgcctcgaaatttattgtctcagcaagcaagtttggtggccaagtttcttccgatgaagagcataaaggagctgagagtgaaaatgaggctggagggatggttaattccaacgagggtgaagatggatcctttttcacattttcagaacggtatctgcaacctgtaaagccccttgcaaagcatgtgcctgggacactgcaagcaagtgaatgcgacacccggaatgattctcgagttttctatgggaatgattcactctatgtgctttttaggcttcatcaaatgttgtacgagagaatacaatcagcaaagatacattcagagaggaaatggaaagctccagatagcacatctactgattcttataccaggttcatggaagccctttacaatttacttgatggctctagcgacaatacaaagtttgaagatgaatgtcgagctattatcggagcacaatcatatgttctcttcacattggacaagctagttcaaaagtttgttaagcatcttcacgcagtcgcagctgatgagacagacaccaagcttctgcagctatatgcatacgagaactacagaaaaccaggaagattctttgatatagtgtaccatgagaatgctcgagcccttctccatgatcagaacatatacaggattgaatattcatctgcccaaacccgtctcggaattcaacttatgaacagctggaatgatcagcctgaagttacagctgtaacagtggaaccaggttttgctaattatctgcagaatgactttctttcgtttgtcagtgatgaagagaaacccggactatttctgaaaaggaacaaggcaaaattaagtggtccgggtgaagaatctctagggatgtcacgtgccttggaaggattgaacattatcaatgaggttgaatgtaagatagcttgcagttctttcaaggtcaagtatgaaccacacacagcagatcttttatatagaagaaagcagaagaaagcaacactgaatccaactggacctgaaaatgttaaaacctctgatagtagtgaactctcgagaaagaaacgaatatcgcgctttcacatgagtcttaaccgcagacttgtcgccttgccttaactcaagaacgccgtgtgaagttctttgctgagaatgagatatgcaagaatgagtagtagtagagagagactagagaataactgtctttgacaaagattcttgcatcattttaggctcaaagagattcacatggcaacaaccatagtttttatcttctacagtctacactgcagctggagccgccagttttgctgtatagtgttagaatatcttttttttttttaaggatgatgct

SEQ ID NO: 44837 - protein, 1125 aa, Arabidopsis thaliana
  peptide (1)..(1125): Ceres Seq. ID no. 13646347
  misc_feature (145)..(191): Pfam Name: Paired amphipathic helix repeat Pfam Description: Paired amphipathic helix repeat
  misc_feature (145)..(191): Pfam Name: Paired amphipathic helix repeat Pfam Description: Paired amphipathic helix repeat
  misc_feature (34)..(228): Homolog of NCBI NO: 15223031 NR Description: expressed protein [Arabidopsis thaliana]
  misc_feature (41)..(794): Homolog of NCBI NO: 9945050 NR Description: Similar to Arabidopsis chromosome I BAC genomic
  misc_feature (1)..(344): Homolog of NCBI NO: 6094552 NR Description: unknown protein [Arabidopsis thaliana]
  misc_feature (269)..(794): Homolog of NCBI NO: 6094552 NR Description: unknown protein [Arabidopsis thaliana]
  misc_feature (726)..(1068): Homolog of NCBI NO: 34894158 NR Description: putative co-repressor protein
  misc_feature (34)..(228): Homolog of NCBI NO: 15223031 NR Description: expressed protein [Arabidopsis thaliana]
  misc_feature (1)..(344): Homolog of NCBI NO: 6094552 NR Description: unknown protein [Arabidopsis thaliana]
  misc_feature (726)..(1068): Homolog of NCBI NO: 34894158 NR Description: putative co-repressor protein
  misc_feature (131)..(671): Homolog of NCBI NO: 15223031 NR Description: expressed protein [Arabidopsis thaliana]
  misc_feature (573)..(1117): Homolog of NCBI NO: 15223031 NR Description: expressed protein [Arabidopsis thaliana]
  misc_feature (131)..(671): Homolog of NCBI NO: 25406027 NR Description: hypothetical protein F20P5.21 [imported] -
  misc_feature (573)..(1092): Homolog of NCBI NO: 25406027 NR Description: hypothetical protein F20P5.21 [imported] -
  misc_feature (133)..(730): Homolog of NCBI NO: 34894158 NR Description: putative co-repressor protein
  misc_feature (269)..(794): Homolog of NCBI NO: 6094552 NR Description: unknown protein [Arabidopsis thaliana]
  misc_feature (41)..(794): Homolog of NCBI NO: 9945050 NR Description: Similar to Arabidopsis chromosome I BAC genomic
  misc_feature (133)..(730): Homolog of NCBI NO: 34894158 NR Description: putative co-repressor protein
  misc_feature (573)..(1092): Homolog of NCBI NO: 25406027 NR Description: hypothetical protein F20P5.21 [imported] -
  misc_feature (131)..(671): Homolog of NCBI NO: 25406027 NR Description: hypothetical protein F20P5.21 [imported] -
  misc_feature (573)..(1117): Homolog of NCBI NO: 15223031 NR Description: expressed protein [Arabidopsis thaliana]
  misc_feature (131)..(671): Homolog of NCBI NO: 15223031 NR Description: expressed protein [Arabidopsis thaliana]
MKRVREEVYVEPQMRGPTVSSRGETNGRPSTISGGGTTGGLTTVDALTYLKAVKDMFQDNKEKYETFLGVMKDFKAQRVDTNGVIARVKDLFKGYDDLLLGFNTFLPKGYKITLQPEDEKPKKPVDFQVAIEFVNRIKARFGGDDRAYKKFLDILNMYRKETKSINEVYQEVTLLFQDHEDLLGEFVHFLPDFRGSVSVNDPLFQRNTIPRDRNSTFPGMHPKHFEKKIKRSRHDEYTELSDQREDGDENLVAYSADIGSQKNLLSTNHMAKAINELDLTDCAQCTPSYRRLPDDYPIQIPSYRNSLGEKVLNDHWVSVTSGSEDYSFKHMRKNQYEESLFRCEDDRFELDMLLESVSAAIKRVESLLEKINNNTISIETPICIREHLSGKCIERLYGDYGLDVMDFLKKNSHIALPVILTRLKQKQEEWARCRADFRKVWAEVYAKNHHKSLDHRSFYFKQQDSKNLSTKGLVAEIKDISERKHKEDLLRAIAVGTKPSFTPDVEFIYTDTKVHTDLYKLIKYYCEEICATEQSDKVMKLWVTFLEPMFGVPSRSETIETMKDVAKIEDNQEHHDASEAVKENTCDGSMASNLKPLTPPKMPNKENPMIQGSSFAQDLPVNTGESIQQDKLHDVAAITNEDSQPSKLVSTRNDLIMEGVENRSRVSDVSMGGHKVEREEGELSPTESCEQENFEVYKENGLEPVQKLPDNEISNTDREPKEGACGTEAVTRSNALPEDDDNKITQKLSEGDENASKFIVSASKFGGQVSSDEEHKGAESENEAGGMVNSNEGEDGSFFTFSERYLQPVKPLAKHVPGTLQASECDTRNDSRVFYGNDSLYVLFRLHQMLYERIQSAKIHSERKWKAPDSTSTDSYTRFMEALYNLLDGSSDNTKFEDECRAIIGAQSYVLFTLDKLVQKFVKHLHAVAADETDTKLLQLYAYENYRKPGRFFDIVYHENARALLHDQNIYRIEYSSAQTRLGIQLMNSWNDQPEVTAVTVEPGFANYLQNDFLSFVSDEEKPGLFLKRNKAKLSGPGEESLGMSRALEGLNIINEVECKIACSSFKVKYEPHTADLLYRRKQKKATLNPTGPENVKTSDSSELSRKKRISRFHMSLNRRLVALP

SEQ ID NO: 44838 - protein, 1112 aa, Arabidopsis thaliana
  peptide (1)..(1112): Ceres Seq. ID no. 13646348
  misc_feature (132)..(178): Pfam Name: Paired amphipathic helix repeat Pfam Description: Paired amphipathic helix repeat
  misc_feature (132)..(178): Pfam Name: Paired amphipathic helix repeat Pfam Description: Paired amphipathic helix repeat
  misc_feature (21)..(215): Homolog of NCBI NO: 15223031 NR Description: expressed protein [Arabidopsis thaliana]
  misc_feature (28)..(781): Homolog of NCBI NO: 9945050 NR Description: Similar to Arabidopsis chromosome I BAC genomic
  misc_feature (1)..(331): Homolog of NCBI NO: 6094552 NR Description: unknown protein [Arabidopsis thaliana]
  misc_feature (256)..(781): Homolog of NCBI NO: 6094552 NR Description: unknown protein [Arabidopsis thaliana]
  misc_feature (713)..(1055): Homolog of NCBI NO: 34894158 NR Description: putative co-repressor protein
  misc_feature (21)..(215): Homolog of NCBI NO: 15223031 NR Description: expressed protein [Arabidopsis thaliana]
  misc_feature (1)..(331): Homolog of NCBI NO: 6094552 NR Description: unknown protein [Arabidopsis thaliana]
  misc_feature (713)..(1055): Homolog of NCBI NO: 34894158 NR Description: putative co-repressor protein
  misc_feature (118)..(658): Homolog of NCBI NO: 15223031 NR Description: expressed protein [Arabidopsis thaliana]
  misc_feature (560)..(1104): Homolog of NCBI NO: 15223031 NR Description: expressed protein [Arabidopsis thaliana]
  misc_feature (118)..(658): Homolog of NCBI NO: 25406027 NR Description: hypothetical protein F20P5.21 [imported] -
  misc_feature (560)..(1079): Homolog of NCBI NO: 25406027 NR Description: hypothetical protein F20P5.21 [imported] -
  misc_feature (120)..(717): Homolog of NCBI NO: 34894158 NR Description: putative co-repressor protein
  misc_feature (256)..(781): Homolog of NCBI NO: 6094552 NR Description: unknown protein [Arabidopsis thaliana]
  misc_feature (28)..(781): Homolog of NCBI NO: 9945050 NR Description: Similar to Arabidopsis chromosome I BAC genomic
  misc_feature (120)..(717): Homolog of NCBI NO: 34894158 NR Description: putative co-repressor protein
  misc_feature (560)..(1079): Homolog of NCBI NO: 25406027 NR Description: hypothetical protein F20P5.21 [imported] -
  misc_feature (118)..(658): Homolog of NCBI NO: 25406027 NR Description: hypothetical protein F20P5.21 [imported] -
  misc_feature (560)..(1104): Homolog of NCBI NO: 15223031 NR Description: expressed protein [Arabidopsis thaliana]
  misc_feature (118)..(658): Homolog of NCBI NO: 15223031 NR Description: expressed protein [Arabidopsis thaliana]
MRGPTVSSRGETNGRPSTISGGGTTGGLTTVDALTYLKAVKDMFQDNKEKYETFLGVMKDFKAQRVDTNGVIARVKDLFKGYDDLLLGFNTFLPKGYKITLQPEDEKPKKPVDFQVAIEFVNRIKARFGGDDRAYKKFLDILNMYRKETKSINEVYQEVTLLFQDHEDLLGEFVHFLPDFRGSVSVNDPLFQRNTIPRDRNSTFPGMHPKHFEKKIKRSRHDEYTELSDQREDGDENLVAYSADIGSQKNLLSTNHMAKAINELDLTDCAQCTPSYRRLPDDYPIQIPSYRNSLGEKVLNDHWVSVTSGSEDYSFKHMRKNQYEESLFRCEDDRFELDMLLESVSAAIKRVESLLEKINNNTISIETPICIREHLSGKCIERLYGDYGLDVMDFLKKNSHIALPVILTRLKQKQEEWARCRADFRKVWAEVYAKNHHKSLDHRSFYFKQQDSKNLSTKGLVAEIKDISERKHKEDLLRAIAVGTKPSFTPDVEFIYTDTKVHTDLYKLIKYYCEEICATEQSDKVMKLWVTFLEPMFGVPSRSETIETMKDVAKIEDNQEHHDASEAVKENTCDGSMASNLKPLTPPKMPNKENPMIQGSSFAQDLPVNTGESIQQDKLHDVAAITNEDSQPSKLVSTRNDLIMEGVENRSRVSDVSMGGHKVEREEGELSPTESCEQENFEVYKENGLEPVQKLPDNEISNTDREPKEGACGTEAVTRSNALPEDDDNKITQKLSEGDENASKFIVSASKFGGQVSSDEEHKGAESENEAGGMVNSNEGEDGSFFTFSERYLQPVKPLAKHVPGTLQASECDTRNDSRVFYGNDSLYVLFRLHQMLYERIQSAKIHSERKWKAPDSTSTDSYTRFMEALYNLLDGSSDNTKFEDECRAIIGAQSYVLFTLDKLVQKFVKHLHAVAADETDTKLLQLYAYENYRKPGRFFDIVYHENARALLHDQNIYRIEYSSAQTRLGIQLMNSWNDQPEVTAVTVEPGFANYLQNDFLSFVSDEEKPGLFLKRNKAKLSGPGEESLGMSRALEGLNIINEVECKIACSSFKVKYEPHTADLLYRRKQKKATLNPTGPENVKTSDSSELSRKKRISRFHMSLNRRLVALP

SEQ ID NO: 44839 - protein, 1070 aa, Arabidopsis thaliana
  peptide (1)..(1070): Ceres Seq. ID no. 13646349
  misc_feature (90)..(136): Pfam Name: Paired amphipathic helix repeat Pfam Description: Paired amphipathic helix repeat
  misc_feature (90)..(136): Pfam Name: Paired amphipathic helix repeat Pfam Description: Paired amphipathic helix repeat
  misc_feature (1)..(173): Homolog of NCBI NO: 15223031 NR Description: expressed protein [Arabidopsis thaliana]
  misc_feature (1)..(739): Homolog of NCBI NO: 9945050 NR Description: Similar to Arabidopsis chromosome I BAC genomic
  misc_feature (1)..(289): Homolog of NCBI NO: 6094552 NR Description: unknown protein [Arabidopsis thaliana]
  misc_feature (214)..(739): Homolog of NCBI NO: 6094552 NR Description: unknown protein [Arabidopsis thaliana]
  misc_feature (671)..(1013): Homolog of NCBI NO: 34894158 NR Description: putative co-repressor protein
  misc_feature (1)..(173): Homolog of NCBI NO: 15223031 NR Description: expressed protein [Arabidopsis thaliana]
  misc_feature (1)..(289): Homolog of NCBI NO: 6094552 NR Description: unknown protein [Arabidopsis thaliana]
  misc_feature (671)..(1013): Homolog of NCBI NO: 34894158 NR Description: putative co-repressor protein
  misc_feature (76)..(616): Homolog of NCBI NO: 15223031 NR Description: expressed protein [Arabidopsis thaliana]
  misc_feature (518)..(1062): Homolog of NCBI NO: 15223031 NR Description: expressed protein [Arabidopsis thaliana]
  misc_feature (76)..(616): Homolog of NCBI NO: 25406027 NR Description: hypothetical protein F20P5.21 [imported] -
  misc_feature (518)..(1037): Homolog of NCBI NO: 25406027 NR Description: hypothetical protein F20P5.21 [imported] -
  misc_feature (78)..(675): Homolog of NCBI NO: 34894158 NR Description: putative co-repressor protein
  misc_feature (214)..(739): Homolog of NCBI NO: 6094552 NR Description: unknown protein [Arabidopsis thaliana]
  misc_feature (1)..(739): Homolog of NCBI NO: 9945050 NR Description: Similar to Arabidopsis chromosome I BAC genomic
  misc_feature (78)..(675): Homolog of NCBI NO: 34894158 NR Description: putative co-repressor protein
  misc_feature (518)..(1037): Homolog of NCBI NO: 25406027 NR Description: hypothetical protein F20P5.21 [imported] -
  misc_feature (76)..(616): Homolog of NCBI NO: 25406027 NR Description: hypothetical protein F20P5.21 [imported] -
  misc_feature (518)..(1062): Homolog of NCBI NO: 15223031 NR Description: expressed protein [Arabidopsis thaliana]
  misc_feature (76)..(616): Homolog of NCBI NO: 15223031 NR Description: expressed protein [Arabidopsis thaliana]
MFQDNKEKYETFLGVMKDFKAQRVDTNGVIARVKDLFKGYDDLLLGFNTFLPKGYKITLQPEDEKPKKPVDFQVAIEFVNRIKARFGGDDRAYKKFLDILNMYRKETKSINEVYQEVTLLFQDHEDLLGEFVHFLPDFRGSVSVNDPLFQRNTIPRDRNSTFPGMHPKHFEKKIKRSRHDEYTELSDQREDGDENLVAYSADIGSQKNLLSTNHMAKAINELDLTDCAQCTPSYRRLPDDYPIQIPSYRNSLGEKVLNDHWVSVTSGSEDYSFKHMRKNQYEESLFRCEDDRFELDMLLESVSAAIKRVESLLEKINNNTISIETPICIREHLSGKCIERLYGDYGLDVMDFLKKNSHIALPVILTRLKQKQEEWARCRADFRKVWAEVYAKNHHKSLDHRSFYFKQQDSKNLSTKGLVAEIKDISERKHKEDLLRAIAVGTKPSFTPDVEFIYTDTKVHTDLYKLIKYYCEEICATEQSDKVMKLWVTFLEPMFGVPSRSETIETMKDVAKIEDNQEHHDASEAVKENTCDGSMASNLKPLTPPKMPNKENPMIQGSSFAQDLPVNTGESIQQDKLHDVAAITNEDSQPSKLVSTRNDLIMEGVENRSRVSDVSMGGHKVEREEGELSPTESCEQENFEVYKENGLEPVQKLPDNEISNTDREPKEGACGTEAVTRSNALPEDDDNKITQKLSEGDENASKFIVSASKFGGQVSSDEEHKGAESENEAGGMVNSNEGEDGSFFTFSERYLQPVKPLAKHVPGTLQASECDTRNDSRVFYGNDSLYVLFRLHQMLYERIQSAKIHSERKWKAPDSTSTDSYTRFMEALYNLLDGSSDNTKFEDECRAIIGAQSYVLFTLDKLVQKFVKHLHAVAADETDTKLLQLYAYENYRKPGRFFDIVYHENARALLHDQNIYRIEYSSAQTRLGIQLMNSWNDQPEVTAVTVEPGFANYLQNDFLSFVSDEEKPGLFLKRNKAKLSGPGEESLGMSRALEGLNIINEVECKIACSSFKVKYEPHTADLLYRRKQKKATLNPTGPENVKTSDSSELSRKKRISRFHMSLNRRLVALP

SEQ ID NO: 44840 - DNA, 2722 bp, Arabidopsis thaliana
  misc_feature (1)..(2722): Ceres Seq. ID no. 12600042
  misc_feature: MA Experiment ID: 108434 Result: Down-regulated in Transcription
  misc_feature: MA Experiment 108434 PARAMETER Experiment Name: At_Root_Tips_cDNA_P Parameter: Tissue Value: Root Tips
  misc_feature: MA Experiment ID: 108435 Result: Down-regulated in Transcription
  misc_feature: MA Experiment 108435 PARAMETER Experiment Name: At_stm_Mutants_cDNA_P Parameter: Plant Line Value: wt Landsburg vs stm
  misc_feature: MA Experiment 108435 PARAMETER Experiment Name: At_stm_Mutants_cDNA_P Parameter: Tissue Value: Shoot Apical Meristem Region
  misc_feature: MA Experiment ID: 108462 Result: Down-regulated in Transcription
  misc_feature: MA Experiment 108462 PARAMETER Experiment Name: At_Germinating_Seeds_cDNA_P Parameter: Age (day) Value: 2 vs. 0
  misc_feature: MA Experiment 108462 PARAMETER Experiment Name: At_Germinating_Seeds_cDNA_P Parameter: Tissue Value: Germinating Seeds
  misc_feature: MA Experiment ID: 108463 Result: Down-regulated in Transcription
  misc_feature: MA Experiment 108463 PARAMETER Experiment Name: At_Germinating_Seeds_cDNA_P Parameter: Age (day) Value: 3 vs. 0
  misc_feature: MA Experiment 108463 PARAMETER Experiment Name: At_Germinating_Seeds_cDNA_P Parameter: Tissue Value: Germinating Seeds
  misc_feature: MA Experiment ID: 108469 Result: Up-regulated in Transcription
  misc_feature: MA Experiment ID: 108489 Result: Up-regulated in Transcription
  misc_feature: MA Experiment ID: 108501 Result: Down-regulated in Transcription
  misc_feature: MA Experiment 108501 PARAMETER Experiment Name: At_ap2_floral_buds_cDNA_P Parameter: Plant Line Value: ap2 (Ler.)
  misc_feature: MA Experiment 108501 PARAMETER Experiment Name: At_ap2_floral_buds_cDNA_P Parameter: Tissue Value: Closed Flower
  misc_feature: MA Experiment ID: 108561 Result: Up-regulated in Transcription
  misc_feature: MA Experiment 108561 PARAMETER Experiment Name: At_100uM_ABA_cDNA_P Parameter: Timepoint (hr) Value: 6
  misc_feature: MA Experiment 108561 PARAMETER Experiment Name: At_100uM_ABA_cDNA_P Parameter: Tissue Value: Aerial
  misc_feature: MA Experiment 108561 PARAMETER Experiment Name: At_100uM_ABA_cDNA_P Parameter: Treatment Value: 100uM ABA vs. No Treatment
  misc_feature: MA Experiment ID: 108569 Result: Down-regulated in Transcription
  misc_feature: MA Experiment 108569 PARAMETER Experiment Name: At_0.001%_MeJA__cDNA_P Parameter: Timepoint (hr) Value: 6
  misc_feature: MA Experiment 108569 PARAMETER Experiment Name: At_0.001%_MeJA__cDNA_P Parameter: Tissue Value: Aerial
  misc_feature: MA Experiment 108569 PARAMETER Experiment Name: At_0.001%_MeJA__cDNA_P Parameter: Treatment Value: 0.001% MeJA vs. No Treatment
  misc_feature: MA Experiment ID: 108573 Result: Up-regulated in Transcription
  misc_feature: MA Experiment 108573 PARAMETER Experiment Name: At_Drought_cDNA_P Parameter: Timepoint (hr) Value: 6
  misc_feature: MA Experiment 108573 PARAMETER Experiment Name: At_Drought_cDNA_P Parameter: Tissue Value: Aerial
  misc_feature: MA Experiment 108573 PARAMETER Experiment Name: At_Drought_cDNA_P Parameter: Treatment Value: Drought vs. No Drought
  misc_feature: MA Experiment ID: 108574 Result: Down-regulated in Transcription
  misc_feature: MA Experiment 108574 PARAMETER Experiment Name: At_Wounding__cDNA_P Parameter: Timepoint (hr) Value: 1
  misc_feature: MA Experiment 108574 PARAMETER Experiment Name: At_Wounding__cDNA_P Parameter: Tissue Value: Aerial
  misc_feature: MA Experiment 108574 PARAMETER Experiment Name: At_Wounding__cDNA_P Parameter: Treatment Value: Wounding vs. No Wounding
  misc_feature: MA Experiment ID: 108577 Result: Down-regulated in Transcription
  misc_feature: MA Experiment 108577 PARAMETER Experiment Name: At_42deg_Heat_cDNA_P Parameter: Temperature (deg C) Value: 42 vs. 22
  misc_feature: MA Experiment 108577 PARAMETER Experiment Name: At_42deg_Heat_cDNA_P Parameter: Timepoint (hr) Value: 6
  misc_feature: MA Experiment 108577 PARAMETER Experiment Name: At_42deg_Heat_cDNA_P Parameter: Tissue Value: Aerial
  misc_feature: MA Experiment ID: 108579 Result: Down-regulated in Transcription
  misc_feature: MA Experiment 108579 PARAMETER Experiment Name: At_4deg_Cold_cDNA_P Parameter: Temperature (deg C) Value: 4 vs. 22
  misc_feature: MA Experiment 108579 PARAMETER Experiment Name: At_4deg_Cold_cDNA_P Parameter: Timepoint (hr) Value: 6
  misc_feature: MA Experiment 108579 PARAMETER Experiment Name: At_4deg_Cold_cDNA_P Parameter: Tissue Value: Aerial
  misc_feature: MA Experiment ID: 108585 Result: Up-regulated in Transcription
  misc_feature: MA Experiment 108585 PARAMETER Experiment Name: At_5mM_NaNP_cDNA_P Parameter: Timepoint (hr) Value: 6
  misc_feature: MA Experiment 108585 PARAMETER Experiment Name: At_5mM_NaNP_cDNA_P Parameter: Tissue Value: Aerial
  misc_feature: MA Experiment 108585 PARAMETER Experiment Name: At_5mM_NaNP_cDNA_P Parameter: Treatment Value: null
  misc_feature: MA Experiment ID: 108594 Result: Up-regulated in Transcription
  misc_feature: MA Experiment 108594 PARAMETER Experiment Name: At_Ler-rhl_Root_cDNA_P Parameter: Plant Line Value: null
  misc_feature: MA Experiment ID: 108595 Result: Down-regulated in Transcription
  misc_feature: MA Experiment 108595 PARAMETER Experiment Name: At_Ler-pi_Ovule_cDNA_P Parameter: Plant Line Value: null
  misc_feature: MA Experiment ID: 108608 Result: Down-regulated in Transcription
  misc_feature: MA Experiment 108608 PARAMETER Experiment Name: At_100uM_ABA_cDNA_P Parameter: Timepoint (hr) Value: 1
  misc_feature: MA Experiment 108608 PARAMETER Experiment Name: At_100uM_ABA_cDNA_P Parameter: Tissue Value: Aerial
  misc_feature: MA Experiment 108608 PARAMETER Experiment Name: At_100uM_ABA_cDNA_P Parameter: Treatment Value: 100uM ABA vs. No Treatment
  misc_feature: MA Experiment ID: 20000087 Result: Up-regulated in Transcription
  misc_feature: MA Experiment 20000087 PARAMETER Experiment Name: At_100uM_ABA_Mutants_cDNA_P Parameter: Plant Line Value: WS
  misc_feature: MA Experiment 20000087 PARAMETER Experiment Name: At_100uM_ABA_Mutants_cDNA_P Parameter: Timepoint (hr) Value: 6
  misc_feature: MA Experiment 20000087 PARAMETER Experiment Name: At_100uM_ABA_Mutants_cDNA_P Parameter: Tissue Value: Aerial
  misc_feature: MA Experiment 20000087 PARAMETER Experiment Name: At_100uM_ABA_Mutants_cDNA_P Parameter: Treatment Value: 100uM ABA vs. No Treatment
  misc_feature: MA Experiment ID: 20000089 Result: Up-regulated in Transcription
  misc_feature: MA Experiment ID: 20000090 Result: Up-regulated in Transcription
  misc_feature: MA Experiment ID: 20000166 Result: Down-regulated in Transcription
  misc_feature: MA Experiment 20000166 PARAMETER Experiment Name: At_100uM_ABA_P Parameter: Age (day) Value: 14
  misc_feature: MA Experiment 20000166 PARAMETER Experiment Name: At_100uM_ABA_P Parameter: Organism Value: A. thaliana
  misc_feature: MA Experiment 20000166 PARAMETER Experiment Name: At_100uM_ABA_P Parameter: Plant Line Value: WS
  misc_feature: MA Experiment 20000166 PARAMETER Experiment Name: At_100uM_ABA_P Parameter: Timepoint (hr) Value: 1
  misc_feature: MA Experiment 20000166 PARAMETER Experiment Name: At_100uM_ABA_P Parameter: Tissue Value: Aerial
  misc_feature: MA Experiment 20000166 PARAMETER Experiment Name: At_100uM_ABA_P Parameter: Treatment Value: 100uM ABA vs. No Treatment
  misc_feature: MA Experiment ID: 20000185 Result: Down-regulated in Transcription
  misc_feature: MA Experiment 20000185 PARAMETER Experiment Name: At_Roots__P Parameter: Age (day) Value: 7 vs. 21
  misc_feature: MA Experiment 20000185 PARAMETER Experiment Name: At_Roots__P Parameter: Organism Value: A. thaliana
  misc_feature: MA Experiment 20000185 PARAMETER Experiment Name: At_Roots__P Parameter: Tissue Value: Roots vs. Whole Plant
  misc_feature: MA Experiment ID: 20000227 Result: Down-regulated in Transcription
  misc_feature: MA Experiment 20000227 PARAMETER Experiment Name: At_Root-Tips-vs-Tops_P Parameter: Tissue Value: Root Tips vs. Root Tops
  misc_feature: MA Experiment ID: 20000234 Result: Down-regulated in Transcription
  misc_feature: MA Experiment 20000234 PARAMETER Experiment Name: At_Siliques_P Parameter: Age (day) Value: 21
  misc_feature: MA Experiment 20000234 PARAMETER Experiment Name: At_Siliques_P Parameter: Organism Value: A. thaliana
  misc_feature: MA Experiment 20000234 PARAMETER Experiment Name: At_Siliques_P Parameter: Plant Line Value: WS
  misc_feature: MA Experiment 20000234 PARAMETER Experiment Name: At_Siliques_P Parameter: Tissue Value: Less Than 5mm Siliques vs. Whole Plant
  misc_feature: MA Experiment ID: 20000264 Result: Down-regulated in Transcription
  misc_feature: MA Experiment 20000264 PARAMETER Experiment Name: At_Open_Flower_P Parameter: Age (day) Value: 21
  misc_feature: MA Experiment 20000264 PARAMETER Experiment Name: At_Open_Flower_P Parameter: Plant Line Value: WS
  misc_feature: MA Experiment 20000264 PARAMETER Experiment Name: At_Open_Flower_P Parameter: Tissue Value: Open Flower vs. Whole Plant
  misc_feature: MA Experiment ID: 20000265 Result: Down-regulated in Transcription
  misc_feature: MA Experiment 20000265 PARAMETER Experiment Name: At_Open_Flower_P Parameter: Age (day) Value: 21
  misc_feature: MA Experiment 20000265 PARAMETER Experiment Name: At_Open_Flower_P Parameter: Plant Line Value: WS
  misc_feature: MA Experiment 20000265 PARAMETER Experiment Name: At_Open_Flower_P Parameter: Tissue Value: Closed Flower vs. Whole Plant
  misc_feature: MA Experiment ID: 20000268 Result: Down-regulated in Transcription
  misc_feature: MA Experiment 20000268 PARAMETER Experiment Name: At_100mM_NaCl__P Parameter: Age (day) Value: 14
  misc_feature: MA Experiment 20000268 PARAMETER Experiment Name: At_100mM_NaCl__P Parameter: Organism Value: A. thaliana
  misc_feature: MA Experiment 20000268 PARAMETER Experiment Name: At_100mM_NaCl__P Parameter: Plant Line Value: WS
  misc_feature: MA Experiment 20000268 PARAMETER Experiment Name: At_100mM_NaCl__P Parameter: Timepoint (hr) Value: 6
  misc_feature: MA Experiment 20000268 PARAMETER Experiment Name: At_100mM_NaCl__P Parameter: Tissue Value: Whole Plant
  misc_feature: MA Experiment 20000268 PARAMETER Experiment Name: At_100mM_NaCl__P Parameter: Treatment Value: 100mM NaCl vs. No Treatment
  misc_feature: MA Experiment ID: 20000286 Result: Down-regulated in Transcription
  misc_feature: MA Experiment 20000286 PARAMETER Experiment Name: At_Open_Flower_P Parameter: Age (day) Value: 21
  misc_feature: MA Experiment 20000286 PARAMETER Experiment Name: At_Open_Flower_P Parameter: Plant Line Value: WS
  misc_feature: MA Experiment 20000286 PARAMETER Experiment Name: At_Open_Flower_P Parameter: Tissue Value: Half Open vs. Whole Plant
  misc_feature: MA Experiment ID: 20000308 Result: Down-regulated in Transcription
  misc_feature: MA Experiment 20000308 PARAMETER Experiment Name: At_100mM_NaCl__P Parameter: Age (day) Value: 17
  misc_feature: MA Experiment 20000308 PARAMETER Experiment Name: At_100mM_NaCl__P Parameter: Organism Value: A. thaliana
  misc_feature: MA Experiment 20000308 PARAMETER Experiment Name: At_100mM_NaCl__P Parameter: Plant Line Value: WS
  misc_feature: MA Experiment 20000308 PARAMETER Experiment Name: At_100mM_NaCl__P Parameter: Timepoint (hr) Value: 72
  misc_feature: MA Experiment 20000308 PARAMETER Experiment Name: At_100mM_NaCl__P Parameter: Tissue Value: Whole Plant
  misc_feature: MA Experiment 20000308 PARAMETER Experiment Name: At_100mM_NaCl__P Parameter: Treatment Value: 100mM NaCl vs. No Treatment
  misc_feature: MA Experiment ID: 20000437 Result: Down-regulated in Transcription
  misc_feature: MA Experiment 20000437 PARAMETER Experiment Name: At_Drought_P Parameter: Age (day) Value: 8
  misc_feature: MA Experiment 20000437 PARAMETER Experiment Name: At_Drought_P Parameter: Organism Value: A. thaliana
  misc_feature: MA Experiment 20000437 PARAMETER Experiment Name: At_Drought_P Parameter: Plant Line Value: WS
  misc_feature: MA Experiment 20000437 PARAMETER Experiment Name: At_Drought_P Parameter: Timepoint (hr) Value: 24
  misc_feature: MA Experiment 20000437 PARAMETER Experiment Name: At_Drought_P Parameter: Tissue Value: Whole Plant
  misc_feature: MA Experiment 20000437 PARAMETER Experiment Name: At_Drought_P Parameter: Treatment Value: Drought vs. No Drought
  misc_feature: MA Experiment ID: 20000438 Result: Down-regulated in Transcription
  misc_feature: MA Experiment 20000438 PARAMETER Experiment Name: At_Shoots__P Parameter: Age (day) Value: 14
  misc_feature: MA Experiment 20000438 PARAMETER Experiment Name: At_Shoots__P Parameter: Tissue Value: Shoots vs. Whole Plant
  misc_feature: MA Experiment ID: 20000439 Result: Down-regulated in Transcription
  misc_feature: MA Experiment 20000439 PARAMETER Experiment Name: At_Roots__P Parameter: Age (day) Value: 14 vs. 21
  misc_feature: MA Experiment 20000439 PARAMETER Experiment Name: At_Roots__P Parameter: Organism Value: A. thaliana
  misc_feature: MA Experiment 20000439 PARAMETER Experiment Name: At_Roots__P Parameter: Tissue Value: Roots vs. Whole Plant
  misc_feature: MA Experiment ID: 20000441 Result: Up-regulated in Transcription
  misc_feature: MA Experiment 20000441 PARAMETER Experiment Name: At_1uM_BR-BRZ__P Parameter: Tissue Value: Shoot Apices
  misc_feature: MA Experiment 20000441 PARAMETER Experiment Name: At_1uM_BR-BRZ__P Parameter: Treatment Value: 1uM BR vs. No Treatment
  misc_feature: MA Experiment ID: 20000443 Result: Up-regulated in Transcription
  misc_feature: MA Experiment 20000443 PARAMETER Experiment Name: At_1uM_BR-BRZ__P Parameter: Tissue Value: Shoot Apices
  misc_feature: MA Experiment 20000443 PARAMETER Experiment Name: At_1uM_BR-BRZ__P Parameter: Treatment Value: 1uM BRZ vs. No Treatment
  misc_feature: MA Experiment ID: 20000451 Result: Down-regulated in Transcription
  misc_feature: MA Experiment 20000451 PARAMETER Experiment Name: At_CS6879_Shoots-Roots_P Parameter: Age (day) Value: 14
  misc_feature: MA Experiment 20000451 PARAMETER Experiment Name: At_CS6879_Shoots-Roots_P Parameter: Organism Value: A. thaliana
  misc_feature: MA Experiment 20000451 PARAMETER Experiment Name: At_CS6879_Shoots-Roots_P Parameter: Plant Line Value: CS6879 vs. WS
  misc_feature: MA Experiment 20000451 PARAMETER Experiment Name: At_CS6879_Shoots-Roots_P Parameter: Tissue Value: Roots
  misc_feature: MA Experiment ID: 20000452 Result: Down-regulated in Transcription
  misc_feature: MA Experiment 20000452 PARAMETER Experiment Name: At_CS6879_Shoots-Roots_P Parameter: Age (day) Value: 14
  misc_feature: MA Experiment 20000452 PARAMETER Experiment Name: At_CS6879_Shoots-Roots_P Parameter: Organism Value: A. thaliana
  misc_feature: MA Experiment 20000452 PARAMETER Experiment Name: At_CS6879_Shoots-Roots_P Parameter: Plant Line Value: CS6879 vs. WS
  misc_feature: MA Experiment 20000452 PARAMETER Experiment Name: At_CS6879_Shoots-Roots_P Parameter: Tissue Value: Shoots
  misc_feature: MA Experiment ID: 20000455 Result: Down-regulated in Transcription
  misc_feature: MA Experiment 20000455 PARAMETER Experiment Name: At_100uM_ABA_P Parameter: Age (day) Value: 16
  misc_feature: MA Experiment 20000455 PARAMETER Experiment Name: At_100uM_ABA_P Parameter: Organism Value: A. thaliana
  misc_feature: MA Experiment 20000455 PARAMETER Experiment Name: At_100uM_ABA_P Parameter: Plant Line Value: WS
  misc_feature: MA Experiment 20000455 PARAMETER Experiment Name: At_100uM_ABA_P Parameter: Timepoint (hr) Value: 48
  misc_feature: MA Experiment 20000455 PARAMETER Experiment Name: At_100uM_ABA_P Parameter: Tissue Value: Aerial
  misc_feature: MA Experiment 20000455 PARAMETER Experiment Name: At_100uM_ABA_P Parameter: Treatment Value: 100uM ABA vs. No Treatment
  misc_feature: MA Experiment ID: 20000527 Result: Up-regulated in Transcription
  misc_feature: MA Experiment 20000527 PARAMETER Experiment Name: At_10percent_PEG_P Parameter: Age (day) Value: 20
  misc_feature: MA Experiment 20000527 PARAMETER Experiment Name: At_10percent_PEG_P Parameter: Organism Value: A. thaliana
  misc_feature: MA Experiment 20000527 PARAMETER Experiment Name: At_10percent_PEG_P Parameter: Plant Line Value: WS
  misc_feature: MA Experiment 20000527 PARAMETER Experiment Name: At_10percent_PEG_P Parameter: Timepoint (day) Value: 20
  misc_feature: MA Experiment 20000527 PARAMETER Experiment Name: At_10percent_PEG_P Parameter: Tissue Value: Whole Plant
  misc_feature: MA Experiment 20000527 PARAMETER Experiment Name: At_10percent_PEG_P Parameter: Treatment Value: 10percent PEG vs. No Treatment
  misc_feature: MA Experiment ID: 20000573 Result: Up-regulated in Transcription
  misc_feature: MA Experiment 20000573 PARAMETER Experiment Name: At_100uM_ABA_Mutants__P Parameter: Organism Value: A. thaliana
  misc_feature: MA Experiment 20000573 PARAMETER Experiment Name: At_100uM_ABA_Mutants__P Parameter: Plant Line Value: CS22 vs. Ler wt
  misc_feature: MA Experiment 20000573 PARAMETER Experiment Name: At_100uM_ABA_Mutants__P Parameter: Timepoint (hr) Value: N/A
  misc_feature: MA Experiment 20000573 PARAMETER Experiment Name: At_100uM_ABA_Mutants__P Parameter: Tissue Value: Whole Plant
  misc_feature: MA Experiment 20000573 PARAMETER Experiment Name: At_100uM_ABA_Mutants__P Parameter: Treatment Value: None
  misc_feature: MA Experiment ID: 20001247 Result: Up-regulated in Transcription
  misc_feature: MA Experiment 20001247 PARAMETER Experiment Name: At_Far-red-induction_P Parameter: Age (day) Value: 7
  misc_feature: MA Experiment 20001247 PARAMETER Experiment Name: At_Far-red-induction_P Parameter: Light Value: Far-red vs. White
  misc_feature: MA Experiment 20001247 PARAMETER Experiment Name: At_Far-red-induction_P Parameter: Organism Value: A. thaliana
  misc_feature: MA Experiment 20001247 PARAMETER Experiment Name: At_Far-red-induction_P Parameter: Plant Line Value: Columbia
  misc_feature: MA Experiment 20001247 PARAMETER Experiment Name: At_Far-red-induction_P Parameter: Timepoint (hr) Value: 1
  misc_feature: MA Experiment 20001247 PARAMETER Experiment Name: At_Far-red-induction_P Parameter: Tissue Value: Whole Plant
  misc_feature: MA Experiment ID: 20001248 Result: Up-regulated in Transcription
  misc_feature: MA Experiment 20001248 PARAMETER Experiment Name: At_Far-red-induction_P Parameter: Age (day) Value: 7
  misc_feature: MA Experiment 20001248 PARAMETER Experiment Name: At_Far-red-induction_P Parameter: Light Value: Far-red vs. White
  misc_feature: MA Experiment 20001248 PARAMETER Experiment Name: At_Far-red-induction_P Parameter: Organism Value: A. thaliana
  misc_feature: MA Experiment 20001248 PARAMETER Experiment Name: At_Far-red-induction_P Parameter: Plant Line Value: Columbia
  misc_feature: MA Experiment 20001248 PARAMETER Experiment Name: At_Far-red-induction_P Parameter: Timepoint (hr) Value: 4
  misc_feature: MA Experiment 20001248 PARAMETER Experiment Name: At_Far-red-induction_P Parameter: Tissue Value: Whole Plant
  misc_feature: MA Experiment ID: 20001450 Result: Up-regulated in Transcription
  misc_feature: MA Experiment 20001450 PARAMETER Experiment Name: At_Far-red-induction_P Parameter: Age (day) Value: 7
  misc_feature: MA Experiment 20001450 PARAMETER Experiment Name: At_Far-red-induction_P Parameter: Light Value: Far-red vs. White
  misc_feature: MA Experiment 20001450 PARAMETER Experiment Name: At_Far-red-induction_P Parameter: Organism Value: A. thaliana
  misc_feature: MA Experiment 20001450 PARAMETER Experiment Name: At_Far-red-induction_P Parameter: Plant Line Value: Columbia
  misc_feature: MA Experiment 20001450 PARAMETER Experiment Name: At_Far-red-induction_P Parameter: Timepoint (hr) Value: 8
  misc_feature: MA Experiment 20001450 PARAMETER Experiment Name: At_Far-red-induction_P Parameter: Tissue Value: Whole Plant
  misc_feature: MA Experiment ID: 20001459 Result: Down-regulated in Transcription
  misc_feature: MA Experiment 20001459 PARAMETER Experiment Name: At_50mM_NH4NO3_L-to-H_P Parameter: Age (day) Value: Undefined
  misc_feature: MA Experiment 20001459 PARAMETER Experiment Name: At_50mM_NH4NO3_L-to-H_P Parameter: Organism Value: Undefined
  misc_feature: MA Experiment 20001459 PARAMETER Experiment Name: At_50mM_NH4NO3_L-to-H_P Parameter: Plant Line Value: Undefined
  misc_feature: MA Experiment 20001459 PARAMETER Experiment Name: At_50mM_NH4NO3_L-to-H_P Parameter: Timepoint (hr) Value: 4
  misc_feature: MA Experiment 20001459 PARAMETER Experiment Name: At_50mM_NH4NO3_L-to-H_P Parameter: Tissue Value: Siliques
  misc_feature: MA Experiment 20001459 PARAMETER Experiment Name: At_50mM_NH4NO3_L-to-H_P Parameter: Treatment Value: 50mM NH4NO3 vs. 100mM Manitol
  misc_feature: MA Experiment ID: 20001554 Result: Down-regulated in Transcription
  misc_feature: MA Experiment 20001554 PARAMETER Experiment Name: At_Drought_Soil_Dry_P Parameter: Age (day) Value: 21
  misc_feature: MA Experiment 20001554 PARAMETER Experiment Name: At_Drought_Soil_Dry_P Parameter: Organism Value: A. thaliana
  misc_feature: MA Experiment 20001554 PARAMETER Experiment Name: At_Drought_Soil_Dry_P Parameter: Plant Line Value: WS
  misc_feature: MA Experiment 20001554 PARAMETER Experiment Name: At_Drought_Soil_Dry_P Parameter: Post Timepoint (hr) Value: None
  misc_feature: MA Experiment 20001554 PARAMETER Experiment Name: At_Drought_Soil_Dry_P Parameter: Post-Treatment Value: None
  misc_feature: MA Experiment 20001554 PARAMETER Experiment Name: At_Drought_Soil_Dry_P Parameter: Timepoint (day) Value: 7
  misc_feature: MA Experiment 20001554 PARAMETER Experiment Name: At_Drought_Soil_Dry_P Parameter: Treatment Value: Drought vs. No Drought
  misc_feature: MA Experiment ID: 20001555 Result: Down-regulated in Transcription
  misc_feature: MA Experiment 20001555 PARAMETER Experiment Name: At_Drought_Soil_Dry_P Parameter: Age (day) Value: 24
  misc_feature: MA Experiment 20001555 PARAMETER Experiment Name: At_Drought_Soil_Dry_P Parameter: Organism Value: A. thaliana
  misc_feature: MA Experiment 20001555 PARAMETER Experiment Name: At_Drought_Soil_Dry_P Parameter: Plant Line Value: WS
  misc_feature: MA Experiment 20001555 PARAMETER Experiment Name: At_Drought_Soil_Dry_P Parameter: Post Timepoint (hr) Value: None
  misc_feature: MA Experiment 20001555 PARAMETER Experiment Name: At_Drought_Soil_Dry_P Parameter: Post-Treatment Value: None
  misc_feature: MA Experiment 20001555 PARAMETER Experiment Name: At_Drought_Soil_Dry_P Parameter: Timepoint (day) Value: 10
  misc_feature: MA Experiment 20001555 PARAMETER Experiment Name: At_Drought_Soil_Dry_P Parameter: Treatment Value: Drought vs. No Drought
  misc_feature: MA Experiment ID: 20001556 Result: Down-regulated in Transcription
  misc_feature: MA Experiment 20001556 PARAMETER Experiment Name: At_Drought_Soil_Dry_P Parameter: Age (day) Value: 26
  misc_feature: MA Experiment 20001556 PARAMETER Experiment Name: At_Drought_Soil_Dry_P Parameter: Organism Value: A. thaliana
  misc_feature: MA Experiment 20001556 PARAMETER Experiment Name: At_Drought_Soil_Dry_P Parameter: Plant Line Value: WS
  misc_feature: MA Experiment 20001556 PARAMETER Experiment Name: At_Drought_Soil_Dry_P Parameter: Post Timepoint (hr) Value: None
  misc_feature: MA Experiment 20001556 PARAMETER Experiment Name: At_Drought_Soil_Dry_P Parameter: Post-Treatment Value: None
  misc_feature: MA Experiment 20001556 PARAMETER Experiment Name: At_Drought_Soil_Dry_P Parameter: Timepoint (day) Value: 12
  misc_feature: MA Experiment 20001556 PARAMETER Experiment Name: At_Drought_Soil_Dry_P Parameter: Treatment Value: Drought vs. No Drought
  misc_feature: MA Experiment ID: 20001559 Result: Down-regulated in Transcription
  misc_feature: MA Experiment 20001559 PARAMETER Experiment Name: At_Drought_Soil_Dry_P Parameter: Age (day) Value: 28
  misc_feature: MA Experiment 20001559 PARAMETER Experiment Name: At_Drought_Soil_Dry_P Parameter: Organism Value: A. thaliana
  misc_feature: MA Experiment 20001559 PARAMETER Experiment Name: At_Drought_Soil_Dry_P Parameter: Plant Line Value: WS
  misc_feature: MA Experiment 20001559 PARAMETER Experiment Name: At_Drought_Soil_Dry_P Parameter: Post Timepoint (hr) Value: 29
  misc_feature: MA Experiment 20001559 PARAMETER Experiment Name: At_Drought_Soil_Dry_P Parameter: Post-Treatment Value: Re-Water vs. No Drought
  misc_feature: MA Experiment 20001559 PARAMETER Experiment Name: At_Drought_Soil_Dry_P Parameter: Timepoint (day) Value: 14
  misc_feature: MA Experiment 20001559 PARAMETER Experiment Name: At_Drought_Soil_Dry_P Parameter: Treatment Value: Drought vs. No Drought
  misc_feature: MA Experiment ID: 20001560 Result: Down-regulated in Transcription
  misc_feature: MA Experiment 20001560 PARAMETER Experiment Name: At_Drought_Soil_Dry_P Parameter: Age (day) Value: 28
  misc_feature: MA Experiment 20001560 PARAMETER Experiment Name: At_Drought_Soil_Dry_P Parameter: Organism Value: A. thaliana
  misc_feature: MA Experiment 20001560 PARAMETER Experiment Name: At_Drought_Soil_Dry_P Parameter: Plant Line Value: WS
  misc_feature: MA Experiment 20001560 PARAMETER Experiment Name: At_Drought_Soil_Dry_P Parameter: Post Timepoint (hr) Value: None
  misc_feature: MA Experiment 20001560 PARAMETER Experiment Name: At_Drought_Soil_Dry_P Parameter: Post-Treatment Value: None
  misc_feature: MA Experiment 20001560 PARAMETER Experiment Name: At_Drought_Soil_Dry_P Parameter: Timepoint (day) Value: 14
  misc_feature: MA Experiment 20001560 PARAMETER Experiment Name: At_Drought_Soil_Dry_P Parameter: Treatment Value: Drought vs. No Drought
  misc_feature: MA Experiment ID: 20001755 Result: Down-regulated in Transcription
  misc_feature: MA Experiment 20001755 PARAMETER Experiment Name: At_50mM_NH4NO3_L-to-H_P Parameter: Timepoint (hr) Value: 2
  misc_feature: MA Experiment 20001755 PARAMETER Experiment Name: At_50mM_NH4NO3_L-to-H_P Parameter: Tissue Value: Leaf
  misc_feature: MA Experiment 20001755 PARAMETER Experiment Name: At_50mM_NH4NO3_L-to-H_P Parameter: Treatment Value: 50mM NH4NO3 vs 100mM Mannitol
  misc_feature: MA Experiment ID: 20001757 Result: Up-regulated in Transcription
  misc_feature: MA Experiment 20001757 PARAMETER Experiment Name: At_50mM_NH4NO3_L-to-H_P Parameter: Timepoint (hr) Value: 6
  misc_feature: MA Experiment 20001757 PARAMETER Experiment Name: At_50mM_NH4NO3_L-to-H_P Parameter: Tissue Value: Leaf
  misc_feature: MA Experiment 20001757 PARAMETER Experiment Name: At_50mM_NH4NO3_L-to-H_P Parameter: Treatment Value: 50mM NH4NO3 vs 100mM Mannitol
  misc_feature: MA Experiment ID: 20001768 Result: Down-regulated in Transcription
  misc_feature: MA Experiment 20001768 PARAMETER Experiment Name: At_Far-red-enriched-adult_P Parameter: Age (day) Value: 28
  misc_feature: MA Experiment 20001768 PARAMETER Experiment Name: At_Far-red-enriched-adult_P Parameter: Light Value: Far-red enriched vs. White
  misc_feature: MA Experiment 20001768 PARAMETER Experiment Name: At_Far-red-enriched-adult_P Parameter: Organism Value: A. thaliana
  misc_feature: MA Experiment 20001768 PARAMETER Experiment Name: At_Far-red-enriched-adult_P Parameter: Plant Line Value: Columbia
  misc_feature: MA Experiment 20001768 PARAMETER Experiment Name: At_Far-red-enriched-adult_P Parameter: Timepoint (hr) Value: 1
  misc_feature: MA Experiment 20001768 PARAMETER Experiment Name: At_Far-red-enriched-adult_P Parameter: Tissue Value: Aerial
  misc_feature: MA Experiment ID: 20001774 Result: Down-regulated in Transcription
  misc_feature: MA Experiment 20001774 PARAMETER Experiment Name: At_Far-red-enriched-adult_P Parameter: Age (day) Value: 31
  misc_feature: MA Experiment 20001774 PARAMETER Experiment Name: At_Far-red-enriched-adult_P Parameter: Light Value: Far-red enriched vs. White
  misc_feature: MA Experiment 20001774 PARAMETER Experiment Name: At_Far-red-enriched-adult_P Parameter: Organism Value: A. thaliana
  misc_feature: MA Experiment 20001774 PARAMETER Experiment Name: At_Far-red-enriched-adult_P Parameter: Plant Line Value: Columbia
  misc_feature: MA Experiment 20001774 PARAMETER Experiment Name: At_Far-red-enriched-adult_P Parameter: Timepoint (hr) Value: 72
  misc_feature: MA Experiment 20001774 PARAMETER Experiment Name: At_Far-red-enriched-adult_P Parameter: Tissue Value: Aerial
  misc_feature: MA Experiment ID: 20001906 Result: Down-regulated in Transcription
  misc_feature: MA Experiment 20001906 PARAMETER Experiment Name: At_Drought_Reproduction_P Parameter: Age (day) Value: 35
  misc_feature: MA Experiment 20001906 PARAMETER Experiment Name: At_Drought_Reproduction_P Parameter: Organism Value: A. thaliana
  misc_feature: MA Experiment 20001906 PARAMETER Experiment Name: At_Drought_Reproduction_P Parameter: Plant Line Value: WS
  misc_feature: MA Experiment 20001906 PARAMETER Experiment Name: At_Drought_Reproduction_P Parameter: Timepoint (day) Value: 5
  misc_feature: MA Experiment 20001906 PARAMETER Experiment Name: At_Drought_Reproduction_P Parameter: Tissue Value: Siliques
  misc_feature: MA Experiment 20001906 PARAMETER Experiment Name: At_Drought_Reproduction_P Parameter: Treatment Value: Drought vs. No Drought
acttgtaaaaaaactcaccaaacgaggaaagccaaagagagagagagagaaacaaaaatggcgtcacagagttgctacaatggaatccatcgtataaaaagggttcatcctctgattcactctctcacatttcatcgattctcctcatcttctcttccattcaaatctcacattccctcttcacaacaacagcttcgtattcgctcatcttcttcgctttctgatcttggaaatcgcaggcattgttcgtctactcgaggatttcaattttggtcatacaagagaagcgaagcagcgtcgccgttcaagacgaggtacagagaaaacgaagaagaagaagatatgacgattaaaccggcggttcgtatttccgacgggaatctaatcatcaaaaaccggacgattctaaccggtgtaccagataatgtcatcacgacgtcagcatcggaagctggaccggtagaaggagtcttcgtcggagctgtatttaacaaggaagagagtaaacacatcgtaccgatcggtacgcttcgcaattcccggtttatgtcttgtttccggtttaagctctggtggatggcccagagaatgggagaaatgggccgagatattccctacgagacgcagttcttattggtcgagagcaacgatgggtcccaccttgagtctgacggagctaacggcgtcgagtgtaaccagaaagtttacaccgttttcttgccgttaatcgaaggatctttccgttcgtgtctccaaggaaacgttaacgatgaggttgagctctgtttggagagtggtgacgtggacactaaacggtcgtcgtttactcactctctgtatattcacgccggtacagatccgtttcagacaataacggacgctattcgcaccgttaagttgcatctgaatagtttccgtcaacgtcacgaaaagaagcttccagggatcgttgactacttcggatggtgcacttgggacgcgttttatcaagaagtgactcaggaaggcgtcgaagctggtcttaagtctctcgccgccggtggtacgccgccgaagtttgttatcatagacgacggttggcaatcagttgagagagatgccacggtggaggccggagatgagaagaaagagtcaccgatttttcgactgacggggatcaaggagaacgaaaagtttaagaagaaggatgatccaaacgttgggattaagaacattgtcaagattgctaaggagaaacacggtttgaaatatgtttacgtgtggcacgcgataacgggttattggggcggagttagacccggggaagaatacggatctgttatgaaatatcctaatatgtcaaagggtgtggtggagaatgatccgacgtggaagactgatgtaatgacgctgcaagggttgggtttggttagccccaagaaagtgtataagttttacaatgagcttcatagttacttggctgatgctggcgtggacggtgtgaaagtggatgtgcagtgtgtattggagactttgggtggtggtttaggcggtcgggttgagctgactcgtcagtttcatcaagctcttgactcctctgttgctaagaacttcccggataatggctgcattgcttgtatgagccataatacggatgctctttactgctcgaagcaagcagctgtgattagagcatcagatgatttctatccacgggatccggtgtctcataccatccatatagcctccgttgcttataacagtgtgttcttgggagagtttatgcagcctgactgggatatgttccattccgtgcaccctgctgcagagtatcatgcctctgctagggccatcagtggtgggcctctctatgtcagtgattctcctggaaagcacaactttgagcttctaagaaagcttgtattgcctgatggatcgattcttcgtgctcgactccctggtagaccaactcgcgattgtttgttcgctgatcctgcccgtgatggtgtcagcttgctaaagatatggaacatgaacaagtacactggagttcttggcgtgtataactgccaaggagcagcttggagcagcacagagagaaaaaacattttccaccagactaaaactgatagcctcactggctccattcgtggtcgtgatgtgcattcaatatcggaggcctccactgatccaacaacctggaatggagactgtgctgtttactcccagagcagaggcgaacttattgttatgccatacaatgtgtctcttccagtctcactcaaaatccgtgagcacgagatcttcacggtgagccccattagtcatcttgttgatggtgtatcttttgccccaattggtctagtaaacatgtacaattcgggaggagctatcgaaggacttagatatgaagccgagaagatgaaagtggtaatggaagttaaaggatgtggcaaattcggatcttactcttctgtgaagcctaagagatgcgttgttgagtcaaatgagattgcattcgagtacgattcctcctctggattggtcacctttgagttagacaaaatgcctatagagaacaaacgatttcatctgatccaagttgagttatgaagagtgattcatacaattcattaaacaaaaacagtctcaaaacagttttaaatagtctttattatttgtaaacctttggttaccattgtagctactttcaatgttatactacagttcacgttattgttct

SEQ ID NO: 44841 - protein, 863 aa, Arabidopsis thaliana
  peptide (1)..(863): Ceres Seq. ID no. 12600043
  misc_feature (115)..(792): Homolog of NCBI NO: 29838631 NR Description: alkaline alpha galactosidase II [Cucumis melo]
  misc_feature (803)..(862): Homolog of NCBI NO: 7242785 NR Description: putative seed imbibition protein [Persea
  misc_feature (115)..(792): Homolog of NCBI NO: 7242785 NR Description: putative seed imbibition protein [Persea
  misc_feature (115)..(863): Homolog of NCBI NO: 282994 NR Description: Sip1 protein - barley
  misc_feature (803)..(863): Homolog of NCBI NO: 629602 NR Description: probable imbibition protein - wild cabbage
  misc_feature (115)..(794): Homolog of NCBI NO: 629602 NR Description: probable imbibition protein - wild cabbage
  misc_feature (803)..(858): Homolog of NCBI NO: 15230330 NR Description: glycosyl hydrolase family 36
  misc_feature (115)..(794): Homolog of NCBI NO: 15230330 NR Description: glycosyl hydrolase family 36
  misc_feature (803)..(858): Homolog of NCBI NO: 15292677 NR Description: putative imbibition protein homolog [Arabidopsis
  misc_feature (115)..(794): Homolog of NCBI NO: 15292677 NR Description: putative imbibition protein homolog [Arabidopsis
TCKKTHQTRKAKERERETKMASQSCYNGIHRIKRVHPLIHSLTFHRFSSSSLPFKSHIPSSQQQLRIRSSSSLSDLGNRRHCSSTRGFQFWSYKRSEAASPFKTRYRENEEEEDMTIKPAVRISDGNLIIKNRTILTGVPDNVITTSASEAGPVEGVFVGAVFNKEESKHIVPIGTLRNSRFMSCFRFKLWWMAQRMGEMGRDIPYETQFLLVESNDGSHLESDGANGVECNQKVYTVFLPLIEGSFRSCLQGNVNDEVELCLESGDVDTKRSSFTHSLYIHAGTDPFQTITDAIRTVKLHLNSFRQRHEKKLPGIVDYFGWCTWDAFYQEVTQEGVEAGLKSLAAGGTPPKFVIIDDGWQSVERDATVEAGDEKKESPIFRLTGIKENEKFKKKDDPNVGIKNIVKIAKEKHGLKYVYVWHAITGYWGGVRPGEEYGSVMKYPNMSKGVVENDPTWKTDVMTLQGLGLVSPKKVYKFYNELHSYLADAGVDGVKVDVQCVLETLGGGLGGRVELTRQFHQALDSSVAKNFPDNGCIACMSHNTDALYCSKQAAVIRASDDFYPRDPVSHTIHIASVAYNSVFLGEFMQPDWDMFHSVHPAAEYHASARAISGGPLYVSDSPGKHNFELLRKLVLPDGSILRARLPGRPTRDCLFADPARDGVSLLKIWNMNKYTGVLGVYNCQGAAWSSTERKNIFHQTKTDSLTGSIRGRDVHSISEASTDPTTWNGDCAVYSQSRGELIVMPYNVSLPVSLKIREHEIFTVSPISHLVDGVSFAPIGLVNMYNSGGAIEGLRYEAEKMKVVMEVKGCGKFGSYSSVKPKRCVVESNEIAFEYDSSSGLVTFELDKMPIENKRFHLIQVEL

SEQ ID NO: 44842 - protein, 844 aa, Arabidopsis thaliana
  peptide (1)..(844): Ceres Seq. ID no. 12600044
  misc_feature (96)..(773): Homolog of NCBI NO: 29838631 NR Description: alkaline alpha galactosidase II [Cucumis melo]
  misc_feature (784)..(843): Homolog of NCBI NO: 7242785 NR Description: putative seed imbibition protein [Persea
  misc_feature (96)..(773): Homolog of NCBI NO: 7242785 NR Description: putative seed imbibition protein [Persea
  misc_feature (96)..(844): Homolog of NCBI NO: 282994 NR Description: Sip1 protein - barley
  misc_feature (784)..(844): Homolog of NCBI NO: 629602 NR Description: probable imbibition protein - wild cabbage
  misc_feature (96)..(775): Homolog of NCBI NO: 629602 NR Description: probable imbibition protein - wild cabbage
  misc_feature (784)..(839): Homolog of NCBI NO: 15230330 NR Description: glycosyl hydrolase family 36
  misc_feature (96)..(775): Homolog of NCBI NO: 15230330 NR Description: glycosyl hydrolase family 36
  misc_feature (784)..(839): Homolog of NCBI NO: 15292677 NR Description: putative imbibition protein homolog [Arabidopsis
  misc_feature (96)..(775): Homolog of NCBI NO: 15292677 NR Description: putative imbibition protein homolog [Arabidopsis
MASQSCYNGIHRIKRVHPLIHSLTFHRFSSSSLPFKSHIPSSQQQLRIRSSSSLSDLGNRRHCSSTRGFQFWSYKRSEAASPFKTRYRENEEEEDMTIKPAVRISDGNLIIKNRTILTGVPDNVITTSASEAGPVEGVFVGAVFNKEESKHIVPIGTLRNSRFMSCFRFKLWWMAQRMGEMGRDIPYETQFLLVESNDGSHLESDGANGVECNQKVYTVFLPLIEGSFRSCLQGNVNDEVELCLESGDVDTKRSSFTHSLYIHAGTDPFQTITDAIRTVKLHLNSFRQRHEKKLPGIVDYFGWCTWDAFYQEVTQEGVEAGLKSLAAGGTPPKFVIIDDGWQSVERDATVEAGDEKKESPIFRLTGIKENEKFKKKDDPNVGIKNIVKIAKEKHGLKYVYVWHAITGYWGGVRPGEEYGSVMKYPNMSKGVVENDPTWKTDVMTLQGLGLVSPKKVYKFYNELHSYLADAGVDGVKVDVQCVLETLGGGLGGRVELTRQFHQALDSSVAKNFPDNGCIACMSHNTDALYCSKQAAVIRASDDFYPRDPVSHTIHIASVAYNSVFLGEFMQPDWDMFHSVHPAAEYHASARAISGGPLYVSDSPGKHNFELLRKLVLPDGSILRARLPGRPTRDCLFADPARDGVSLLKIWNMNKYTGVLGVYNCQGAAWSSTERKNIFHQTKTDSLTGSIRGRDVHSISEASTDPTTWNGDCAVYSQSRGELIVMPYNVSLPVSLKIREHEIFTVSPISHLVDGVSFAPIGLVNMYNSGGAIEGLRYEAEKMKVVMEVKGCGKFGSYSSVKPKRCVVESNEIAFEYDSSSGLVTFELDKMPIENKRFHLIQVEL

SEQ ID NO: 44843 - protein, 749 aa, Arabidopsis thaliana
  peptide (1)..(749): Ceres Seq. ID no. 12600045
  misc_feature (1)..(678): Homolog of NCBI NO: 29838631 NR Description: alkaline alpha galactosidase II [Cucumis melo]
  misc_feature (689)..(748): Homolog of NCBI NO: 7242785 NR Description: putative seed imbibition protein [Persea
  misc_feature (1)..(678): Homolog of NCBI NO: 7242785 NR Description: putative seed imbibition protein [Persea
  misc_feature (1)..(749): Homolog of NCBI NO: 282994 NR Description: Sip1 protein - barley
  misc_feature (689)..(749): Homolog of NCBI NO: 629602 NR Description: probable imbibition protein - wild cabbage
  misc_feature (1)..(680): Homolog of NCBI NO: 629602 NR Description: probable imbibition protein - wild cabbage
  misc_feature (689)..(744): Homolog of NCBI NO: 15230330 NR Description: glycosyl hydrolase family 36
  misc_feature (1)..(680): Homolog of NCBI NO: 15230330 NR Description: glycosyl hydrolase family 36
  misc_feature (689)..(744): Homolog of NCBI NO: 15292677 NR Description: putative imbibition protein homolog [Arabidopsis
  misc_feature (1)..(680): Homolog of NCBI NO: 15292677 NR Description: putative imbibition protein homolog [Arabidopsis
MTIKPAVRISDGNLIIKNRTILTGVPDNVITTSASEAGPVEGVFVGAVFNKEESKHIVPIGTLRNSRFMSCFRFKLWWMAQRMGEMGRDIPYETQFLLVESNDGSHLESDGANGVECNQKVYTVFLPLIEGSFRSCLQGNVNDEVELCLESGDVDTKRSSFTHSLYIHAGTDPFQTITDAIRTVKLHLNSFRQRHEKKLPGIVDYFGWCTWDAFYQEVTQEGVEAGLKSLAAGGTPPKFVIIDDGWQSVERDATVEAGDEKKESPIFRLTGIKENEKFKKKDDPNVGIKNIVKIAKEKHGLKYVYVWHAITGYWGGVRPGEEYGSVMKYPNMSKGVVENDPTWKTDVMTLQGLGLVSPKKVYKFYNELHSYLADAGVDGVKVDVQCVLETLGGGLGGRVELTRQFHQALDSSVAKNFPDNGCIACMSHNTDALYCSKQAAVIRASDDFYPRDPVSHTIHIASVAYNSVFLGEFMQPDWDMFHSVHPAAEYHASARAISGGPLYVSDSPGKHNFELLRKLVLPDGSILRARLPGRPTRDCLFADPARDGVSLLKIWNMNKYTGVLGVYNCQGAAWSSTERKNIFHQTKTDSLTGSIRGRDVHSISEASTDPTTWNGDCAVYSQSRGELIVMPYNVSLPVSLKIREHEIFTVSPISHLVDGVSFAPIGLVNMYNSGGAIEGLRYEAEKMKVVMEVKGCGKFGSYSSVKPKRCVVESNEIAFEYDSSSGLVTFELDKMPIENKRFHLIQVEL

SEQ ID NO: 44844 - DNA, 3169 bp, Arabidopsis thaliana
  misc_feature (1)..(3169): Ceres Seq. ID no. 14302738
  misc_feature: MA Experiment ID: 20001247 Result: Up-regulated in Transcription
  misc_feature: MA Experiment 20001247 PARAMETER Experiment Name: At_Far-red-induction_P Parameter: Age (day) Value: 7
  misc_feature: MA Experiment 20001247 PARAMETER Experiment Name: At_Far-red-induction_P Parameter: Light Value: Far-red vs. White
  misc_feature: MA Experiment 20001247 PARAMETER Experiment Name: At_Far-red-induction_P Parameter: Organism Value: A. thaliana
  misc_feature: MA Experiment 20001247 PARAMETER Experiment Name: At_Far-red-induction_P Parameter: Plant Line Value: Columbia
  misc_feature: MA Experiment 20001247 PARAMETER Experiment Name: At_Far-red-induction_P Parameter: Timepoint (hr) Value: 1
  misc_feature: MA Experiment 20001247 PARAMETER Experiment Name: At_Far-red-induction_P Parameter: Tissue Value: Whole Plant
  misc_feature: MA Experiment ID: 20001248 Result: Up-regulated in Transcription
  misc_feature: MA Experiment 20001248 PARAMETER Experiment Name: At_Far-red-induction_P Parameter: Age (day) Value: 7
  misc_feature: MA Experiment 20001248 PARAMETER Experiment Name: At_Far-red-induction_P Parameter: Light Value: Far-red vs. White
  misc_feature: MA Experiment 20001248 PARAMETER Experiment Name: At_Far-red-induction_P Parameter: Organism Value: A. thaliana
  misc_feature: MA Experiment 20001248 PARAMETER Experiment Name: At_Far-red-induction_P Parameter: Plant Line Value: Columbia
  misc_feature: MA Experiment 20001248 PARAMETER Experiment Name: At_Far-red-induction_P Parameter: Timepoint (hr) Value: 4
  misc_feature: MA Experiment 20001248 PARAMETER Experiment Name: At_Far-red-induction_P Parameter: Tissue Value: Whole Plant
gctctctctctctctttcgctgctctcacacgcaaataatggctcatctcttcagggagctgtctctgggccactccaagagagagtctacgccgccgccgccgtcacattcggcgacttcacgttcttcttcaatgtcttccgatctacctccatcaccactcggacaactcgctgtccaactttccgattccgatctccgtctcactgcttacgagatcttcgtcgccgcatgtcgtagcgccaccggtaaacctctctcatcggctgtttcagtcgctgttttgaatcaggattctcccaatggctctcctgcttcgccggcgattcagcgttctctgacctcaaccgccgctagtaaaatgaagaaagctttggggttaaggtcgtcttcttcgctttcacctggatctaataagagttctggttctgcttcgggttctaatggtaagtcgaaacgtcctactactgtcggtgagcttatgcggatccaaatgcgagtatcggaggctgtcgattctcgtgttcgtagagcttttcttagaatcgctgcttcacaggttggaaggaagattgagtcagtagttcttcctttagagttgttacagcagctaaagtcttctgattttacggatcagcaagaatatgatgcttggctgaagagatcattgaaggttcttgaggcaggtcttttgttgcatcctcgtgtacctcttgataagacgaatagttctcaacgactgcgacagattattcatggtgctttagatcggcctttggagactggaaggaataatgagcaaatgcaaagtcttagatcagcggtcatgtctcttgcaactagatctgatgggtctttctctgattcttgtcactgggctgatggatctccgtttaatctcaggctttatgaattgcttttagaagcgtgttttgattctaatgatgcgacgtccatggttgaggaagttgacgacctaatggaacatataaagaagacgtgggtaattcttggaatcaatcaaatgctgcataacctctgttttacgtggcttttgtttagtcggtatgttgttactggacaagttgagatggacctgcttcatgcttgtgattctcaactggcagaagttgctaaagatgcaaagacaacaaaggatcctgaatactcccaggttttaagttctacactgagtgctatattaggatgggcagagaaaaggctccttgcataccatgacacttttgaccgaggaaatattcataccatggagggaattgtttctgtgggtgtatcagctgccaggatattagttgaagatatatctaacgagtaccgtagaagaaggaaaggagaagttgatgtagctcgtaccaggattgagacgtacatcaggtcctcactacgaacttcgtttgcgcagagaatggagaaagcagattcaagccggagagcatctaggaaccagaaaaatcctcttcctgttctagccatccttgctaaggacattggtgagctagctattcaggaaaagcggatgttcagtccaatattgaagagatggcatccgtttgctgcaggggttgctgtggcgacccttcatgtttgttacggaaatgagattaaacagtttatagccggaatatctgaattgacacctgatgctgtccagatactaagagctgcagataagctagaaaaggatctggtgcaaatcgcagtagaggattctgttgacagtgatgatggtggcaaagcaattatccgtgaaatgcctcccttcgaagctgagaccgtaattgctaatttggtcaaagactggataaaggcaagaatagacagacttaaggaatgggttgacaggaatttgcagcaagaggtttggaaacccctggagaacctagaaggaggatatgcacagtctgctgccgaagtgttgcggattactgatgaaactttggaagctttttttcagcttcccatacctatgcatcctgctgtattacctgatttaattattggtttagacaaatatcttcagtattatgtctcaaaggcgaaatctggctgcggctctcggactacgtacatgcctacaatgcctgcactcaccagatgtacaacgggatcaaaattccaatggaagaagaaagaaaagacacctaccactcagaagagagaatctcaggtttcggttatgaacggtgagaattcttttggggtcacgcaaatatgtgtcagaataaacagcttgcacaaaatccgcagtgagcttgatgttgtggaaaaaagagtgatcacacatttgaggaactgtgagtcagctcacaccgatgacttttccaacggcttagaaaaaaagtttgagctcacaccagcggcttgcatagaaggcgttcaacagctttctgagtctctggcttataaggtcgtcttccacgacctaagccacacgttatgggacgggttatacatcggagacctctcttcctctagaatcgatcctttcctcaaggaactcgaacagaatttgacagtcatagcagagacagtacatgaaagagttcgaacacgcatcatcaccgatattatgagagcctctttagatggcttcttacttgtcctgcttgccggaggaccctctagggcgttcacaagacaagactctcagataatggaagaagatttcaaatcaatgaaagatatgttctgggctaacggagatggtctagccatggacctgatcgataaattctcaaccactgtcagaggcgtgcttcctctgttcagtacagatacagacagtttaatagagaggttcaagggaacgaccctcgaagcatatggttcttcagctaagtcgaggcttccgttgcctccaacatcaggccagtggaatggcatggagccaaacacactcttacgtgttttgtgttaccgtaacgacgaatctgccacgaggtttctcaagaagacatataatctacctaagaagctttagtaaacttacggctactactgcaacgtataataacctcacaagatgaagagtgtgtgttccacttgcaggagggagcctccgagatttgtatagtgagtttcattttttttgttttatggttttttttctaatacattcctatacgtactatataattcatttatatc

SEQ ID NO: 44845 - protein, 999 aa, Arabidopsis thaliana
  peptide (1)..(999): Ceres Seq. ID no. 14302739
  misc_feature (642)..(998): Homolog of NCBI NO: 37535276 NR Description: hypothetical protein [Oryza sativa (japonica
  misc_feature (34)..(474): Homolog of NCBI NO: 37535276 NR Description: hypothetical protein [Oryza sativa (japonica
  misc_feature (108)..(910): Homolog of NCBI NO: 26451960 NR Description: unknown protein [Arabidopsis thaliana]
  misc_feature (108)..(910): Homolog of NCBI NO: 15226107 NR Description: expressed protein [Arabidopsis thaliana]
  misc_feature (109)..(949): Homolog of NCBI NO: 30678889 NR Description: expressed protein [Arabidopsis thaliana]
  misc_feature (129)..(998): Homolog of NCBI NO: 26451960 NR Description: unknown protein [Arabidopsis thaliana]
  misc_feature (129)..(998): Homolog of NCBI NO: 15226107 NR Description: expressed protein [Arabidopsis thaliana]
  misc_feature (165)..(999): Homolog of NCBI NO: 30680849 NR Description: expressed protein [Arabidopsis thaliana]
  misc_feature (13)..(999): Homolog of NCBI NO: 40253418 NR Description: hypothetical protein [Oryza sativa (japonica
  misc_feature (51)..(999): Homolog of NCBI NO: 25411952 NR Description: hypothetical protein At2g20010 [imported] -
SLSLFRCSHTQIMAHLFRELSLGHSKRESTPPPPSHSATSRSSSMSSDLPPSPLGQLAVQLSDSDLRLTAYEIFVAACRSATGKPLSSAVSVAVLNQDSPNGSPASPAIQRSLTSTAASKMKKALGLRSSSSLSPGSNKSSGSASGSNGKSKRPTTVGELMRIQMRVSEAVDSRVRRAFLRIAASQVGRKIESVVLPLELLQQLKSSDFTDQQEYDAWLKRSLKVLEAGLLLHPRVPLDKTNSSQRLRQIIHGALDRPLETGRNNEQMQSLRSAVMSLATRSDGSFSDSCHWADGSPFNLRLYELLLEACFDSNDATSMVEEVDDLMEHIKKTWVILGINQMLHNLCFTWLLFSRYVVTGQVEMDLLHACDSQLAEVAKDAKTTKDPEYSQVLSSTLSAILGWAEKRLLAYHDTFDRGNIHTMEGIVSVGVSAARILVEDISNEYRRRRKGEVDVARTRIETYIRSSLRTSFAQRMEKADSSRRASRNQKNPLPVLAILAKDIGELAIQEKRMFSPILKRWHPFAAGVAVATLHVCYGNEIKQFIAGISELTPDAVQILRAADKLEKDLVQIAVEDSVDSDDGGKAIIREMPPFEAETVIANLVKDWIKARIDRLKEWVDRNLQQEVWKPLENLEGGYAQSAAEVLRITDETLEAFFQLPIPMHPAVLPDLIIGLDKYLQYYVSKAKSGCGSRTTYMPTMPALTRCTTGSKFQWKKKEKTPTTQKRESQVSVMNGENSFGVTQICVRINSLHKIRSELDVVEKRVITHLRNCESAHTDDFSNGLEKKFELTPAACIEGVQQLSESLAYKVVFHDLSHTLWDGLYIGDLSSSRIDPFLKELEQNLTVIAETVHERVRTRIITDIMRASLDGFLLVLLAGGPSRAFTRQDSQIMEEDFKSMKDMFWANGDGLAMDLIDKFSTTVRGVLPLFSTDTDSLIERFKGTTLEAYGSSAKSRLPLPPTSGQWNGMEPNTLLRVLCYRNDESATRFLKKTYNLPKKL

SEQ ID NO: 44846 - protein, 987 aa, Arabidopsis thaliana
  peptide (1)..(987): Ceres Seq. ID no. 14302740
  misc_feature (630)..(986): Homolog of NCBI NO: 37535276 NR Description: hypothetical protein [Oryza sativa (japonica
  misc_feature (22)..(462): Homolog of NCBI NO: 37535276 NR Description: hypothetical protein [Oryza sativa (japonica
  misc_feature (96)..(898): Homolog of NCBI NO: 26451960 NR Description: unknown protein [Arabidopsis thaliana]
  misc_feature (96)..(898): Homolog of NCBI NO: 15226107 NR Description: expressed protein [Arabidopsis thaliana]
  misc_feature (97)..(937): Homolog of NCBI NO: 30678889 NR Description: expressed protein [Arabidopsis thaliana]
  misc_feature (117)..(986): Homolog of NCBI NO: 26451960 NR Description: unknown protein [Arabidopsis thaliana]
  misc_feature (117)..(986): Homolog of NCBI NO: 15226107 NR Description: expressed protein [Arabidopsis thaliana]
  misc_feature (153)..(987): Homolog of NCBI NO: 30680849 NR Description: expressed protein [Arabidopsis thaliana]
  misc_feature (1)..(987): Homolog of NCBI NO: 40253418 NR Description: hypothetical protein [Oryza sativa (japonica
  misc_feature (39)..(987): Homolog of NCBI NO: 25411952 NR Description: hypothetical protein At2g20010 [imported] -
MAHLFRELSLGHSKRESTPPPPSHSATSRSSSMSSDLPPSPLGQLAVQLSDSDLRLTAYEIFVAACRSATGKPLSSAVSVAVLNQDSPNGSPASPAIQRSLTSTAASKMKKALGLRSSSSLSPGSNKSSGSASGSNGKSKRPTTVGELMRIQMRVSEAVDSRVRRAFLRIAASQVGRKIESVVLPLELLQQLKSSDFTDQQEYDAWLKRSLKVLEAGLLLHPRVPLDKTNSSQRLRQIIHGALDRPLETGRNNEQMQSLRSAVMSLATRSDGSFSDSCHWADGSPFNLRLYELLLEACFDSNDATSMVEEVDDLMEHIKKTWVILGINQMLHNLCFTWLLFSRYVVTGQVEMDLLHACDSQLAEVAKDAKTTKDPEYSQVLSSTLSAILGWAEKRLLAYHDTFDRGNIHTMEGIVSVGVSAARILVEDISNEYRRRRKGEVDVARTRIETYIRSSLRTSFAQRMEKADSSRRASRNQKNPLPVLAILAKDIGELAIQEKRMFSPILKRWHPFAAGVAVATLHVCYGNEIKQFIAGISELTPDAVQILRAADKLEKDLVQIAVEDSVDSDDGGKAIIREMPPFEAETVIANLVKDWIKARIDRLKEWVDRNLQQEVWKPLENLEGGYAQSAAEVLRITDETLEAFFQLPIPMHPAVLPDLIIGLDKYLQYYVSKAKSGCGSRTTYMPTMPALTRCTTGSKFQWKKKEKTPTTQKRESQVSVMNGENSFGVTQICVRINSLHKIRSELDVVEKRVITHLRNCESAHTDDFSNGLEKKFELTPAACIEGVQQLSESLAYKVVFHDLSHTLWDGLYIGDLSSSRIDPFLKELEQNLTVIAETVHERVRTRIITDIMRASLDGFLLVLLAGGPSRAFTRQDSQIMEEDFKSMKDMFWANGDGLAMDLIDKFSTTVRGVLPLFSTDTDSLIERFKGTTLEAYGSSAKSRLPLPPTSGQWNGMEPNTLLRVLCYRNDESATRFLKKTYNLPKKL

SEQ ID NO: 44847 - protein, 955 aa, Arabidopsis thaliana
  peptide (1)..(955): Ceres Seq. ID no. 14302741
  misc_feature (598)..(954): Homolog of NCBI NO: 37535276 NR Description: hypothetical protein [Oryza sativa (japonica
  misc_feature (1)..(430): Homolog of NCBI NO: 37535276 NR Description: hypothetical protein [Oryza sativa (japonica
  misc_feature (64)..(866): Homolog of NCBI NO: 26451960 NR Description: unknown protein [Arabidopsis thaliana]
  misc_feature (64)..(866): Homolog of NCBI NO: 15226107 NR Description: expressed protein [Arabidopsis thaliana]
  misc_feature (65)..(905): Homolog of NCBI NO: 30678889 NR Description: expressed protein [Arabidopsis thaliana]
  misc_feature (85)..(954): Homolog of NCBI NO: 26451960 NR Description: unknown protein [Arabidopsis thaliana]
  misc_feature (85)..(954): Homolog of NCBI NO: 15226107 NR Description: expressed protein [Arabidopsis thaliana]
  misc_feature (121)..(955): Homolog of NCBI NO: 30680849 NR Description: expressed protein [Arabidopsis thaliana]
  misc_feature (1)..(955): Homolog of NCBI NO: 40253418 NR Description: hypothetical protein [Oryza sativa (japonica
  misc_feature (7)..(955): Homolog of NCBI NO: 25411952 NR Description: hypothetical protein At2g20010 [imported] -
MSSDLPPSPLGQLAVQLSDSDLRLTAYEIFVAACRSATGKPLSSAVSVAVLNQDSPNGSPASPAIQRSLTSTAASKMKKALGLRSSSSLSPGSNKSSGSASGSNGKSKRPTTVGELMRIQMRVSEAVDSRVRRAFLRIAASQVGRKIESVVLPLELLQQLKSSDFTDQQEYDAWLKRSLKVLEAGLLLHPRVPLDKTNSSQRLRQIIHGALDRPLETGRNNEQMQSLRSAVMSLATRSDGSFSDSCHWADGSPFNLRLYELLLEACFDSNDATSMVEEVDDLMEHIKKTWVILGINQMLHNLCFTWLLFSRYVVTGQVEMDLLHACDSQLAEVAKDAKTTKDPEYSQVLSSTLSAILGWAEKRLLAYHDTFDRGNIHTMEGIVSVGVSAARILVEDISNEYRRRRKGEVDVARTRIETYIRSSLRTSFAQRMEKADSSRRASRNQKNPLPVLAILAKDIGELAIQEKRMFSPILKRWHPFAAGVAVATLHVCYGNEIKQFIAGISELTPDAVQILRAADKLEKDLVQIAVEDSVDSDDGGKAIIREMPPFEAETVIANLVKDWIKARIDRLKEWVDRNLQQEVWKPLENLEGGYAQSAAEVLRITDETLEAFFQLPIPMHPAVLPDLIIGLDKYLQYYVSKAKSGCGSRTTYMPTMPALTRCTTGSKFQWKKKEKTPTTQKRESQVSVMNGENSFGVTQICVRINSLHKIRSELDVVEKRVITHLRNCESAHTDDFSNGLEKKFELTPAACIEGVQQLSESLAYKVVFHDLSHTLWDGLYIGDLSSSRIDPFLKELEQNLTVIAETVHERVRTRIITDIMRASLDGFLLVLLAGGPSRAFTRQDSQIMEEDFKSMKDMFWANGDGLAMDLIDKFSTTVRGVLPLFSTDTDSLIERFKGTTLEAYGSSAKSRLPLPPTSGQWNGMEPNTLLRVLCYRNDESATRFLKKTYNLPKKL

SEQ ID NO: 44848 - DNA, 2810 bp, Arabidopsis thaliana
  misc_feature (1)..(2810): Ceres Seq. ID no. 12650352
  misc_feature: MA Experiment ID: 20000180 Result: Up-regulated in Transcription
  misc_feature: MA Experiment 20000180 PARAMETER Experiment Name: At_Germinating_Seeds_P Parameter: Age (hr) Value: 24 vs. 0
  misc_feature: MA Experiment 20000180 PARAMETER Experiment Name: At_Germinating_Seeds_P Parameter: Tissue Value: Germinating Seeds
  misc_feature: MA Experiment ID: 20000438 Result: Up-regulated in Transcription
  misc_feature: MA Experiment 20000438 PARAMETER Experiment Name: At_Shoots__P Parameter: Age (day) Value: 14
  misc_feature: MA Experiment 20000438 PARAMETER Experiment Name: At_Shoots__P Parameter: Tissue Value: Shoots vs. Whole Plant
  misc_feature: MA Experiment ID: 20000495 Result: Down-regulated in Transcription
  misc_feature: MA Experiment 20000495 PARAMETER Experiment Name: At_Guard_Cells_P Parameter: Harvest Date Value: 8/2/2002
  misc_feature: MA Experiment 20000495 PARAMETER Experiment Name: At_Guard_Cells_P Parameter: Organism Value: A. thaliana
  misc_feature: MA Experiment 20000495 PARAMETER Experiment Name: At_Guard_Cells_P Parameter: Tissue Value: Guard Cells vs. Leaves
  misc_feature: MA Experiment ID: 20000496 Result: Down-regulated in Transcription
  misc_feature: MA Experiment 20000496 PARAMETER Experiment Name: At_Guard_Cells_P Parameter: Harvest Date Value: 7/19/2002
  misc_feature: MA Experiment 20000496 PARAMETER Experiment Name: At_Guard_Cells_P Parameter: Organism Value: Canola
  misc_feature: MA Experiment 20000496 PARAMETER Experiment Name: At_Guard_Cells_P Parameter: Tissue Value: Guard Cells vs. Leaves
  misc_feature: MA Experiment ID: 20000573 Result: Down-regulated in Transcription
  misc_feature: MA Experiment 20000573 PARAMETER Experiment Name: At_100uM_ABA_Mutants__P Parameter: Organism Value: A. thaliana
  misc_feature: MA Experiment 20000573 PARAMETER Experiment Name: At_100uM_ABA_Mutants__P Parameter: Plant Line Value: CS22 vs. Ler wt
  misc_feature: MA Experiment 20000573 PARAMETER Experiment Name: At_100uM_ABA_Mutants__P Parameter: Timepoint (hr) Value: N/A
  misc_feature: MA Experiment 20000573 PARAMETER Experiment Name: At_100uM_ABA_Mutants__P Parameter: Tissue Value: Whole Plant
  misc_feature: MA Experiment 20000573 PARAMETER Experiment Name: At_100uM_ABA_Mutants__P Parameter: Treatment Value: None
  misc_feature: MA Experiment ID: 20001247 Result: Up-regulated in Transcription
  misc_feature: MA Experiment 20001247 PARAMETER Experiment Name: At_Far-red-induction_P Parameter: Age (day) Value: 7
  misc_feature: MA Experiment 20001247 PARAMETER Experiment Name: At_Far-red-induction_P Parameter: Light Value: Far-red vs. White
  misc_feature: MA Experiment 20001247 PARAMETER Experiment Name: At_Far-red-induction_P Parameter: Organism Value: A. thaliana
  misc_feature: MA Experiment 20001247 PARAMETER Experiment Name: At_Far-red-induction_P Parameter: Plant Line Value: Columbia
  misc_feature: MA Experiment 20001247 PARAMETER Experiment Name: At_Far-red-induction_P Parameter: Timepoint (hr) Value: 1
  misc_feature: MA Experiment 20001247 PARAMETER Experiment Name: At_Far-red-induction_P Parameter: Tissue Value: Whole Plant
  misc_feature: MA Experiment ID: 20001248 Result: Down-regulated in Transcription
  misc_feature: MA Experiment 20001248 PARAMETER Experiment Name: At_Far-red-induction_P Parameter: Age (day) Value: 7
  misc_feature: MA Experiment 20001248 PARAMETER Experiment Name: At_Far-red-induction_P Parameter: Light Value: Far-red vs. White
  misc_feature: MA Experiment 20001248 PARAMETER Experiment Name: At_Far-red-induction_P Parameter: Organism Value: A. thaliana
  misc_feature: MA Experiment 20001248 PARAMETER Experiment Name: At_Far-red-induction_P Parameter: Plant Line Value: Columbia
  misc_feature: MA Experiment 20001248 PARAMETER Experiment Name: At_Far-red-induction_P Parameter: Timepoint (hr) Value: 4
  misc_feature: MA Experiment 20001248 PARAMETER Experiment Name: At_Far-red-induction_P Parameter: Tissue Value: Whole Plant
  misc_feature: MA Experiment ID: 20001450 Result: Down-regulated in Transcription
  misc_feature: MA Experiment 20001450 PARAMETER Experiment Name: At_Far-red-induction_P Parameter: Age (day) Value: 7
  misc_feature: MA Experiment 20001450 PARAMETER Experiment Name: At_Far-red-induction_P Parameter: Light Value: Far-red vs. White
  misc_feature: MA Experiment 20001450 PARAMETER Experiment Name: At_Far-red-induction_P Parameter: Organism Value: A. thaliana
  misc_feature: MA Experiment 20001450 PARAMETER Experiment Name: At_Far-red-induction_P Parameter: Plant Line Value: Columbia
  misc_feature: MA Experiment 20001450 PARAMETER Experiment Name: At_Far-red-induction_P Parameter: Timepoint (hr) Value: 8
  misc_feature: MA Experiment 20001450 PARAMETER Experiment Name: At_Far-red-induction_P Parameter: Tissue Value: Whole Plant
  misc_feature: MA Experiment ID: 20001451 Result: Up-regulated in Transcription
  misc_feature: MA Experiment 20001451 PARAMETER Experiment Name: At_Far-red-induction_P Parameter: Age (day) Value: 7
  misc_feature: MA Experiment 20001451 PARAMETER Experiment Name: At_Far-red-induction_P Parameter: Light Value: Far-red vs. White
  misc_feature: MA Experiment 20001451 PARAMETER Experiment Name: At_Far-red-induction_P Parameter: Organism Value: A. thaliana
  misc_feature: MA Experiment 20001451 PARAMETER Experiment Name: At_Far-red-induction_P Parameter: Plant Line Value: Columbia
  misc_feature: MA Experiment 20001451 PARAMETER Experiment Name: At_Far-red-induction_P Parameter: Timepoint (hr) Value: 24
  misc_feature: MA Experiment 20001451 PARAMETER Experiment Name: At_Far-red-induction_P Parameter: Tissue Value: Whole Plant
  misc_feature: MA Experiment ID: 20001557 Result: Down-regulated in Transcription
  misc_feature: MA Experiment 20001557 PARAMETER Experiment Name: At_Drought_Soil_Dry_P Parameter: Age (day) Value: 27
  misc_feature: MA Experiment 20001557 PARAMETER Experiment Name: At_Drought_Soil_Dry_P Parameter: Organism Value: A. thaliana
  misc_feature: MA Experiment 20001557 PARAMETER Experiment Name: At_Drought_Soil_Dry_P Parameter: Plant Line Value: WS
  misc_feature: MA Experiment 20001557 PARAMETER Experiment Name: At_Drought_Soil_Dry_P Parameter: Post Timepoint (hr) Value: 3
  misc_feature: MA Experiment 20001557 PARAMETER Experiment Name: At_Drought_Soil_Dry_P Parameter: Post-Treatment Value: Re-Water vs. No Drought
  misc_feature: MA Experiment 20001557 PARAMETER Experiment Name: At_Drought_Soil_Dry_P Parameter: Timepoint (day) Value: 13
  misc_feature: MA Experiment 20001557 PARAMETER Experiment Name: At_Drought_Soil_Dry_P Parameter: Treatment Value: Drought vs. No Drought
aaaaaacctctcactgcaaagtgccaacaaacaacaagtcttcaccttcttcttcttcttcttcttcaaaatctcttgtacgcaaataatccatgagaaactagggtttaacttgagatctctcttccgaagtattaccatcaatggcgacttcttcttcttcatcgtcgtctctgcttttaccaaacatcaatttcaactcaagacaatctccaacaatcactcgttccgtttcaatcgccgggatcttcttacccagaaaccgattaagctacaatcacaatctccggattcgtacgagattaatcagagcttctaaagacgataatgtcgctgttgaagatcgtgataatgcagtgaagatcaacggtgattacaacggaagtgcacgtttaaacggtaacggctctgcgagaaaatccgtcaacggagattttaacggaagtgctcgtttgaacggtaacggtagtttggtgaagtatgtgaacggaagtgtaacggtggaaacggaggaagtgacaaagaagagaaaagaagaagtgaggaagaagagagtagaagatattggtcaagaggatgcttggtttaagaacaacactcaacaaaaacaagttgaggtttctgttacacctggtggtcgatggaatagattcaagacttactcaactattcaaagaacattggagatttggggttttgttgtacagtttattttcaggacttggttaagcaataagaagttctcttataaagggggaatgactgaagagaagaaggttttaagaaggaaggttttggctaagtggttgaaagaaaacattttgagattaggtcctacatttatcaaaattgggcaacagttctctactagagtggatattcttcctcaagagtatgttgatcaattgtcagaacttcaggatcaagttcctcctttcccttctgctacagctttatccattgttgaagaggagcttggaggttctgttgaggacattttcgaccgttttgattatgaacctatagctgcagctagtcttgggcaagttcaccgtgcaagacttaagggtcaagaggttgtccttaaagtacagagacctggtctgaaggatctctttgatattgaccttaagaatttgagggtgatcgctgagtatctccaaaaggtggacccaaaatcagatggtgcaaagagagattgggttgcaatctatgatgaatgtgccagtgttttgtaccaggaaattgattacacaaaagaagcagctaattcggagttgtttgctaataacttcaaagacttagagtatgtaaaagttccatccatctactgggaatacactacacctcaggtcctgacaatggagtatgtccctgggattaagattaacaagatacaagccttagatcagttaggtgttgatcgaaaaaggctaggaagatatgctgttgaatcttacctggagcaaatcttatctcatggattcttccacgccgaccctcaccctgggaatatagcagttgatgatgtcaatggcgggcggctgatattttacgactttggaatgatgggaagtattagcccaaatattagagaaggtttgttggaggcattttatggcgtctatgaaaaggatccagataaggtccttcaagctatggttcaaatgggagtgcttgtaccaactggagatttgacggcagttagaagaacagcattgttttttctcaacagttttgaagagcggcttgctgcacaaagaaaggagaaagaagaaatagcagcagcagaagagcttgggttcaagaagccactaagcaaggaagaaaagcaagagaaaaagaagcaaaggttggctgcaatcggagaagacttattagccattgcggctgatcagcctttccggttccccgccacattcacatttgttgttagagccttttcagtattggatggcatcggcaaaggtcttgacccccgatttgatataacggagattgctaaaccctatgctttggaattgttgcggtttcgggaagctggagtggaagttgtagtaaaggacctgagaaagagatgggacaggcaatcacaagcattctacaatctatttagacaagcggatagagttgaaaagctagctgtagtcattgaacgacttgagcaaggtgatttgaagcttagggtccgagcgctagagtctgagagggcatttcaacgcgttgcagctgttcaaaaaacagtaggaagtgctgttgctgcaggaagtttagtcaatctcgcaacaattttgtatctgaattctataaaaacacctgcaactatagcatatacagtatgtgctttcttcagcctccaagttctaatcggaatcataaaggttaagaagttcgatcaacgggaaaaactaatcactggaacagcttaagaacttgcttgaagaaatgtattaaagcttcttcaatctccataaacccttttgtgcatttcacaggagtgttaacaatttcactggtctgcaaataaaattatcttatggaagcttgagaggcaagagatggtcaactagtcaaaccaccaccactctctcatctctgtcttcttaaagttcgataataatttttggagaggagactctggttgttcatcaacagagtggtcatgagccacatgtattgcttgtgtatagagagatttagaaattaggaactttttcgtataaatatactcattgtactcagctactcactagactcatctctgttttagtaatattttgaatactgtatctcaaataaattaatcttat

SEQ ID NO: 44849 - protein, 761 aa, Arabidopsis thaliana
  peptide (1)..(761): Ceres Seq. ID no. 12650353
  misc_feature (276)..(396): Pfam Name: ABC1 family Pfam Description: ABC1 family
  misc_feature (276)..(396): Pfam Name: ABC1 family Pfam Description: ABC1 family
  misc_feature (276)..(396): Pfam Name: ABC1 family Pfam Description: ABC1 family
  misc_feature (103)..(549): Homolog of NCBI NO: 6648182 NR Description: unknown protein [Arabidopsis thaliana]
  misc_feature (567)..(757): Homolog of NCBI NO: 19424003 NR Description: unknown protein [Arabidopsis thaliana]
  misc_feature (171)..(549): Homolog of NCBI NO: 19424003 NR Description: unknown protein [Arabidopsis thaliana]
  misc_feature (567)..(757): Homolog of NCBI NO: 15983801 NR Description: At3g07700/F17A17.4 [Arabidopsis thaliana]
  misc_feature (103)..(549): Homolog of NCBI NO: 15983801 NR Description: At3g07700/F17A17.4 [Arabidopsis thaliana]
  misc_feature (103)..(549): Homolog of NCBI NO: 6648182 NR Description: unknown protein [Arabidopsis thaliana]
  misc_feature (171)..(549): Homolog of NCBI NO: 19424003 NR Description: unknown protein [Arabidopsis thaliana]
  misc_feature (103)..(549): Homolog of NCBI NO: 15983801 NR Description: At3g07700/F17A17.4 [Arabidopsis thaliana]
  misc_feature (567)..(757): Homolog of NCBI NO: 15983801 NR Description: At3g07700/F17A17.4 [Arabidopsis thaliana]
  misc_feature (171)..(549): Homolog of NCBI NO: 19424003 NR Description: unknown protein [Arabidopsis thaliana]
  misc_feature (567)..(757): Homolog of NCBI NO: 19424003 NR Description: unknown protein [Arabidopsis thaliana]
  misc_feature (103)..(549): Homolog of NCBI NO: 6648182 NR Description: unknown protein [Arabidopsis thaliana]
  misc_feature (1)..(563): Homolog of NCBI NO: 13605698 NR Description: AT5g64940/MXK3_17 [Arabidopsis thaliana]
  misc_feature (103)..(549): Homolog of NCBI NO: 18398032 NR Description: expressed protein
  misc_feature (103)..(549): Homolog of NCBI NO: 21618050 NR Description: unknown [Arabidopsis thaliana]
  misc_feature (567)..(757): Homolog of NCBI NO: 18398032 NR Description: expressed protein
  misc_feature (567)..(757): Homolog of NCBI NO: 21618050 NR Description: unknown [Arabidopsis thaliana]
  misc_feature (1)..(563): Homolog of NCBI NO: 13605698 NR Description: AT5g64940/MXK3_17 [Arabidopsis thaliana]
  misc_feature (103)..(549): Homolog of NCBI NO: 18398032 NR Description: expressed protein
  misc_feature (103)..(549): Homolog of NCBI NO: 21618050 NR Description: unknown [Arabidopsis thaliana]
  misc_feature (567)..(757): Homolog of NCBI NO: 18398032 NR Description: expressed protein
  misc_feature (567)..(757): Homolog of NCBI NO: 21618050 NR Description: unknown [Arabidopsis thaliana]
  misc_feature (103)..(549): Homolog of NCBI NO: 15983801 NR Description: At3g07700/F17A17.4 [Arabidopsis thaliana]
  misc_feature (567)..(757): Homolog of NCBI NO: 15983801 NR Description: At3g07700/F17A17.4 [Arabidopsis thaliana]
  misc_feature (567)..(757): Homolog of NCBI NO: 19424003 NR Description: unknown protein [Arabidopsis thaliana]
  misc_feature (567)..(757): Homolog of NCBI NO: 21618050 NR Description: unknown [Arabidopsis thaliana]
  misc_feature (567)..(757): Homolog of NCBI NO: 18398032 NR Description: expressed protein
  misc_feature (103)..(549): Homolog of NCBI NO: 21618050 NR Description: unknown [Arabidopsis thaliana]
  misc_feature (103)..(549): Homolog of NCBI NO: 18398032 NR Description: expressed protein
  misc_feature (1)..(563): Homolog of NCBI NO: 13605698 NR Description: AT5g64940/MXK3_17 [Arabidopsis thaliana]
MATSSSSSSSLLLPNINFNSRQSPTITRSVSIAGIFLPRNRLSYNHNLRIRTRLIRASKDDNVAVEDRDNAVKINGDYNGSARLNGNGSARKSVNGDFNGSARLNGNGSLVKYVNGSVTVETEEVTKKRKEEVRKKRVEDIGQEDAWFKNNTQQKQVEVSVTPGGRWNRFKTYSTIQRTLEIWGFVVQFIFRTWLSNKKFSYKGGMTEEKKVLRRKVLAKWLKENILRLGPTFIKIGQQFSTRVDILPQEYVDQLSELQDQVPPFPSATALSIVEEELGGSVEDIFDRFDYEPIAAASLGQVHRARLKGQEVVLKVQRPGLKDLFDIDLKNLRVIAEYLQKVDPKSDGAKRDWVAIYDECASVLYQEIDYTKEAANSELFANNFKDLEYVKVPSIYWEYTTPQVLTMEYVPGIKINKIQALDQLGVDRKRLGRYAVESYLEQILSHGFFHADPHPGNIAVDDVNGGRLIFYDFGMMGSISPNIREGLLEAFYGVYEKDPDKVLQAMVQMGVLVPTGDLTAVRRTALFFLNSFEERLAAQRKEKEEIAAAEELGFKKPLSKEEKQEKKKQRLAAIGEDLLAIAADQPFRFPATFTFVVRAFSVLDGIGKGLDPRFDITEIAKPYALELLRFREAGVEVVVKDLRKRWDRQSQAFYNLFRQADRVEKLAVVIERLEQGDLKLRVRALESERAFQRVAAVQKTVGSAVAAGSLVNLATILYLNSIKTPATIAYTVCAFFSLQVLIGIIKVKKFDQREKLITGTA

SEQ ID NO: 44850 - protein, 556 aa, Arabidopsis thaliana
  peptide (1)..(556): Ceres Seq. ID no. 12650354
  misc_feature (71)..(191): Pfam Name: ABC1 family Pfam Description: ABC1 family
  misc_feature (71)..(191): Pfam Name: ABC1 family Pfam Description: ABC1 family
  misc_feature (71)..(191): Pfam Name: ABC1 family Pfam Description: ABC1 family
  misc_feature (1)..(344): Homolog of NCBI NO: 6648182 NR Description: unknown protein [Arabidopsis thaliana]
  misc_feature (362)..(552): Homolog of NCBI NO: 19424003 NR Description: unknown protein [Arabidopsis thaliana]
  misc_feature (1)..(344): Homolog of NCBI NO: 19424003 NR Description: unknown protein [Arabidopsis thaliana]
  misc_feature (362)..(552): Homolog of NCBI NO: 15983801 NR Description: At3g07700/F17A17.4 [Arabidopsis thaliana]
  misc_feature (1)..(344): Homolog of NCBI NO: 15983801 NR Description: At3g07700/F17A17.4 [Arabidopsis thaliana]
  misc_feature (1)..(344): Homolog of NCBI NO: 6648182 NR Description: unknown protein [Arabidopsis thaliana]
  misc_feature (1)..(344): Homolog of NCBI NO: 19424003 NR Description: unknown protein [Arabidopsis thaliana]
  misc_feature (1)..(344): Homolog of NCBI NO: 15983801 NR Description: At3g07700/F17A17.4 [Arabidopsis thaliana]
  misc_feature (362)..(552): Homolog of NCBI NO: 15983801 NR Description: At3g07700/F17A17.4 [Arabidopsis thaliana]
  misc_feature (1)..(344): Homolog of NCBI NO: 19424003 NR Description: unknown protein [Arabidopsis thaliana]
  misc_feature (362)..(552): Homolog of NCBI NO: 19424003 NR Description: unknown protein [Arabidopsis thaliana]
  misc_feature (1)..(344): Homolog of NCBI NO: 6648182 NR Description: unknown protein [Arabidopsis thaliana]
  misc_feature (1)..(358): Homolog of NCBI NO: 13605698 NR Description: AT5g64940/MXK3_17 [Arabidopsis thaliana]
  misc_feature (1)..(344): Homolog of NCBI NO: 18398032 NR Description: expressed protein
  misc_feature (1)..(344): Homolog of NCBI NO: 21618050 NR Description: unknown [Arabidopsis thaliana]
  misc_feature (362)..(552): Homolog of NCBI NO: 18398032 NR Description: expressed protein
  misc_feature (362)..(552): Homolog of NCBI NO: 21618050 NR Description: unknown [Arabidopsis thaliana]
  misc_feature (1)..(358): Homolog of NCBI NO: 13605698 NR Description: AT5g64940/MXK3_17 [Arabidopsis thaliana]
  misc_feature (1)..(344): Homolog of NCBI NO: 18398032 NR Description: expressed protein
  misc_feature (1)..(344): Homolog of NCBI NO: 21618050 NR Description: unknown [Arabidopsis thaliana]
  misc_feature (362)..(552): Homolog of NCBI NO: 18398032 NR Description: expressed protein
  misc_feature (362)..(552): Homolog of NCBI NO: 21618050 NR Description: unknown [Arabidopsis thaliana]
  misc_feature (1)..(344): Homolog of NCBI NO: 15983801 NR Description: At3g07700/F17A17.4 [Arabidopsis thaliana]
  misc_feature (362)..(552): Homolog of NCBI NO: 15983801 NR Description: At3g07700/F17A17.4 [Arabidopsis thaliana]
  misc_feature (362)..(552): Homolog of NCBI NO: 19424003 NR Description: unknown protein [Arabidopsis thaliana]
  misc_feature (362)..(552): Homolog of NCBI NO: 21618050 NR Description: unknown [Arabidopsis thaliana]
  misc_feature (362)..(552): Homolog of NCBI NO: 18398032 NR Description: expressed protein
  misc_feature (1)..(344): Homolog of NCBI NO: 21618050 NR Description: unknown [Arabidopsis thaliana]
  misc_feature (1)..(344): Homolog of NCBI NO: 18398032 NR Description: expressed protein
  misc_feature (1)..(358): Homolog of NCBI NO: 13605698 NR Description: AT5g64940/MXK3_17 [Arabidopsis thaliana]
MTEEKKVLRRKVLAKWLKENILRLGPTFIKIGQQFSTRVDILPQEYVDQLSELQDQVPPFPSATALSIVEEELGGSVEDIFDRFDYEPIAAASLGQVHRARLKGQEVVLKVQRPGLKDLFDIDLKNLRVIAEYLQKVDPKSDGAKRDWVAIYDECASVLYQEIDYTKEAANSELFANNFKDLEYVKVPSIYWEYTTPQVLTMEYVPGIKINKIQALDQLGVDRKRLGRYAVESYLEQILSHGFFHADPHPGNIAVDDVNGGRLIFYDFGMMGSISPNIREGLLEAFYGVYEKDPDKVLQAMVQMGVLVPTGDLTAVRRTALFFLNSFEERLAAQRKEKEEIAAAEELGFKKPLSKEEKQEKKKQRLAAIGEDLLAIAADQPFRFPATFTFVVRAFSVLDGIGKGLDPRFDITEIAKPYALELLRFREAGVEVVVKDLRKRWDRQSQAFYNLFRQADRVEKLAVVIERLEQGDLKLRVRALESERAFQRVAAVQKTVGSAVAAGSLVNLATILYLNSIKTPATIAYTVCAFFSLQVLIGIIKVKKFDQREKLITGTA

SEQ ID NO: 44851 - DNA, 1901 bp, Arabidopsis thaliana
  misc_feature (1)..(1901): Ceres Seq. ID no. 12603788
  misc_feature: MA Experiment ID: 20000182 Result: Up-regulated in Transcription
  misc_feature: MA Experiment 20000182 PARAMETER Experiment Name: At_2mM_SA_P Parameter: Age (day) Value: 14
  misc_feature: MA Experiment 20000182 PARAMETER Experiment Name: At_2mM_SA_P Parameter: Organism Value: A. thaliana
  misc_feature: MA Experiment 20000182 PARAMETER Experiment Name: At_2mM_SA_P Parameter: Plant Line Value: WS
  misc_feature: MA Experiment 20000182 PARAMETER Experiment Name: At_2mM_SA_P Parameter: Timepoint (hr) Value: 6
  misc_feature: MA Experiment 20000182 PARAMETER Experiment Name: At_2mM_SA_P Parameter: Tissue Value: Aerial
  misc_feature: MA Experiment 20000182 PARAMETER Experiment Name: At_2mM_SA_P Parameter: Treatment Value: 2mM SA vs. No Treatment
  misc_feature: MA Experiment ID: 20000443 Result: Up-regulated in Transcription
  misc_feature: MA Experiment 20000443 PARAMETER Experiment Name: At_1uM_BR-BRZ__P Parameter: Tissue Value: Shoot Apices
  misc_feature: MA Experiment 20000443 PARAMETER Experiment Name: At_1uM_BR-BRZ__P Parameter: Treatment Value: 1uM BRZ vs. No Treatment
  misc_feature: MA Experiment ID: 20000794 Result: Up-regulated in Transcription
  misc_feature: MA Experiment 20000794 PARAMETER Experiment Name: At_Petals_P Parameter: Age (day) Value: 23-25 days
  misc_feature: MA Experiment 20000794 PARAMETER Experiment Name: At_Petals_P Parameter: Plant Line Value: WS
  misc_feature: MA Experiment 20000794 PARAMETER Experiment Name: At_Petals_P Parameter: Tissue Value: Petals vs. Whole plant
  misc_feature: MA Experiment ID: 20001450 Result: Up-regulated in Transcription
  misc_feature: MA Experiment 20001450 PARAMETER Experiment Name: At_Far-red-induction_P Parameter: Age (day) Value: 7
  misc_feature: MA Experiment 20001450 PARAMETER Experiment Name: At_Far-red-induction_P Parameter: Light Value: Far-red vs. White
  misc_feature: MA Experiment 20001450 PARAMETER Experiment Name: At_Far-red-induction_P Parameter: Organism Value: A. thaliana
  misc_feature: MA Experiment 20001450 PARAMETER Experiment Name: At_Far-red-induction_P Parameter: Plant Line Value: Columbia
  misc_feature: MA Experiment 20001450 PARAMETER Experiment Name: At_Far-red-induction_P Parameter: Timepoint (hr) Value: 8
  misc_feature: MA Experiment 20001450 PARAMETER Experiment Name: At_Far-red-induction_P Parameter: Tissue Value: Whole Plant
  misc_feature: MA Experiment ID: 20001906 Result: Up-regulated in Transcription
  misc_feature: MA Experiment 20001906 PARAMETER Experiment Name: At_Drought_Reproduction_P Parameter: Age (day) Value: 35
  misc_feature: MA Experiment 20001906 PARAMETER Experiment Name: At_Drought_Reproduction_P Parameter: Organism Value: A. thaliana
  misc_feature: MA Experiment 20001906 PARAMETER Experiment Name: At_Drought_Reproduction_P Parameter: Plant Line Value: WS
  misc_feature: MA Experiment 20001906 PARAMETER Experiment Name: At_Drought_Reproduction_P Parameter: Timepoint (day) Value: 5
  misc_feature: MA Experiment 20001906 PARAMETER Experiment Name: At_Drought_Reproduction_P Parameter: Tissue Value: Siliques
  misc_feature: MA Experiment 20001906 PARAMETER Experiment Name: At_Drought_Reproduction_P Parameter: Treatment Value: Drought vs. No Drought
  misc_feature: MA Experiment ID: 20001911 Result: Up-regulated in Transcription
  misc_feature: MA Experiment 20001911 PARAMETER Experiment Name: At_Drought_Reproduction_P Parameter: Age (day) Value: 40
  misc_feature: MA Experiment 20001911 PARAMETER Experiment Name: At_Drought_Reproduction_P Parameter: Organism Value: A. thaliana
  misc_feature: MA Experiment 20001911 PARAMETER Experiment Name: At_Drought_Reproduction_P Parameter: Plant Line Value: WS
  misc_feature: MA Experiment 20001911 PARAMETER Experiment Name: At_Drought_Reproduction_P Parameter: Timepoint (day) Value: 10
  misc_feature: MA Experiment 20001911 PARAMETER Experiment Name: At_Drought_Reproduction_P Parameter: Tissue Value: Flowers
  misc_feature: MA Experiment 20001911 PARAMETER Experiment Name: At_Drought_Reproduction_P Parameter: Treatment Value: Drought vs. No Drought
aaagattgagagaaccctctcactcccaaaaaaaaagctttagacattttctctaaatccatattctctgcatctttcaagaaattccgaatcgtgggtttggttcttctcgttacgagtctctcaaagtttaaatctttctttacaaaaaaggttacttttggttctgagtaaatcaaaatcaagcttttggccttcaatggtggctatgtttcaagaagataatggaacatcttctgtagcttcatcaccacttcaagtcttctcaactatgtcactcaacagaccgactctcctcgcttcttcatctccgtttcattgtctcaaagatctcaaaccagaggagcgtggtctctacttaatccacctcttgctaacttgtgccaaccacgtggcttcaggtagcctccaaaacgctaacgcagcgctcgagcagctctctcacctcgcttctcctgacggcgacacgatgcagcgaatcgctgcttacttcaccgaagcgcttgctaacagaatccttaagtcctggcctggtctttacaaggctcttaacgcaactcagacaagaactaacaatgtctctgaggagattcatgttagaagactcttctttgagatgttcccgatactcaaagtctcttacttgctcactaatcgagctatactcgaggctatggaaggagagaagatggttcatgtgattgatctcgatgcttctgagccagctcaatggcttgctttgcttcaagcttttaactctaggcctgaaggtccacctcatttgagaatcactggtgttcatcaccagaaggaagtgcttgaacaaatggctcatagactcattgaggaagcagagaaactcgatatcccgtttcagtttaatcccgttgtgagtaggttagactgtttaaatgtagaacagttgcgggttaaaacaggagaggccttagccgttagctcggttcttcaattgcataccttcttggcctctgatgatgatctcatgagaaagaactgcgctttacggtttcagaacaaccctagtggagttgacttgcagagagttctaatgatgagccatggctctgcagctgaggcacgtgagaatgatatgagtaacaacaatgggtatagccctagcggtgactcggcctcatctttgcctttaccaagttcaggaaggactgatagcttcctcaatgctatttggggtttgtctccaaaggtcatggtggtcactgagcaagactcagaccacaacggctccacactaatggagaggctattagaatcactttacacctacgcagcattgtttgattgcttggaaacaaaagttccaagaacgtctcaagataggatcaaagtggagaagatgctcttcggggaggagatcaagaacatcatatcctgcgagggatttgagagaagagaaagacacgagaagcttgagaaatggagccagaggatcgatttggctggttttgggaatgttcctcttagctattatgcgatgttgcaggctaggagattgcttcaagggtgcggttttgatgggtatagaatcaaggaagagagcgggtgcgcagtaatttgctggcaagatcgacctctatactcggtatcagcttggagatgcaggaagtgaatgatatattacagtttgtcttctattttggttatgagcagagtccctttcttttttgtatacatggggacacaatcttagttgttttgtgatggtgactttctgtctctttatgctattttggcttaaatgcttctactgcctctgcatgtaaagcctttgtgtgttggttcaatttggtctggtgtgggtgtaataccaaaccaaatccaatttgagctgaagataactaatttgatgatcggctcgtgcc

SEQ ID NO: 44852 - protein, 482 aa, Arabidopsis thaliana
  peptide (1)..(482): Ceres Seq. ID no. 12603789
  misc_feature (28)..(388): Pfam Name: GRAS family transcription factor Pfam Description: GRAS family transcription factor
  misc_feature (323)..(482): Homolog of NCBI NO: 3021336 NR Description: RGA-like [Arabidopsis thaliana]
  misc_feature (45)..(263): Homolog of NCBI NO: 3021336 NR Description: RGA-like [Arabidopsis thaliana]
  misc_feature (323)..(482): Homolog of NCBI NO: 15219630 NR Description: gibberellin regulatory protein, putative
  misc_feature (45)..(263): Homolog of NCBI NO: 15219630 NR Description: gibberellin regulatory protein, putative
  misc_feature (330)..(479): Homolog of NCBI NO: 15224425 NR Description: putative SCARECROW gene regulator
  misc_feature (57)..(259): Homolog of NCBI NO: 15224425 NR Description: putative SCARECROW gene regulator
  misc_feature (300)..(482): Homolog of NCBI NO: 22830925 NR Description: putative gibberellin response modulator
  misc_feature (4)..(267): Homolog of NCBI NO: 22830925 NR Description: putative gibberellin response modulator
  misc_feature (158)..(482): Homolog of NCBI NO: 11358826 NR Description: scarecrow-like protein 3
  misc_feature (1)..(482): Homolog of NCBI NO: 15222965 NR Description: scarecrow-like 3
MVAMFQEDNGTSSVASSPLQVFSTMSLNRPTLLASSSPFHCLKDLKPEERGLYLIHLLLTCANHVASGSLQNANAALEQLSHLASPDGDTMQRIAAYFTEALANRILKSWPGLYKALNATQTRTNNVSEEIHVRRLFFEMFPILKVSYLLTNRAILEAMEGEKMVHVIDLDASEPAQWLALLQAFNSRPEGPPHLRITGVHHQKEVLEQMAHRLIEEAEKLDIPFQFNPVVSRLDCLNVEQLRVKTGEALAVSSVLQLHTFLASDDDLMRKNCALRFQNNPSGVDLQRVLMMSHGSAAEARENDMSNNNGYSPSGDSASSLPLPSSGRTDSFLNAIWGLSPKVMVVTEQDSDHNGSTLMERLLESLYTYAALFDCLETKVPRTSQDRIKVEKMLFGEEIKNIISCEGFERRERHEKLEKWSQRIDLAGFGNVPLSYYAMLQARRLLQGCGFDGYRIKEESGCAVICWQDRPLYSVSAWRCRK

SEQ ID NO: 44853 - protein, 479 aa, Arabidopsis thaliana
  peptide (1)..(479): Ceres Seq. ID no. 12603790
  misc_feature (25)..(385): Pfam Name: GRAS family transcription factor Pfam Description: GRAS family transcription factor
  misc_feature (320)..(479): Homolog of NCBI NO: 3021336 NR Description: RGA-like [Arabidopsis thaliana]
  misc_feature (42)..(260): Homolog of NCBI NO: 3021336 NR Description: RGA-like [Arabidopsis thaliana]
  misc_feature (320)..(479): Homolog of NCBI NO: 15219630 NR Description: gibberellin regulatory protein, putative
  misc_feature (42)..(260): Homolog of NCBI NO: 15219630 NR Description: gibberellin regulatory protein, putative
  misc_feature (327)..(476): Homolog of NCBI NO: 15224425 NR Description: putative SCARECROW gene regulator
  misc_feature (54)..(256): Homolog of NCBI NO: 15224425 NR Description: putative SCARECROW gene regulator
  misc_feature (297)..(479): Homolog of NCBI NO: 22830925 NR Description: putative gibberellin response modulator
  misc_feature (1)..(264): Homolog of NCBI NO: 22830925 NR Description: putative gibberellin response modulator
  misc_feature (155)..(479): Homolog of NCBI NO: 11358826 NR Description: scarecrow-like protein 3
  misc_feature (1)..(479): Homolog of NCBI NO: 15222965 NR Description: scarecrow-like 3
MFQEDNGTSSVASSPLQVFSTMSLNRPTLLASSSPFHCLKDLKPEERGLYLIHLLLTCANHVASGSLQNANAALEQLSHLASPDGDTMQRIAAYFTEALANRILKSWPGLYKALNATQTRTNNVSEEIHVRRLFFEMFPILKVSYLLTNRAILEAMEGEKMVHVIDLDASEPAQWLALLQAFNSRPEGPPHLRITGVHHQKEVLEQMAHRLIEEAEKLDIPFQFNPVVSRLDCLNVEQLRVKTGEALAVSSVLQLHTFLASDDDLMRKNCALRFQNNPSGVDLQRVLMMSHGSAAEARENDMSNNNGYSPSGDSASSLPLPSSGRTDSFLNAIWGLSPKVMVVTEQDSDHNGSTLMERLLESLYTYAALFDCLETKVPRTSQDRIKVEKMLFGEEIKNIISCEGFERRERHEKLEKWSQRIDLAGFGNVPLSYYAMLQARRLLQGCGFDGYRIKEESGCAVICWQDRPLYSVSAWRCRK

SEQ ID NO: 44854 - protein, 458 aa, Arabidopsis thaliana
  peptide (1)..(458): Ceres Seq. ID no. 12603791
  misc_feature (4)..(364): Pfam Name: GRAS family transcription factor Pfam Description: GRAS family transcription factor
  misc_feature (299)..(458): Homolog of NCBI NO: 3021336 NR Description: RGA-like [Arabidopsis thaliana]
  misc_feature (21)..(239): Homolog of NCBI NO: 3021336 NR Description: RGA-like [Arabidopsis thaliana]
  misc_feature (299)..(458): Homolog of NCBI NO: 15219630 NR Description: gibberellin regulatory protein, putative
  misc_feature (21)..(239): Homolog of NCBI NO: 15219630 NR Description: gibberellin regulatory protein, putative
  misc_feature (306)..(455): Homolog of NCBI NO: 15224425 NR Description: putative SCARECROW gene regulator
  misc_feature (33)..(235): Homolog of NCBI NO: 15224425 NR Description: putative SCARECROW gene regulator
  misc_feature (276)..(458): Homolog of NCBI NO: 22830925 NR Description: putative gibberellin response modulator
  misc_feature (1)..(243): Homolog of NCBI NO: 22830925 NR Description: putative gibberellin response modulator
  misc_feature (134)..(458): Homolog of NCBI NO: 11358826 NR Description: scarecrow-like protein 3
  misc_feature (1)..(458): Homolog of NCBI NO: 15222965 NR Description: scarecrow-like 3
MSLNRPTLLASSSPFHCLKDLKPEERGLYLIHLLLTCANHVASGSLQNANAALEQLSHLASPDGDTMQRIAAYFTEALANRILKSWPGLYKALNATQTRTNNVSEEIHVRRLFFEMFPILKVSYLLTNRAILEAMEGEKMVHVIDLDASEPAQWLALLQAFNSRPEGPPHLRITGVHHQKEVLEQMAHRLIEEAEKLDIPFQFNPVVSRLDCLNVEQLRVKTGEALAVSSVLQLHTFLASDDDLMRKNCALRFQNNPSGVDLQRVLMMSHGSAAEARENDMSNNNGYSPSGDSASSLPLPSSGRTDSFLNAIWGLSPKVMVVTEQDSDHNGSTLMERLLESLYTYAALFDCLETKVPRTSQDRIKVEKMLFGEEIKNIISCEGFERRERHEKLEKWSQRIDLAGFGNVPLSYYAMLQARRLLQGCGFDGYRIKEESGCAVICWQDRPLYSVSAWRCRK

SEQ ID NO: 44855 - DNA, 1910 bp, Arabidopsis thaliana; identical to SEQ ID NO: 30306
  misc_feature (1)..(1910): Ceres Seq. ID no. 13509014
  misc_feature: MA Experiment ID: 108461 Result: Down-regulated in Transcription
  misc_feature: MA Experiment 108461 PARAMETER Experiment Name: At_Germinating_Seeds_cDNA_P Parameter: Age (day) Value: 1 vs. 0
  misc_feature: MA Experiment 108461 PARAMETER Experiment Name: At_Germinating_Seeds_cDNA_P Parameter: Tissue Value: Germinating Seeds
  misc_feature: MA Experiment ID: 108462 Result: Down-regulated in Transcription
  misc_feature: MA Experiment 108462 PARAMETER Experiment Name: At_Germinating_Seeds_cDNA_P Parameter: Age (day) Value: 2 vs. 0
  misc_feature: MA Experiment 108462 PARAMETER Experiment Name: At_Germinating_Seeds_cDNA_P Parameter: Tissue Value: Germinating Seeds
  misc_feature: MA Experiment ID: 108464 Result: Down-regulated in Transcription
  misc_feature: MA Experiment 108464 PARAMETER Experiment Name: At_Germinating_Seeds_cDNA_P Parameter: Age (day) Value: 4 vs. 0
  misc_feature: MA Experiment 108464 PARAMETER Experiment Name: At_Germinating_Seeds_cDNA_P Parameter: Tissue Value: Germinating Seeds
  misc_feature: MA Experiment ID: 20000089 Result: Down-regulated in Transcription
  misc_feature: MA Experiment ID: 20000171 Result: Down-regulated in Transcription
  misc_feature: MA Experiment 20000171 PARAMETER Experiment Name: At_42deg_Heat_P Parameter: Age (day) Value: 14
  misc_feature: MA Experiment 20000171 PARAMETER Experiment Name: At_42deg_Heat_P Parameter: Organism Value: A. thaliana
  misc_feature: MA Experiment 20000171 PARAMETER Experiment Name: At_42deg_Heat_P Parameter: Plant Line Value: WS
  misc_feature: MA Experiment 20000171 PARAMETER Experiment Name: At_42deg_Heat_P Parameter: Temperature (deg C) Value: 42 vs. 22
  misc_feature: MA Experiment 20000171 PARAMETER Experiment Name: At_42deg_Heat_P Parameter: Timepoint (hr) Value: 1
  misc_feature: MA Experiment 20000171 PARAMETER Experiment Name: At_42deg_Heat_P Parameter: Tissue Value: Aerial
  misc_feature: MA Experiment ID: 20000179 Result: Up-regulated in Transcription
  misc_feature: MA Experiment 20000179 PARAMETER Experiment Name: At_Germinating_Seeds_P Parameter: Age (hr) Value: 6 vs. 0
  misc_feature: MA Experiment 20000179 PARAMETER Experiment Name: At_Germinating_Seeds_P Parameter: Tissue Value: Germinating Seeds
  misc_feature: MA Experiment ID: 20000185 Result: Down-regulated in Transcription
  misc_feature: MA Experiment 20000185 PARAMETER Experiment Name: At_Roots__P Parameter: Age (day) Value: 7 vs. 21
  misc_feature: MA Experiment 20000185 PARAMETER Experiment Name: At_Roots__P Parameter: Organism Value: A. thaliana
  misc_feature: MA Experiment 20000185 PARAMETER Experiment Name: At_Roots__P Parameter: Tissue Value: Roots vs. Whole Plant
  misc_feature: MA Experiment ID: 20000227 Result: Down-regulated in Transcription
  misc_feature: MA Experiment 20000227 PARAMETER Experiment Name: At_Root-Tips-vs-Tops_P Parameter: Tissue Value: Root Tips vs. Root Tops
  misc_feature: MA Experiment ID: 20000437 Result: Down-regulated in Transcription
  misc_feature: MA Experiment 20000437 PARAMETER Experiment Name: At_Drought_P Parameter: Age (day) Value: 8
  misc_feature: MA Experiment 20000437 PARAMETER Experiment Name: At_Drought_P Parameter: Organism Value: A. thaliana
  misc_feature: MA Experiment 20000437 PARAMETER Experiment Name: At_Drought_P Parameter: Plant Line Value: WS
  misc_feature: MA Experiment 20000437 PARAMETER Experiment Name: At_Drought_P Parameter: Timepoint (hr) Value: 24
  misc_feature: MA Experiment 20000437 PARAMETER Experiment Name: At_Drought_P Parameter: Tissue Value: Whole Plant
  misc_feature: MA Experiment 20000437 PARAMETER Experiment Name: At_Drought_P Parameter: Treatment Value: Drought vs. No Drought
  misc_feature: MA Experiment ID: 20000439 Result: Down-regulated in Transcription
  misc_feature: MA Experiment 20000439 PARAMETER Experiment Name: At_Roots__P Parameter: Age (day) Value: 14 vs. 21
  misc_feature: MA Experiment 20000439 PARAMETER Experiment Name: At_Roots__P Parameter: Organism Value: A. thaliana
  misc_feature: MA Experiment 20000439 PARAMETER Experiment Name: At_Roots__P Parameter: Tissue Value: Roots vs. Whole Plant
  misc_feature: MA Experiment ID: 20000495 Result: Down-regulated in Transcription
  misc_feature: MA Experiment 20000495 PARAMETER Experiment Name: At_Guard_Cells_P Parameter: Harvest Date Value: 8/2/2002
  misc_feature: MA Experiment 20000495 PARAMETER Experiment Name: At_Guard_Cells_P Parameter: Organism Value: A. thaliana
  misc_feature: MA Experiment 20000495 PARAMETER Experiment Name: At_Guard_Cells_P Parameter: Tissue Value: Guard Cells vs. Leaves
  misc_feature: MA Experiment ID: 20000573 Result: Down-regulated in Transcription
  misc_feature: MA Experiment 20000573 PARAMETER Experiment Name: At_100uM_ABA_Mutants__P Parameter: Organism Value: A. thaliana
  misc_feature: MA Experiment 20000573 PARAMETER Experiment Name: At_100uM_ABA_Mutants__P Parameter: Plant Line Value: CS22 vs. Ler wt
  misc_feature: MA Experiment 20000573 PARAMETER Experiment Name: At_100uM_ABA_Mutants__P Parameter: Timepoint (hr) Value: N/A
  misc_feature: MA Experiment 20000573 PARAMETER Experiment Name: At_100uM_ABA_Mutants__P Parameter: Tissue Value: Whole Plant
  misc_feature: MA Experiment 20000573 PARAMETER Experiment Name: At_100uM_ABA_Mutants__P Parameter: Treatment Value: None
  misc_feature: MA Experiment ID: 20000574 Result: Down-regulated in Transcription
  misc_feature: MA Experiment 20000574 PARAMETER Experiment Name: At_100uM_ABA_Mutants__P Parameter: Organism Value: A. thaliana
  misc_feature: MA Experiment 20000574 PARAMETER Experiment Name: At_100uM_ABA_Mutants__P Parameter: Plant Line Value: CS23 vs. Ler wt
  misc_feature: MA Experiment 20000574 PARAMETER Experiment Name: At_100uM_ABA_Mutants__P Parameter: Timepoint (hr) Value: N/A
  misc_feature: MA Experiment 20000574 PARAMETER Experiment Name: At_100uM_ABA_Mutants__P Parameter: Tissue Value: Whole Plant
  misc_feature: MA Experiment 20000574 PARAMETER Experiment Name: At_100uM_ABA_Mutants__P Parameter: Treatment Value: None
  misc_feature: MA Experiment ID: 20001248 Result: Down-regulated in Transcription
  misc_feature: MA Experiment 20001248 PARAMETER Experiment Name: At_Far-red-induction_P Parameter: Age (day) Value: 7
  misc_feature: MA Experiment 20001248 PARAMETER Experiment Name: At_Far-red-induction_P Parameter: Light Value: Far-red vs. White
  misc_feature: MA Experiment 20001248 PARAMETER Experiment Name: At_Far-red-induction_P Parameter: Organism Value: A. thaliana
  misc_feature: MA Experiment 20001248 PARAMETER Experiment Name: At_Far-red-induction_P Parameter: Plant Line Value: Columbia
  misc_feature: MA Experiment 20001248 PARAMETER Experiment Name: At_Far-red-induction_P Parameter: Timepoint (hr) Value: 4
  misc_feature: MA Experiment 20001248 PARAMETER Experiment Name: At_Far-red-induction_P Parameter: Tissue Value: Whole Plant
  misc_feature: MA Experiment ID: 20001560 Result: Down-regulated in Transcription
  misc_feature: MA Experiment 20001560 PARAMETER Experiment Name: At_Drought_Soil_Dry_P Parameter: Age (day) Value: 28
  misc_feature: MA Experiment 20001560 PARAMETER Experiment Name: At_Drought_Soil_Dry_P Parameter: Organism Value: A. thaliana
  misc_feature: MA Experiment 20001560 PARAMETER Experiment Name: At_Drought_Soil_Dry_P Parameter: Plant Line Value: WS
  misc_feature: MA Experiment 20001560 PARAMETER Experiment Name: At_Drought_Soil_Dry_P Parameter: Post Timepoint (hr) Value: None
  misc_feature: MA Experiment 20001560 PARAMETER Experiment Name: At_Drought_Soil_Dry_P Parameter: Post-Treatment Value: None
  misc_feature: MA Experiment 20001560 PARAMETER Experiment Name: At_Drought_Soil_Dry_P Parameter: Timepoint (day) Value: 14
  misc_feature: MA Experiment 20001560 PARAMETER Experiment Name: At_Drought_Soil_Dry_P Parameter: Treatment Value: Drought vs. No Drought
  misc_feature: MA Experiment ID: 20001905 Result: Down-regulated in Transcription
  misc_feature: MA Experiment 20001905 PARAMETER Experiment Name: At_Drought_Reproduction_P Parameter: Age (day) Value: 40
  misc_feature: MA Experiment 20001905 PARAMETER Experiment Name: At_Drought_Reproduction_P Parameter: Organism Value: A. thaliana
  misc_feature: MA Experiment 20001905 PARAMETER Experiment Name: At_Drought_Reproduction_P Parameter: Plant Line Value: WS
  misc_feature: MA Experiment 20001905 PARAMETER Experiment Name: At_Drought_Reproduction_P Parameter: Timepoint (day) Value: 10
  misc_feature: MA Experiment 20001905 PARAMETER Experiment Name: At_Drought_Reproduction_P Parameter: Tissue Value: Rosettes
  misc_feature: MA Experiment 20001905 PARAMETER Experiment Name: At_Drought_Reproduction_P Parameter: Treatment Value: Drought vs. No Drought

SEQ ID NO: 44856 - protein, 510 aa, Arabidopsis thaliana; identical to SEQ ID NO: 30307
  peptide (1)..(510): Ceres Seq. ID no. 13509015
  misc_feature (120)..(508): Pfam Name: Eukaryotic aspartyl protease Pfam Description: Eukaryotic aspartyl protease
  misc_feature (120)..(508): Pfam Name: Eukaryotic aspartyl protease Pfam Description: Eukaryotic aspartyl protease
  misc_feature (120)..(508): Pfam Name: Eukaryotic aspartyl protease Pfam Description: Eukaryotic aspartyl protease
  misc_feature (120)..(508): Pfam Name: Eukaryotic aspartyl protease Pfam Description: Eukaryotic aspartyl protease
  misc_feature (86)..(510): Homolog of NCBI NO: 15290061 NR Description: nucleoid DNA-binding protein cnd41-like protein
  misc_feature (52)..(510): Homolog of NCBI NO: 15228618 NR Description: expressed protein [Arabidopsis thaliana]
  misc_feature (116)..(510): Homolog of NCBI NO: 15231010 NR Description: expressed protein [Arabidopsis thaliana]
  misc_feature (64)..(510): Homolog of NCBI NO: 21594980 NR Description: chloroplast nucleoid DNA binding protein,
  misc_feature (64)..(510): Homolog of NCBI NO: 15223368 NR Description: chloroplast nucleoid DNA binding protein -related
  misc_feature (86)..(510): Homolog of NCBI NO: 15290061 NR Description: nucleoid DNA-binding protein cnd41-like protein
  misc_feature (116)..(510): Homolog of NCBI NO: 15231010 NR Description: expressed protein [Arabidopsis thaliana]
  misc_feature (64)..(510): Homolog of NCBI NO: 15223368 NR Description: chloroplast nucleoid DNA binding protein -related
  misc_feature (64)..(510): Homolog of NCBI NO: 21594980 NR Description: chloroplast nucleoid DNA binding protein,
  misc_feature (116)..(510): Homolog of NCBI NO: 15231010 NR Description: expressed protein [Arabidopsis thaliana]
  misc_feature (52)..(510): Homolog of NCBI NO: 15228618 NR Description: expressed protein [Arabidopsis thaliana]
  misc_feature (86)..(510): Homolog of NCBI NO: 15290061 NR Description: nucleoid DNA-binding protein cnd41-like protein
  misc_feature (11)..(510): Homolog of NCBI NO: 15229656 NR Description: chloroplast nucleoid DNA-binding protein -related
  misc_feature (11)..(510): Homolog of NCBI NO: 19424106 NR Description: putative chloroplast nucleoid DNA-binding protein
  misc_feature (28)..(510): Homolog of NCBI NO: 15222611 NR Description: expressed protein [Arabidopsis thaliana]
  misc_feature (14)..(510): Homolog of NCBI NO: 34895664 NR Description: nucleoid DNA-binding protein cnd41-like protein
  misc_feature (53)..(510): Homolog of NCBI NO: 28392860 NR Description: unknown protein [Arabidopsis thaliana]
  misc_feature (11)..(510): Homolog of NCBI NO: 15229656 NR Description: chloroplast nucleoid DNA-binding protein -related
  misc_feature (11)..(510): Homolog of NCBI NO: 19424106 NR Description: putative chloroplast nucleoid DNA-binding protein
  misc_feature (28)..(510): Homolog of NCBI NO: 15222611 NR Description: expressed protein [Arabidopsis thaliana]
  misc_feature (14)..(510): Homolog of NCBI NO: 34895664 NR Description: nucleoid DNA-binding protein cnd41-like protein
  misc_feature (53)..(510): Homolog of NCBI NO: 28392860 NR Description: unknown protein [Arabidopsis thaliana]
  misc_feature (64)..(510): Homolog of NCBI NO: 15223368 NR Description: chloroplast nucleoid DNA binding protein -related
  misc_feature (64)..(510): Homolog of NCBI NO: 21594980 NR Description: chloroplast nucleoid DNA binding protein,
  misc_feature (116)..(510): Homolog of NCBI NO: 15231010 NR Description: expressed protein [Arabidopsis thaliana]
  misc_feature (52)..(510): Homolog of NCBI NO: 15228618 NR Description: expressed protein [Arabidopsis thaliana]
  misc_feature (86)..(510): Homolog of NCBI NO: 15290061 NR Description: nucleoid DNA-binding protein cnd41-like protein
  misc_feature (11)..(510): Homolog of NCBI NO: 15229656 NR Description: chloroplast nucleoid DNA-binding protein -related
  misc_feature (11)..(510): Homolog of NCBI NO: 19424106 NR Description: putative chloroplast nucleoid DNA-binding protein
  misc_feature (28)..(510): Homolog of NCBI NO: 15222611 NR Description: expressed protein [Arabidopsis thaliana]
  misc_feature (14)..(510): Homolog of NCBI NO: 34895664 NR Description: nucleoid DNA-binding protein cnd41-like protein
  misc_feature (53)..(510): Homolog of NCBI NO: 28392860 NR Description: unknown protein [Arabidopsis thaliana]
  misc_feature (64)..(510): Homolog of NCBI NO: 15223368 NR Description: chloroplast nucleoid DNA binding protein -related
  misc_feature (64)..(510): Homolog of NCBI NO: 21594980 NR Description: chloroplast nucleoid DNA binding protein,
  misc_feature (52)..(510): Homolog of NCBI NO: 15228618 NR Description: expressed protein [Arabidopsis thaliana]
  misc_feature (53)..(510): Homolog of NCBI NO: 28392860 NR Description: unknown protein [Arabidopsis thaliana]
  misc_feature (14)..(510): Homolog of NCBI NO: 34895664 NR Description: nucleoid DNA-binding protein cnd41-like protein
  misc_feature (28)..(510): Homolog of NCBI NO: 15222611 NR Description: expressed protein [Arabidopsis thaliana]
  misc_feature (11)..(510): Homolog of NCBI NO: 19424106 NR Description: putative chloroplast nucleoid DNA-binding protein
  misc_feature (11)..(510): Homolog of NCBI NO: 15229656 NR Description: chloroplast nucleoid DNA-binding protein -related

SEQ ID NO: 44857 - protein, 500 aa, Arabidopsis thaliana [sequence omitted]

SEQ ID NO: 44858 - protein, 326 aa, Arabidopsis thaliana; identical to SEQ ID NO: 30309
  peptide (1)..(326): Ceres Seq. ID no. 13509017
  misc_feature (1)..(324): Pfam Name: Eukaryotic aspartyl protease Pfam Description: Eukaryotic aspartyl protease
  misc_feature (1)..(324): Pfam Name: Eukaryotic aspartyl protease Pfam Description: Eukaryotic aspartyl protease
  misc_feature (1)..(324): Pfam Name: Eukaryotic aspartyl protease Pfam Description: Eukaryotic aspartyl protease
  misc_feature (1)..(324): Pfam Name: Eukaryotic aspartyl protease Pfam Description: Eukaryotic aspartyl protease
  misc_feature (1)..(326): Homolog of NCBI NO: 15290061 NR Description: nucleoid DNA-binding protein cnd41-like protein
  misc_feature (1)..(326): Homolog of NCBI NO: 15228618 NR Description: expressed protein [Arabidopsis thaliana]
  misc_feature (1)..(326): Homolog of NCBI NO: 15231010 NR Description: expressed protein [Arabidopsis thaliana]
  misc_feature (1)..(326): Homolog of NCBI NO: 21594980 NR Description: chloroplast nucleoid DNA binding protein,
  misc_feature (1)..(326): Homolog of NCBI NO: 15223368 NR Description: chloroplast nucleoid DNA binding protein -related
  misc_feature (1)..(326): Homolog of NCBI NO: 15290061 NR Description: nucleoid DNA-binding protein cnd41-like protein
  misc_feature (1)..(326): Homolog of NCBI NO: 15231010 NR Description: expressed protein [Arabidopsis thaliana]
  misc_feature (1)..(326): Homolog of NCBI NO: 15223368 NR Description: chloroplast nucleoid DNA binding protein -related
  misc_feature (1)..(326): Homolog of NCBI NO: 21594980 NR Description: chloroplast nucleoid DNA binding protein,
  misc_feature (1)..(326): Homolog of NCBI NO: 15231010 NR Description: expressed protein [Arabidopsis thaliana]
  misc_feature (1)..(326): Homolog of NCBI NO: 15228618 NR Description: expressed protein [Arabidopsis thaliana]
  misc_feature (1)..(326): Homolog of NCBI NO: 15290061 NR Description: nucleoid DNA-binding protein cnd41-like protein
  misc_feature (1)..(326): Homolog of NCBI NO: 15229656 NR Description: chloroplast nucleoid DNA-binding protein -related
  misc_feature (1)..(326): Homolog of NCBI NO: 19424106 NR Description: putative chloroplast nucleoid DNA-binding protein
  misc_feature (1)..(326): Homolog of NCBI NO: 15222611 NR Description: expressed protein [Arabidopsis thaliana]
  misc_feature (1)..(326): Homolog of NCBI NO: 34895664 NR Description: nucleoid DNA-binding protein cnd41-like protein
  misc_feature (1)..(326): Homolog of NCBI NO: 28392860 NR Description: unknown protein [Arabidopsis thaliana]
  misc_feature (1)..(326): Homolog of NCBI NO: 15229656 NR Description: chloroplast nucleoid DNA-binding protein -related
  misc_feature (1)..(326): Homolog of NCBI NO: 19424106 NR Description: putative chloroplast nucleoid DNA-binding protein
  misc_feature (1)..(326): Homolog of NCBI NO: 15222611 NR Description: expressed protein [Arabidopsis thaliana]
  misc_feature (1)..(326): Homolog of NCBI NO: 34895664 NR Description: nucleoid DNA-binding protein cnd41-like protein
  misc_feature (1)..(326): Homolog of NCBI NO: 28392860 NR Description: unknown protein [Arabidopsis thaliana]
  misc_feature (1)..(326): Homolog of NCBI NO: 15223368 NR Description: chloroplast nucleoid DNA binding protein -related
  misc_feature (1)..(326): Homolog of NCBI NO: 21594980 NR Description: chloroplast nucleoid DNA binding protein,
  misc_feature (1)..(326): Homolog of NCBI NO: 15231010 NR Description: expressed protein [Arabidopsis thaliana]
  misc_feature (1)..(326): Homolog of NCBI NO: 15228618 NR Description: expressed protein [Arabidopsis thaliana]
  misc_feature (1)..(326): Homolog of NCBI NO: 15290061 NR Description: nucleoid DNA-binding protein cnd41-like protein
  misc_feature (1)..(326): Homolog of NCBI NO: 15229656 NR Description: chloroplast nucleoid DNA-binding protein -related
  misc_feature (1)..(326): Homolog of NCBI NO: 19424106 NR Description: putative chloroplast nucleoid DNA-binding protein
  misc_feature (1)..(326): Homolog of NCBI NO: 15222611 NR Description: expressed protein [Arabidopsis thaliana]
  misc_feature (1)..(326): Homolog of NCBI NO: 34895664 NR Description: nucleoid DNA-binding protein cnd41-like protein
  misc_feature (1)..(326): Homolog of NCBI NO: 28392860 NR Description: unknown protein [Arabidopsis thaliana]
  misc_feature (1)..(326): Homolog of NCBI NO: 15223368 NR Description: chloroplast nucleoid DNA binding protein -related
  misc_feature (1)..(326): Homolog of NCBI NO: 21594980 NR Description: chloroplast nucleoid DNA binding protein,
  misc_feature (1)..(326): Homolog of NCBI NO: 15228618 NR Description: expressed protein [Arabidopsis thaliana]
  misc_feature (1)..(326): Homolog of NCBI NO: 28392860 NR Description: unknown protein [Arabidopsis thaliana]
  misc_feature (1)..(326): Homolog of NCBI NO: 34895664 NR Description: nucleoid DNA-binding protein cnd41-like protein
  misc_feature (1)..(326): Homolog of NCBI NO: 15222611 NR Description: expressed protein [Arabidopsis thaliana]
  misc_feature (1)..(326): Homolog of NCBI NO: 19424106 NR Description: putative chloroplast nucleoid DNA-binding protein
  misc_feature (1)..(326): Homolog of NCBI NO: 15229656 NR Description: chloroplast nucleoid DNA-binding protein -related

SEQ ID NO: 44859 - DNA, 2604 bp, Arabidopsis thaliana
  misc_feature (1)..(2604): Ceres Seq. ID no. 13575539
  misc_feature: MA Experiment ID: 20000173 Result: Down-regulated in Transcription
  misc_feature: MA Experiment 20000173 PARAMETER Experiment Name: At_42deg_Heat_P Parameter: Age (day) Value: 14
  misc_feature: MA Experiment 20000173 PARAMETER Experiment Name: At_42deg_Heat_P Parameter: Organism Value: A. thaliana
  misc_feature: MA Experiment 20000173 PARAMETER Experiment Name: At_42deg_Heat_P Parameter: Plant Line Value: WS
  misc_feature: MA Experiment 20000173 PARAMETER Experiment Name: At_42deg_Heat_P Parameter: Temperature (deg C) Value: 42 vs. 22
  misc_feature: MA Experiment 20000173 PARAMETER Experiment Name: At_42deg_Heat_P Parameter: Timepoint (hr) Value: 6
  misc_feature: MA Experiment 20000173 PARAMETER Experiment Name: At_42deg_Heat_P Parameter: Tissue Value: Aerial
  misc_feature: MA Experiment ID: 20000180 Result: Up-regulated in Transcription
  misc_feature: MA Experiment 20000180 PARAMETER Experiment Name: At_Germinating_Seeds_P Parameter: Age (hr) Value: 24 vs. 0
  misc_feature: MA Experiment 20000180 PARAMETER Experiment Name: At_Germinating_Seeds_P Parameter: Tissue Value: Germinating Seeds
  misc_feature: MA Experiment ID: 20000234 Result: Up-regulated in Transcription
  misc_feature: MA Experiment 20000234 PARAMETER Experiment Name: At_Siliques_P Parameter: Age (day) Value: 21
  misc_feature: MA Experiment 20000234 PARAMETER Experiment Name: At_Siliques_P Parameter: Organism Value: A. thaliana
  misc_feature: MA Experiment 20000234 PARAMETER Experiment Name: At_Siliques_P Parameter: Plant Line Value: WS
  misc_feature: MA Experiment 20000234 PARAMETER Experiment Name: At_Siliques_P Parameter: Tissue Value: Less Than 5mm Siliques vs. Whole Plant
  misc_feature: MA Experiment ID: 20000235 Result: Up-regulated in Transcription
  misc_feature: MA Experiment 20000235 PARAMETER Experiment Name: At_Siliques_P Parameter: Age (day) Value: 21
  misc_feature: MA Experiment 20000235 PARAMETER Experiment Name: At_Siliques_P Parameter: Organism Value: A. thaliana
  misc_feature: MA Experiment 20000235 PARAMETER Experiment Name: At_Siliques_P Parameter: Plant Line Value: WS
  misc_feature: MA Experiment 20000235 PARAMETER Experiment Name: At_Siliques_P Parameter: Tissue Value: 5-10mm Siliques vs. Whole Plant
  misc_feature: MA Experiment ID: 20000265 Result: Up-regulated in Transcription
  misc_feature: MA Experiment 20000265 PARAMETER Experiment Name: At_Open_Flower_P Parameter: Age (day) Value: 21
  misc_feature: MA Experiment 20000265 PARAMETER Experiment Name: At_Open_Flower_P Parameter: Plant Line Value: WS
  misc_feature: MA Experiment 20000265 PARAMETER Experiment Name: At_Open_Flower_P Parameter: Tissue Value: Closed Flower vs. Whole Plant
  misc_feature: MA Experiment ID: 20000286 Result: Up-regulated in Transcription
  misc_feature: MA Experiment 20000286 PARAMETER Experiment Name: At_Open_Flower_P Parameter: Age (day) Value: 21
  misc_feature: MA Experiment 20000286 PARAMETER Experiment Name: At_Open_Flower_P Parameter: Plant Line Value: WS
  misc_feature: MA Experiment 20000286 PARAMETER Experiment Name: At_Open_Flower_P Parameter: Tissue Value: Half Open vs. Whole Plant
  misc_feature: MA Experiment ID: 20001451 Result: Down-regulated in Transcription
  misc_feature: MA Experiment 20001451 PARAMETER Experiment Name: At_Far-red-induction_P Parameter: Age (day) Value: 7
  misc_feature: MA Experiment 20001451 PARAMETER Experiment Name: At_Far-red-induction_P Parameter: Light Value: Far-red vs. White
  misc_feature: MA Experiment 20001451 PARAMETER Experiment Name: At_Far-red-induction_P Parameter: Organism Value: A. thaliana
  misc_feature: MA Experiment 20001451 PARAMETER Experiment Name: At_Far-red-induction_P Parameter: Plant Line Value: Columbia
  misc_feature: MA Experiment 20001451 PARAMETER Experiment Name: At_Far-red-induction_P Parameter: Timepoint (hr) Value: 24
  misc_feature: MA Experiment 20001451 PARAMETER Experiment Name: At_Far-red-induction_P Parameter: Tissue Value: Whole Plant
  misc_feature: MA Experiment ID: 20001906 Result: Down-regulated in Transcription
  misc_feature: MA Experiment 20001906 PARAMETER Experiment Name: At_Drought_Reproduction_P Parameter: Age (day) Value: 35
  misc_feature: MA Experiment 20001906 PARAMETER Experiment Name: At_Drought_Reproduction_P Parameter: Organism Value: A. thaliana
  misc_feature: MA Experiment 20001906 PARAMETER Experiment Name: At_Drought_Reproduction_P Parameter: Plant Line Value: WS
  misc_feature: MA Experiment 20001906 PARAMETER Experiment Name: At_Drought_Reproduction_P Parameter: Timepoint (day) Value: 5
  misc_feature: MA Experiment 20001906 PARAMETER Experiment Name: At_Drought_Reproduction_P Parameter: Tissue Value: Siliques
  misc_feature: MA Experiment 20001906 PARAMETER Experiment Name: At_Drought_Reproduction_P Parameter: Treatment Value: Drought vs. No Drought
  misc_feature: MA Experiment ID: 20001911 Result: Down-regulated in Transcription
  misc_feature: MA Experiment 20001911 PARAMETER Experiment Name: At_Drought_Reproduction_P Parameter: Age (day) Value: 40
  misc_feature: MA Experiment 20001911 PARAMETER Experiment Name: At_Drought_Reproduction_P Parameter: Organism Value: A. thaliana
  misc_feature: MA Experiment 20001911 PARAMETER Experiment Name: At_Drought_Reproduction_P Parameter: Plant Line Value: WS
  misc_feature: MA Experiment 20001911 PARAMETER Experiment Name: At_Drought_Reproduction_P Parameter: Timepoint (day) Value: 10
  misc_feature: MA Experiment 20001911 PARAMETER Experiment Name: At_Drought_Reproduction_P Parameter: Tissue Value: Flowers
  misc_feature: MA Experiment 20001911 PARAMETER Experiment Name: At_Drought_Reproduction_P Parameter: Treatment Value: Drought vs. No Drought
gaattggaatatctctctctctatctttcttctgaatctctcaaaaatttcgccattgttgttgctctgaaatctgttaactttggtgatttgattgcatttgcctttgagagttttaatcttcaatttttggctacatcgagatttggttctgaattttggcatctctattagtagtgaggccatttcctgatttggatcataaagagtggagaaaaatcttgcctttgtctccttaggattgtggcttgatcaggtaatgagactatgtgcttcaaaattgagacttgtttggtgaaagaagcggatgaaaaagtttctgtgtacagcgagaggaattagtggtttctgcttacgaatgatatgagaggttcttggtacaagagtgtttcctctgtttttggtctcagaccacggatcagagggttgttattcttcattgttggtgttgtggctctagttactattttagcaccattgacatctaattcgtatgattcttcgtcaagttcgacacttgtgccgaacatttatagtaactataggaggataaaggagcaagctgctgttgattatcttgatctgaggtctctttctttaggggctagtttaaaagagtttcctttttgtggtaaagaaagagaaagttatgtgccttgttataacataactgggaatttgcttgctgggcttcaagagggtgaggagttagatcgacattgcgagtttgaaagagagaaggaaagatgtgtagttcgtcctccgagagattataaaataccacttaggtggccacttggtagagatatcatatggagtgggaacgtgaagattaccaaagaccagtttctttcttcaggaactgtgacaacgaggttaatgttgcttgaagagaatcaaataacctttcactcggaggacggcctggtctttgatggggtcaaagactatgctcgtcaaattgctgagatgataggtttaggaagtgatactgaatttgctcaagcgggtgtaagtattcttaatcttattatcttacacatcaaaattttcagttccagcttctgagatttcttctgatgcttgcaggtacggactgtgttagacattggttgcggatttggtagctttggtgctcatttagtgtctttgaagctgatgcctatatgtattgctgagtatgaggcaactgggagccaagttcagttagctctagagagaggccttcctgcaatgattggcaatttcttttcaaaacagcttccttatccagcactgtcttttgatatggtccattgtgctcaatgtggcactacttgggatatcaaagatgcaatgctacttttggaagtggatcgtgttctgaaacccgggggatactttgttttaacttctcccacaaacaaagcacagggaaacttaccagataccaagaaaacgagcatctcaacacgggtgaatgagttatctaagaaaatctgttggagtctaacagctcagcaggatgagacgtttctttggcagaaaacttctgattcaagttgctattcttctcgttcgcaagcttctatacctctttgcaaagatggagatagcgttccgtattaccacccattggttccatgtataagcggaaccacgagtaaacgctggatttctatacagaacaggtctgctgttgcaggaacaacctctgccgggcttgaaattcatggtttaaaaccggaagaattcttcgaggatacacaaatatggagatcagctctgaaaaactattggtccttgcttacacctctaattttctctgaccatccgaagagacccggtgatgaggatcctctcccgcctttcaacatgatacgcaatgtgatggacatgcatgctcgttttgggaatttaaatgccgctttactcgacgaaggaaaatctgcttgggtaatgaacgtcgtcccagtcaatgcacgtaatactcttcctatcatacttgatcgtggtttcgccggtgttctacatgactggtgtgaaccattcccgacatatcctcgaacatatgacatgcttcatgccaatgaacttctcacacatcttagctcagaacgatgcagcctaatggacttgttcttggagatggaccggattcttcgccctgagggatgggttgttctaagcgacaaagtgggagtaatcgagatggctcgagcacttgcagctcgagtgcgttgggaagcaagagtcattgatcttcaagatggtagtgaccaaagacttctcgtctgtcaaaaaccattcatcaaaaaataactcaaaagcaacatcaaaatattatatgcttctttcaccataaacaacactcactacacacagtcttttcactgatccaaattatgtctcctgcaaattctggagataaaatcaatatttttgttgttgctcggatggctttttaaaacttgtgaaggggctatgtagtaagtggaagctgtagagctatgagtagaagaaagagtttagattcaatattctttcatttttctttttgtctatctttctttaatttttgatattgaacaaaattgtagctatatatatatttttcattcatcc

SEQ ID NO: 44860 - protein, 380 aa, Arabidopsis thaliana
  peptide (1)..(380): Ceres Seq. ID no. 13575540
  misc_feature (1)..(364): Pfam Name: Putative methyltransferase Pfam Description: Putative methyltransferase
  misc_feature (10)..(380): Homolog of NCBI NO: 12324243 NR Description: unknown protein, 5' partial; 69506-67937
  misc_feature (331)..(380): Homolog of NCBI NO: 8052540 NR Description: F3F9.21 [Arabidopsis thaliana]
  misc_feature (140)..(287): Homolog of NCBI NO: 8052540 NR Description: F3F9.21 [Arabidopsis thaliana]
  misc_feature (1)..(134): Homolog of NCBI NO: 8052540 NR Description: F3F9.21 [Arabidopsis thaliana]
  misc_feature (1)..(380): Homolog of NCBI NO: 18395560 NR Description: dehydration-induced protein-related [Arabidopsis
  misc_feature (1)..(380): Homolog of NCBI NO: 24111341 NR Description: At2g03480/T4M8.9 [Arabidopsis thaliana]
  misc_feature (1)..(380): Homolog of NCBI NO: 14532450 NR Description: At2g03480/T4M8.9 [Arabidopsis thaliana]
  misc_feature (1)..(364): Homolog of NCBI NO: 25402770 NR Description: protein F16A14.7 [imported] - Arabidopsis
  misc_feature (1)..(380): Homolog of NCBI NO: 26449782 NR Description: unknown protein [Arabidopsis thaliana]
  misc_feature (1)..(380): Homolog of NCBI NO: 15222970 NR Description: dehydration-induced protein-related [Arabidopsis
MPICIAEYEATGSQVQLALERGLPAMIGNFFSKQLPYPALSFDMVHCAQCGTTWDIKDAMLLLEVDRVLKPGGYFVLTSPTNKAQGNLPDTKKTSISTRVNELSKKICWSLTAQQDETFLWQKTSDSSCYSSRSQASIPLCKDGDSVPYYHPLVPCISGTTSKRWISIQNRSAVAGTTSAGLEIHGLKPEEFFEDTQIWRSALKNYWSLLTPLIFSDHPKRPGDEDPLPPFNMIRNVMDMHARFGNLNAALLDEGKSAWVMNVVPVNARNTLPIILDRGFAGVLHDWCEPFPTYPRTYDMLHANELLTHLSSERCSLMDLFLEMDRILRPEGWVVLSDKVGVIEMARALAARVRWEARVIDLQDGSDQRLLVCQKPFIKK

SEQ ID NO: 44861 - protein, 355 aa, Arabidopsis thaliana
  peptide (1)..(355): Ceres Seq. ID no. 13575541
  misc_feature (1)..(339): Pfam Name: Putative methyltransferase Pfam Description: Putative methyltransferase
  misc_feature (1)..(355): Homolog of NCBI NO: 12324243 NR Description: unknown protein, 5' partial; 69506-67937
  misc_feature (306)..(355): Homolog of NCBI NO: 8052540 NR Description: F3F9.21 [Arabidopsis thaliana]
  misc_feature (115)..(262): Homolog of NCBI NO: 8052540 NR Description: F3F9.21 [Arabidopsis thaliana]
  misc_feature (1)..(109): Homolog of NCBI NO: 8052540 NR Description: F3F9.21 [Arabidopsis thaliana]
  misc_feature (1)..(355): Homolog of NCBI NO: 18395560 NR Description: dehydration-induced protein-related [Arabidopsis
  misc_feature (1)..(355): Homolog of NCBI NO: 24111341 NR Description: At2g03480/T4M8.9 [Arabidopsis thaliana]
  misc_feature (1)..(355): Homolog of NCBI NO: 14532450 NR Description: At2g03480/T4M8.9 [Arabidopsis thaliana]
  misc_feature (1)..(339): Homolog of NCBI NO: 25402770 NR Description: protein F16A14.7 [imported] - Arabidopsis
  misc_feature (1)..(355): Homolog of NCBI NO: 26449782 NR Description: unknown protein [Arabidopsis thaliana]
  misc_feature (1)..(355): Homolog of NCBI NO: 15222970 NR Description: dehydration-induced protein-related [Arabidopsis
MIGNFFSKQLPYPALSFDMVHCAQCGTTWDIKDAMLLLEVDRVLKPGGYFVLTSPTNKAQGNLPDTKKTSISTRVNELSKKICWSLTAQQDETFLWQKTSDSSCYSSRSQASIPLCKDGDSVPYYHPLVPCISGTTSKRWISIQNRSAVAGTTSAGLEIHGLKPEEFFEDTQIWRSALKNYWSLLTPLIFSDHPKRPGDEDPLPPFNMIRNVMDMHARFGNLNAALLDEGKSAWVMNVVPVNARNTLPIILDRGFAGVLHDWCEPFPTYPRTYDMLHANELLTHLSSERCSLMDLFLEMDRILRPEGWVVLSDKVGVIEMARALAARVRWEARVIDLQDGSDQRLLVCQKPFIKK

SEQ ID NO: 44862 - protein, 337 aa, Arabidopsis thaliana
  peptide (1)..(337): Ceres Seq. ID no. 13575542
  misc_feature (1)..(321): Pfam Name: Putative methyltransferase Pfam Description: Putative methyltransferase
  misc_feature (1)..(337): Homolog of NCBI NO: 12324243 NR Description: unknown protein, 5' partial; 69506-67937
  misc_feature (288)..(337): Homolog of NCBI NO: 8052540 NR Description: F3F9.21 [Arabidopsis thaliana]
  misc_feature (97)..(244): Homolog of NCBI NO: 8052540 NR Description: F3F9.21 [Arabidopsis thaliana]
  misc_feature (1)..(91): Homolog of NCBI NO: 8052540 NR Description: F3F9.21 [Arabidopsis thaliana]
  misc_feature (1)..(337): Homolog of NCBI NO: 18395560 NR Description: dehydration-induced protein-related [Arabidopsis
  misc_feature (1)..(337): Homolog of NCBI NO: 24111341 NR Description: At2g03480/T4M8.9 [Arabidopsis thaliana]
  misc_feature (1)..(337): Homolog of NCBI NO: 14532450 NR Description: At2g03480/T4M8.9 [Arabidopsis thaliana]
  misc_feature (1)..(321): Homolog of NCBI NO: 25402770 NR Description: protein F16A14.7 [imported] - Arabidopsis
  misc_feature (1)..(337): Homolog of NCBI NO: 26449782 NR Description: unknown protein [Arabidopsis thaliana]
  misc_feature (1)..(337): Homolog of NCBI NO: 15222970 NR Description: dehydration-induced protein-related [Arabidopsis
MVHCAQCGTTWDIKDAMLLLEVDRVLKPGGYFVLTSPTNKAQGNLPDTKKTSISTRVNELSKKICWSLTAQQDETFLWQKTSDSSCYSSRSQASIPLCKDGDSVPYYHPLVPCISGTTSKRWISIQNRSAVAGTTSAGLEIHGLKPEEFFEDTQIWRSALKNYWSLLTPLIFSDHPKRPGDEDPLPPFNMIRNVMDMHARFGNLNAALLDEGKSAWVMNVVPVNARNTLPIILDRGFAGVLHDWCEPFPTYPRTYDMLHANELLTHLSSERCSLMDLFLEMDRILRPEGWVVLSDKVGVIEMARALAARVRWEARVIDLQDGSDQRLLVCQKPFIKK

SEQ ID NO: 44863 - DNA, 2351 bp, Arabidopsis thaliana
  misc_feature (1)..(2351): Ceres Seq. ID no. 12559445
  misc_feature: MA Experiment ID: 108434 Result: Down-regulated in Transcription
  misc_feature: MA Experiment 108434 PARAMETER Experiment Name: At_Root_Tips_cDNA_P Parameter: Tissue Value: Root Tips
  misc_feature: MA Experiment ID: 108488 Result: Down-regulated in Transcription
  misc_feature: MA Experiment ID: 108572 Result: Up-regulated in Transcription
  misc_feature: MA Experiment 108572 PARAMETER Experiment Name: At_Drought_cDNA_P Parameter: Timepoint (hr) Value: 1
  misc_feature: MA Experiment 108572 PARAMETER Experiment Name: At_Drought_cDNA_P Parameter: Tissue Value: Aerial
  misc_feature: MA Experiment 108572 PARAMETER Experiment Name: At_Drought_cDNA_P Parameter: Treatment Value: Drought vs. No Drought
  misc_feature: MA Experiment ID: 108573 Result: Up-regulated in Transcription
  misc_feature: MA Experiment 108573 PARAMETER Experiment Name: At_Drought_cDNA_P Parameter: Timepoint (hr) Value: 6
  misc_feature: MA Experiment 108573 PARAMETER Experiment Name: At_Drought_cDNA_P Parameter: Tissue Value: Aerial
  misc_feature: MA Experiment 108573 PARAMETER Experiment Name: At_Drought_cDNA_P Parameter: Treatment Value: Drought vs. No Drought
  misc_feature: MA Experiment ID: 108579 Result: Down-regulated in Transcription
  misc_feature: MA Experiment 108579 PARAMETER Experiment Name: At_4deg_Cold_cDNA_P Parameter: Temperature (deg C) Value: 4 vs. 22
  misc_feature: MA Experiment 108579 PARAMETER Experiment Name: At_4deg_Cold_cDNA_P Parameter: Timepoint (hr) Value: 6
  misc_feature: MA Experiment 108579 PARAMETER Experiment Name: At_4deg_Cold_cDNA_P Parameter: Tissue Value: Aerial
  misc_feature: MA Experiment ID: 108605 Result: Up-regulated in Transcription
  misc_feature: MA Experiment 108605 PARAMETER Experiment Name: At_100uM_ABA_cDNA_P Parameter: Timepoint (hr) Value: 6
  misc_feature: MA Experiment 108605 PARAMETER Experiment Name: At_100uM_ABA_cDNA_P Parameter: Tissue Value: Aerial
  misc_feature: MA Experiment 108605 PARAMETER Experiment Name: At_100uM_ABA_cDNA_P Parameter: Treatment Value: 100uM ABA vs. No Treatment
  misc_feature: MA Experiment ID: 20000071 Result: Up-regulated in Transcription
  misc_feature: MA Experiment 20000071 PARAMETER Experiment Name: At_100uM_ABA_Mutants_cDNA_P Parameter: Plant Line Value: CS8104
  misc_feature: MA Experiment 20000071 PARAMETER Experiment Name: At_100uM_ABA_Mutants_cDNA_P Parameter: Timepoint (hr) Value: 6
  misc_feature: MA Experiment 20000071 PARAMETER Experiment Name: At_100uM_ABA_Mutants_cDNA_P Parameter: Tissue Value: Aerial
  misc_feature: MA Experiment 20000071 PARAMETER Experiment Name: At_100uM_ABA_Mutants_cDNA_P Parameter: Treatment Value: 100uM ABA vs. No Treatment
  misc_feature: MA Experiment ID: 20000117 Result: Up-regulated in Transcription
  misc_feature: MA Experiment 20000117 PARAMETER Experiment Name: At_100uM_ABA_Mutants_cDNA_P Parameter: Plant Line Value: Columbia
  misc_feature: MA Experiment 20000117 PARAMETER Experiment Name: At_100uM_ABA_Mutants_cDNA_P Parameter: Timepoint (hr) Value: 6
  misc_feature: MA Experiment 20000117 PARAMETER Experiment Name: At_100uM_ABA_Mutants_cDNA_P Parameter: Tissue Value: Aerial
  misc_feature: MA Experiment 20000117 PARAMETER Experiment Name: At_100uM_ABA_Mutants_cDNA_P Parameter: Treatment Value: 100uM ABA vs. No Treatment
  misc_feature: MA Experiment ID: 20000169 Result: Up-regulated in Transcription
  misc_feature: MA Experiment 20000169 PARAMETER Experiment Name: At_100uM_ABA_P Parameter: Age (day) Value: 14
  misc_feature: MA Experiment 20000169 PARAMETER Experiment Name: At_100uM_ABA_P Parameter: Organism Value: A. thaliana
  misc_feature: MA Experiment 20000169 PARAMETER Experiment Name: At_100uM_ABA_P Parameter: Plant Line Value: WS
  misc_feature: MA Experiment 20000169 PARAMETER Experiment Name: At_100uM_ABA_P Parameter: Timepoint (hr) Value: 6
  misc_feature: MA Experiment 20000169 PARAMETER Experiment Name: At_100uM_ABA_P Parameter: Tissue Value: Aerial
  misc_feature: MA Experiment 20000169 PARAMETER Experiment Name: At_100uM_ABA_P Parameter: Treatment Value: 100uM ABA vs. No Treatment
  misc_feature: MA Experiment ID: 20000214 Result: Down-regulated in Transcription
  misc_feature: MA Experiment 20000214 PARAMETER Experiment Name: At_4deg_Cold_P Parameter: Timepoint (hr) Value: 6
  misc_feature: MA Experiment ID: 20000234 Result: Down-regulated in Transcription
  misc_feature: MA Experiment 20000234 PARAMETER Experiment Name: At_Siliques_P Parameter: Age (day) Value: 21
  misc_feature: MA Experiment 20000234 PARAMETER Experiment Name: At_Siliques_P Parameter: Organism Value: A. thaliana
  misc_feature: MA Experiment 20000234 PARAMETER Experiment Name: At_Siliques_P Parameter: Plant Line Value: WS
  misc_feature: MA Experiment 20000234 PARAMETER Experiment Name: At_Siliques_P Parameter: Tissue Value: Less Than 5mm Siliques vs. Whole Plant
  misc_feature: MA Experiment ID: 20000265 Result: Down-regulated in Transcription
  misc_feature: MA Experiment 20000265 PARAMETER Experiment Name: At_Open_Flower_P Parameter: Age (day) Value: 21
  misc_feature: MA Experiment 20000265 PARAMETER Experiment Name: At_Open_Flower_P Parameter: Plant Line Value: WS
  misc_feature: MA Experiment 20000265 PARAMETER Experiment Name: At_Open_Flower_P Parameter: Tissue Value: Closed Flower vs. Whole Plant
  misc_feature: MA Experiment ID: 20000573 Result: Up-regulated in Transcription
  misc_feature: MA Experiment 20000573 PARAMETER Experiment Name: At_100uM_ABA_Mutants__P Parameter: Organism Value: A. thaliana
  misc_feature: MA Experiment 20000573 PARAMETER Experiment Name: At_100uM_ABA_Mutants__P Parameter: Plant Line Value: CS22 vs. Ler wt
  misc_feature: MA Experiment 20000573 PARAMETER Experiment Name: At_100uM_ABA_Mutants__P Parameter: Timepoint (hr) Value: N/A
  misc_feature: MA Experiment 20000573 PARAMETER Experiment Name: At_100uM_ABA_Mutants__P Parameter: Tissue Value: Whole Plant
  misc_feature: MA Experiment 20000573 PARAMETER Experiment Name: At_100uM_ABA_Mutants__P Parameter: Treatment Value: None
  misc_feature: MA Experiment ID: 20000794 Result: Up-regulated in Transcription
  misc_feature: MA Experiment 20000794 PARAMETER Experiment Name: At_Petals_P Parameter: Age (day) Value: 23-25 days
  misc_feature: MA Experiment 20000794 PARAMETER Experiment Name: At_Petals_P Parameter: Plant Line Value: WS
  misc_feature: MA Experiment 20000794 PARAMETER Experiment Name: At_Petals_P Parameter: Tissue Value: Petals vs. Whole plant
  misc_feature: MA Experiment ID: 20001450 Result: Up-regulated in Transcription
  misc_feature: MA Experiment 20001450 PARAMETER Experiment Name: At_Far-red-induction_P Parameter: Age (day) Value: 7
  misc_feature: MA Experiment 20001450 PARAMETER Experiment Name: At_Far-red-induction_P Parameter: Light Value: Far-red vs. White
  misc_feature: MA Experiment 20001450 PARAMETER Experiment Name: At_Far-red-induction_P Parameter: Organism Value: A. thaliana
  misc_feature: MA Experiment 20001450 PARAMETER Experiment Name: At_Far-red-induction_P Parameter: Plant Line Value: Columbia
  misc_feature: MA Experiment 20001450 PARAMETER Experiment Name: At_Far-red-induction_P Parameter: Timepoint (hr) Value: 8
  misc_feature: MA Experiment 20001450 PARAMETER Experiment Name: At_Far-red-induction_P Parameter: Tissue Value: Whole Plant
  misc_feature: MA Experiment ID: 20001451 Result: Up-regulated in Transcription
  misc_feature: MA Experiment 20001451 PARAMETER Experiment Name: At_Far-red-induction_P Parameter: Age (day) Value: 7
  misc_feature: MA Experiment 20001451 PARAMETER Experiment Name: At_Far-red-induction_P Parameter: Light Value: Far-red vs. White
  misc_feature: MA Experiment 20001451 PARAMETER Experiment Name: At_Far-red-induction_P Parameter: Organism Value: A. thaliana
  misc_feature: MA Experiment 20001451 PARAMETER Experiment Name: At_Far-red-induction_P Parameter: Plant Line Value: Columbia
  misc_feature: MA Experiment 20001451 PARAMETER Experiment Name: At_Far-red-induction_P Parameter: Timepoint (hr) Value: 24
  misc_feature: MA Experiment 20001451 PARAMETER Experiment Name: At_Far-red-induction_P Parameter: Tissue Value: Whole Plant
  misc_feature: MA Experiment ID: 20001560 Result: Down-regulated in Transcription
  misc_feature: MA Experiment 20001560 PARAMETER Experiment Name: At_Drought_Soil_Dry_P Parameter: Age (day) Value: 28
  misc_feature: MA Experiment 20001560 PARAMETER Experiment Name: At_Drought_Soil_Dry_P Parameter: Organism Value: A. thaliana
  misc_feature: MA Experiment 20001560 PARAMETER Experiment Name: At_Drought_Soil_Dry_P Parameter: Plant Line Value: WS
  misc_feature: MA Experiment 20001560 PARAMETER Experiment Name: At_Drought_Soil_Dry_P Parameter: Post Timepoint (hr) Value: None
  misc_feature: MA Experiment 20001560 PARAMETER Experiment Name: At_Drought_Soil_Dry_P Parameter: Post-Treatment Value: None
  misc_feature: MA Experiment 20001560 PARAMETER Experiment Name: At_Drought_Soil_Dry_P Parameter: Timepoint (day) Value: 14
  misc_feature: MA Experiment 20001560 PARAMETER Experiment Name: At_Drought_Soil_Dry_P Parameter: Treatment Value: Drought vs. No Drought
  misc_feature: MA Experiment ID: 20001911 Result: Up-regulated in Transcription
  misc_feature: MA Experiment 20001911 PARAMETER Experiment Name: At_Drought_Reproduction_P Parameter: Age (day) Value: 40
  misc_feature: MA Experiment 20001911 PARAMETER Experiment Name: At_Drought_Reproduction_P Parameter: Organism Value: A. thaliana
  misc_feature: MA Experiment 20001911 PARAMETER Experiment Name: At_Drought_Reproduction_P Parameter: Plant Line Value: WS
  misc_feature: MA Experiment 20001911 PARAMETER Experiment Name: At_Drought_Reproduction_P Parameter: Timepoint (day) Value: 10
  misc_feature: MA Experiment 20001911 PARAMETER Experiment Name: At_Drought_Reproduction_P Parameter: Tissue Value: Flowers
  misc_feature: MA Experiment 20001911 PARAMETER Experiment Name: At_Drought_Reproduction_P Parameter: Treatment Value: Drought vs. No Drought
acgcaaacacaagtccttgtccttccttcctcaatcaaacaacaccttctttaatccagaacaaaaaaaaacaaacagaagaaaaaaaaaaaaaaaaactacaaaaaaaaaatctctgcccgcttctccgttctcggggttgcgtcaaaattgcaccaaattaatcaaaacctacccagaaatcatttttggtcacaggggataggcgggcagatttaaattttcttcttttgttcttctgtttgaatttgtattgattcgtgaaattgtgtttgtttgatggggtttttggtggatacgcaaaaggaaggaggtggacattcatggggttacgttagaagtttggttagaaggaaacaagtcgactctgctaatggccaatctcatggtcaccaacttgctagagccctcactgttcctcatctcgttgcaattggtgttggagcaacaataggagctggagtttatattcttgtaggaacagttgcgagagagcattcaggaccttctcttgctttgtcttttcttattgctggaattgctgctggtctttctgcgttttgttatgctgaactctctagtcgttgcccttcagctgggagtgcgtatcactattcttacatttgtgttggtgaaggtgttgcgtggataatcggttgggcgttgattctggagtataccattggtggctcagctgttgcccgtggcatatcccctaatctggcactgatttttggtggtgaagatggtttgcctgcaattttagcgcgccaccagatcccaggccttgatattgttgttgatccatgtgctgctattcttgtgtttgttgtaactggccttttgtgcatgggaataaaggagagcacatttgctcagggaattgtaactgcagtcaatgtgtgtgtcctgttatttgtcatagtagctggcagttatctcggcttcaagacaggttggcctggttatgaacttccaacagggttctttccattcggagtagatggaatgtttgctggttctgctacagtcttttttgcattcattgggtttgattcggttgcaagtaccgcagaggaggtgagaaatccccaacgggatttaccgattggtattggtcttgctctcttgttatgttgttctctctacatgatggtctccatagttattgttggtttaattccttactatgcaatggatcccgacaccccgatatcctctgcattcgctagtcatgacatgcaatgggctgtatacttaataactttaggagctgtcatggcactctgctcagctttaatgggtgcccttctccctcagccacgaattctgatggcaatggctagggatggtctgctcccttctattttttcagacattaataaacgcacacaggttccggttaaagcaacagtggcaactgggttgtgtgctgcaaccttagcgttctttatggatgtttcacagcttgcagggatggtgagtgttgggacacttctggcatttacaatggtggcaatatcagtgttgatactaagatatgttcctccagatgagcaacctcttccgtcatctcttcaagagagaattgattctgtttcctttatatgtggtgaaacaacgtcatccggtcatgttggtacttccgatagcagtcaccagcctttaatagttaataatgatgctttggtcgatgtcccacttatcaagaatcaagaagctctagggtgtttggttctcagcgaggaaaccagaaggattgtcgctggatggagcattatgttcacatgtgttggggccttccttttaagttatgcggcatcaagcctgagcttcccagggcttattagatatccgttgtgtggtgttggtggatgtctcctccttgctggtttgattgctctgagttccatagatcaggatgatgcgagacacacttttggacattctggaggttacatgtgcccgtttgttcccctcctacctatcatctgcattctcatcaacatgtaccttttggttaaccttggatctgcgacatgggctcgtgtatcggtgtggctgcttataggagtgattgtgtatgttttctatggtcggaaaaacagttcgcttgccaatgcagtttacgtaactacagctcatgcggaggagatatatcgcgaacatgaaggttctttggcatagtctgagaaagcagcatctcttttgttatatatgtaacacaaatctgtattatctttatctggatgtaacagcaagagtggcactatctatttgtttgcaaaaagatctgtccacggcctttgtaaataatatatatcatcatcaattcataatcaggaaagact

SEQ ID NO: 44864 - protein, 635 aa, Arabidopsis thaliana
  peptide (1)..(635): Ceres Seq. ID no. 12559446
  misc_feature (20)..(227): Homolog of NCBI NO: 6981556 NR Description: solute carrier family 7 member A1 (amino acid
  misc_feature (20)..(227): Homolog of NCBI NO: 539952 NR Description: ecotropic retrovirus receptor - rat
  misc_feature (175)..(614): Homolog of NCBI NO: 6981556 NR Description: solute carrier family 7 member A1 (amino acid
  misc_feature (175)..(614): Homolog of NCBI NO: 539952 NR Description: ecotropic retrovirus receptor - rat
  misc_feature (54)..(617): Homolog of NCBI NO: 37534696 NR Description: putative cationic amino acid transporter -like
  misc_feature (19)..(620): Homolog of NCBI NO: 6006869 NR Description: putative cationic amino acid transporter
  misc_feature (19)..(620): Homolog of NCBI NO: 22330822 NR Description: putative cationic amino acid transporter
  misc_feature (16)..(632): Homolog of NCBI NO: 29244640 NR Description: putative cationic amino acid transporter
  misc_feature (17)..(635): Homolog of NCBI NO: 10178213 NR Description: cationic amino acid transporter-like protein
  misc_feature (17)..(635): Homolog of NCBI NO: 30693001 NR Description: cationic amino acid transporter -related protein
MGFLVDTQKEGGGHSWGYVRSLVRRKQVDSANGQSHGHQLARALTVPHLVAIGVGATIGAGVYILVGTVAREHSGPSLALSFLIAGIAAGLSAFCYAELSSRCPSAGSAYHYSYICVGEGVAWIIGWALILEYTIGGSAVARGISPNLALIFGGEDGLPAILARHQIPGLDIVVDPCAAILVFVVTGLLCMGIKESTFAQGIVTAVNVCVLLFVIVAGSYLGFKTGWPGYELPTGFFPFGVDGMFAGSATVFFAFIGFDSVASTAEEVRNPQRDLPIGIGLALLLCCSLYMMVSIVIVGLIPYYAMDPDTPISSAFASHDMQWAVYLITLGAVMALCSALMGALLPQPRILMAMARDGLLPSIFSDINKRTQVPVKATVATGLCAATLAFFMDVSQLAGMVSVGTLLAFTMVAISVLILRYVPPDEQPLPSSLQERIDSVSFICGETTSSGHVGTSDSSHQPLIVNNDALVDVPLIKNQEALGCLVLSEETRRIVAGWSIMFTCVGAFLLSYAASSLSFPGLIRYPLCGVGGCLLLAGLIALSSIDQDDARHTFGHSGGYMCPFVPLLPIICILINMYLLVNLGSATWARVSVWLLIGVIVYVFYGRKNSSLANAVYVTTAHAEEIYREHEGSLA

SEQ ID NO: 44865 - protein, 445 aa, Arabidopsis thaliana
  peptide (1)..(445): Ceres Seq. ID no. 12559447
  misc_feature (1)..(37): Homolog of NCBI NO: 6981556 NR Description: solute carrier family 7 member A1 (amino acid
  misc_feature (1)..(37): Homolog of NCBI NO: 539952 NR Description: ecotropic retrovirus receptor - rat
  misc_feature (1)..(424): Homolog of NCBI NO: 6981556 NR Description: solute carrier family 7 member A1 (amino acid
  misc_feature (1)..(424): Homolog of NCBI NO: 539952 NR Description: ecotropic retrovirus receptor - rat
  misc_feature (1)..(427): Homolog of NCBI NO: 37534696 NR Description: putative cationic amino acid transporter -like
  misc_feature (1)..(430): Homolog of NCBI NO: 6006869 NR Description: putative cationic amino acid transporter
  misc_feature (1)..(430): Homolog of NCBI NO: 22330822 NR Description: putative cationic amino acid transporter
  misc_feature (1)..(442): Homolog of NCBI NO: 29244640 NR Description: putative cationic amino acid transporter
  misc_feature (1)..(445): Homolog of NCBI NO: 10178213 NR Description: cationic amino acid transporter-like protein
  misc_feature (1)..(445): Homolog of NCBI NO: 30693001 NR Description: cationic amino acid transporter -related protein
MGIKESTFAQGIVTAVNVCVLLFVIVAGSYLGFKTGWPGYELPTGFFPFGVDGMFAGSATVFFAFIGFDSVASTAEEVRNPQRDLPIGIGLALLLCCSLYMMVSIVIVGLIPYYAMDPDTPISSAFASHDMQWAVYLITLGAVMALCSALMGALLPQPRILMAMARDGLLPSIFSDINKRTQVPVKATVATGLCAATLAFFMDVSQLAGMVSVGTLLAFTMVAISVLILRYVPPDEQPLPSSLQERIDSVSFICGETTSSGHVGTSDSSHQPLIVNNDALVDVPLIKNQEALGCLVLSEETRRIVAGWSIMFTCVGAFLLSYAASSLSFPGLIRYPLCGVGGCLLLAGLIALSSIDQDDARHTFGHSGGYMCPFVPLLPIICILINMYLLVNLGSATWARVSVWLLIGVIVYVFYGRKNSSLANAVYVTTAHAEEIYREHEGSLA

SEQ ID NO: 44866 - protein, 392 aa, Arabidopsis thaliana
  peptide (1)..(392): Ceres Seq. ID no. 12559448
  misc_feature (189)..(367): Homolog of NCBI NO: 31211135 NR Description: ENSANGP00000016984 [Anopheles gambiae]
  misc_feature (1)..(189): Homolog of NCBI NO: 31211135 NR Description: ENSANGP00000016984 [Anopheles gambiae]
  misc_feature (1)..(371): Homolog of NCBI NO: 6981556 NR Description: solute carrier family 7 member A1 (amino acid
  misc_feature (1)..(371): Homolog of NCBI NO: 539952 NR Description: ecotropic retrovirus receptor - rat
  misc_feature (1)..(374): Homolog of NCBI NO: 37534696 NR Description: putative cationic amino acid transporter -like
  misc_feature (1)..(377): Homolog of NCBI NO: 6006869 NR Description: putative cationic amino acid transporter
  misc_feature (1)..(377): Homolog of NCBI NO: 22330822 NR Description: putative cationic amino acid transporter
  misc_feature (1)..(389): Homolog of NCBI NO: 29244640 NR Description: putative cationic amino acid transporter
  misc_feature (1)..(392): Homolog of NCBI NO: 10178213 NR Description: cationic amino acid transporter-like protein
  misc_feature (1)..(392): Homolog of NCBI NO: 30693001 NR Description: cationic amino acid transporter -related protein
MFAGSATVFFAFIGFDSVASTAEEVRNPQRDLPIGIGLALLLCCSLYMMVSIVIVGLIPYYAMDPDTPISSAFASHDMQWAVYLITLGAVMALCSALMGALLPQPRILMAMARDGLLPSIFSDINKRTQVPVKATVATGLCAATLAFFMDVSQLAGMVSVGTLLAFTMVAISVLILRYVPPDEQPLPSSLQERIDSVSFICGETTSSGHVGTSDSSHQPLIVNNDALVDVPLIKNQEALGCLVLSEETRRIVAGWSIMFTCVGAFLLSYAASSLSFPGLIRYPLCGVGGCLLLAGLIALSSIDQDDARHTFGHSGGYMCPFVPLLPIICILINMYLLVNLGSATWARVSVWLLIGVIVYVFYGRKNSSLANAVYVTTAHAEEIYREHEGSLA

SEQ ID NO: 44867 - DNA, 2019 bp, Arabidopsis thaliana
  misc_feature (1)..(2019): Ceres Seq. ID no. 13575547
  misc_feature: MA Experiment ID: 20000169 Result: Up-regulated in Transcription
  misc_feature: MA Experiment 20000169 PARAMETER Experiment Name: At_100uM_ABA_P Parameter: Age (day) Value: 14
  misc_feature: MA Experiment 20000169 PARAMETER Experiment Name: At_100uM_ABA_P Parameter: Organism Value: A. thaliana
  misc_feature: MA Experiment 20000169 PARAMETER Experiment Name: At_100uM_ABA_P Parameter: Plant Line Value: WS
  misc_feature: MA Experiment 20000169 PARAMETER Experiment Name: At_100uM_ABA_P Parameter: Timepoint (hr) Value: 6
  misc_feature: MA Experiment 20000169 PARAMETER Experiment Name: At_100uM_ABA_P Parameter: Tissue Value: Aerial
  misc_feature: MA Experiment 20000169 PARAMETER Experiment Name: At_100uM_ABA_P Parameter: Treatment Value: 100uM ABA vs. No Treatment
  misc_feature: MA Experiment ID: 20000171 Result: Down-regulated in Transcription
  misc_feature: MA Experiment 20000171 PARAMETER Experiment Name: At_42deg_Heat_P Parameter: Age (day) Value: 14
  misc_feature: MA Experiment 20000171 PARAMETER Experiment Name: At_42deg_Heat_P Parameter: Organism Value: A. thaliana
  misc_feature: MA Experiment 20000171 PARAMETER Experiment Name: At_42deg_Heat_P Parameter: Plant Line Value: WS
  misc_feature: MA Experiment 20000171 PARAMETER Experiment Name: At_42deg_Heat_P Parameter: Temperature (deg C) Value: 42 vs. 22
  misc_feature: MA Experiment 20000171 PARAMETER Experiment Name: At_42deg_Heat_P Parameter: Timepoint (hr) Value: 1
  misc_feature: MA Experiment 20000171 PARAMETER Experiment Name: At_42deg_Heat_P Parameter: Tissue Value: Aerial
  misc_feature: MA Experiment ID: 20000234 Result: Up-regulated in Transcription
  misc_feature: MA Experiment 20000234 PARAMETER Experiment Name: At_Siliques_P Parameter: Age (day) Value: 21
  misc_feature: MA Experiment 20000234 PARAMETER Experiment Name: At_Siliques_P Parameter: Organism Value: A. thaliana
  misc_feature: MA Experiment 20000234 PARAMETER Experiment Name: At_Siliques_P Parameter: Plant Line Value: WS
  misc_feature: MA Experiment 20000234 PARAMETER Experiment Name: At_Siliques_P Parameter: Tissue Value: Less Than 5mm Siliques vs. Whole Plant
  misc_feature: MA Experiment ID: 20000235 Result: Up-regulated in Transcription
  misc_feature: MA Experiment 20000235 PARAMETER Experiment Name: At_Siliques_P Parameter: Age (day) Value: 21
  misc_feature: MA Experiment 20000235 PARAMETER Experiment Name: At_Siliques_P Parameter: Organism Value: A. thaliana
  misc_feature: MA Experiment 20000235 PARAMETER Experiment Name: At_Siliques_P Parameter: Plant Line Value: WS
  misc_feature: MA Experiment 20000235 PARAMETER Experiment Name: At_Siliques_P Parameter: Tissue Value: 5-10mm Siliques vs. Whole Plant
  misc_feature: MA Experiment ID: 20000264 Result: Up-regulated in Transcription
  misc_feature: MA Experiment 20000264 PARAMETER Experiment Name: At_Open_Flower_P Parameter: Age (day) Value: 21
  misc_feature: MA Experiment 20000264 PARAMETER Experiment Name: At_Open_Flower_P Parameter: Plant Line Value: WS
  misc_feature: MA Experiment 20000264 PARAMETER Experiment Name: At_Open_Flower_P Parameter: Tissue Value: Open Flower vs. Whole Plant
  misc_feature: MA Experiment ID: 20000265 Result: Up-regulated in Transcription
  misc_feature: MA Experiment 20000265 PARAMETER Experiment Name: At_Open_Flower_P Parameter: Age (day) Value: 21
  misc_feature: MA Experiment 20000265 PARAMETER Experiment Name: At_Open_Flower_P Parameter: Plant Line Value: WS
  misc_feature: MA Experiment 20000265 PARAMETER Experiment Name: At_Open_Flower_P Parameter: Tissue Value: Closed Flower vs. Whole Plant
  misc_feature: MA Experiment ID: 20000267 Result: Up-regulated in Transcription
  misc_feature: MA Experiment 20000267 PARAMETER Experiment Name: At_Drought_P Parameter: Age (day) Value: 7
  misc_feature: MA Experiment 20000267 PARAMETER Experiment Name: At_Drought_P Parameter: Organism Value: A. thaliana
  misc_feature: MA Experiment 20000267 PARAMETER Experiment Name: At_Drought_P Parameter: Plant Line Value: WS
  misc_feature: MA Experiment 20000267 PARAMETER Experiment Name: At_Drought_P Parameter: Timepoint (hr) Value: 6
  misc_feature: MA Experiment 20000267 PARAMETER Experiment Name: At_Drought_P Parameter: Tissue Value: Whole Plant
  misc_feature: MA Experiment 20000267 PARAMETER Experiment Name: At_Drought_P Parameter: Treatment Value: Drought vs. No Drought
  misc_feature: MA Experiment ID: 20000268 Result: Up-regulated in Transcription
  misc_feature: MA Experiment 20000268 PARAMETER Experiment Name: At_100mM_NaCl__P Parameter: Age (day) Value: 14
  misc_feature: MA Experiment 20000268 PARAMETER Experiment Name: At_100mM_NaCl__P Parameter: Organism Value: A. thaliana
  misc_feature: MA Experiment 20000268 PARAMETER Experiment Name: At_100mM_NaCl__P Parameter: Plant Line Value: WS
  misc_feature: MA Experiment 20000268 PARAMETER Experiment Name: At_100mM_NaCl__P Parameter: Timepoint (hr) Value: 6
  misc_feature: MA Experiment 20000268 PARAMETER Experiment Name: At_100mM_NaCl__P Parameter: Tissue Value: Whole Plant
  misc_feature: MA Experiment 20000268 PARAMETER Experiment Name: At_100mM_NaCl__P Parameter: Treatment Value: 100mM NaCl vs. No Treatment
  misc_feature: MA Experiment ID: 20000286 Result: Up-regulated in Transcription
  misc_feature: MA Experiment 20000286 PARAMETER Experiment Name: At_Open_Flower_P Parameter: Age (day) Value: 21
  misc_feature: MA Experiment 20000286 PARAMETER Experiment Name: At_Open_Flower_P Parameter: Plant Line Value: WS
  misc_feature: MA Experiment 20000286 PARAMETER Experiment Name: At_Open_Flower_P Parameter: Tissue Value: Half Open vs. Whole Plant
  misc_feature: MA Experiment ID: 20000308 Result: Up-regulated in Transcription
  misc_feature: MA Experiment 20000308 PARAMETER Experiment Name: At_100mM_NaCl__P Parameter: Age (day) Value: 17
  misc_feature: MA Experiment 20000308 PARAMETER Experiment Name: At_100mM_NaCl__P Parameter: Organism Value: A. thaliana
  misc_feature: MA Experiment 20000308 PARAMETER Experiment Name: At_100mM_NaCl__P Parameter: Plant Line Value: WS
  misc_feature: MA Experiment 20000308 PARAMETER Experiment Name: At_100mM_NaCl__P Parameter: Timepoint (hr) Value: 72
  misc_feature: MA Experiment 20000308 PARAMETER Experiment Name: At_100mM_NaCl__P Parameter: Tissue Value: Whole Plant
  misc_feature: MA Experiment 20000308 PARAMETER Experiment Name: At_100mM_NaCl__P Parameter: Treatment Value: 100mM NaCl vs. No Treatment
  misc_feature: MA Experiment ID: 20000436 Result: Up-regulated in Transcription
  misc_feature: MA Experiment 20000436 PARAMETER Experiment Name: At_Drought_P Parameter: Age (day) Value: 7
  misc_feature: MA Experiment 20000436 PARAMETER Experiment Name: At_Drought_P Parameter: Organism Value: A. thaliana
  misc_feature: MA Experiment 20000436 PARAMETER Experiment Name: At_Drought_P Parameter: Plant Line Value: WS
  misc_feature: MA Experiment 20000436 PARAMETER Experiment Name: At_Drought_P Parameter: Timepoint (hr) Value: 12
  misc_feature: MA Experiment 20000436 PARAMETER Experiment Name: At_Drought_P Parameter: Tissue Value: Whole Plant
  misc_feature: MA Experiment 20000436 PARAMETER Experiment Name: At_Drought_P Parameter: Treatment Value: Drought vs. No Drought
  misc_feature: MA Experiment ID: 20000437 Result: Up-regulated in Transcription
  misc_feature: MA Experiment 20000437 PARAMETER Experiment Name: At_Drought_P Parameter: Age (day) Value: 8
  misc_feature: MA Experiment 20000437 PARAMETER Experiment Name: At_Drought_P Parameter: Organism Value: A. thaliana
  misc_feature: MA Experiment 20000437 PARAMETER Experiment Name: At_Drought_P Parameter: Plant Line Value: WS
  misc_feature: MA Experiment 20000437 PARAMETER Experiment Name: At_Drought_P Parameter: Timepoint (hr) Value: 24
  misc_feature: MA Experiment 20000437 PARAMETER Experiment Name: At_Drought_P Parameter: Tissue Value: Whole Plant
  misc_feature: MA Experiment 20000437 PARAMETER Experiment Name: At_Drought_P Parameter: Treatment Value: Drought vs. No Drought
  misc_feature: MA Experiment ID: 20000438 Result: Up-regulated in Transcription
  misc_feature: MA Experiment 20000438 PARAMETER Experiment Name: At_Shoots__P Parameter: Age (day) Value: 14
  misc_feature: MA Experiment 20000438 PARAMETER Experiment Name: At_Shoots__P Parameter: Tissue Value: Shoots vs. Whole Plant
  misc_feature: MA Experiment ID: 20000453 Result: Up-regulated in Transcription
  misc_feature: MA Experiment 20000453 PARAMETER Experiment Name: At_100uM_ABA_P Parameter: Age (day) Value: 15
  misc_feature: MA Experiment 20000453 PARAMETER Experiment Name: At_100uM_ABA_P Parameter: Organism Value: A. thaliana
  misc_feature: MA Experiment 20000453 PARAMETER Experiment Name: At_100uM_ABA_P Parameter: Plant Line Value: WS
  misc_feature: MA Experiment 20000453 PARAMETER Experiment Name: At_100uM_ABA_P Parameter: Timepoint (hr) Value: 24
  misc_feature: MA Experiment 20000453 PARAMETER Experiment Name: At_100uM_ABA_P Parameter: Tissue Value: Aerial
  misc_feature: MA Experiment 20000453 PARAMETER Experiment Name: At_100uM_ABA_P Parameter: Treatment Value: 100uM ABA vs. No Treatment
  misc_feature: MA Experiment ID: 20000460 Result: Up-regulated in Transcription
  misc_feature: MA Experiment 20000460 PARAMETER Experiment Name: At_10percent_PEG_P Parameter: Age (day) Value: 12
  misc_feature: MA Experiment 20000460 PARAMETER Experiment Name: At_10percent_PEG_P Parameter: Organism Value: A. thaliana
  misc_feature: MA Experiment 20000460 PARAMETER Experiment Name: At_10percent_PEG_P Parameter: Plant Line Value: WS
  misc_feature: MA Experiment 20000460 PARAMETER Experiment Name: At_10percent_PEG_P Parameter: Timepoint (day) Value: 12
  misc_feature: MA Experiment 20000460 PARAMETER Experiment Name: At_10percent_PEG_P Parameter: Tissue Value: Whole Plant
  misc_feature: MA Experiment 20000460 PARAMETER Experiment Name: At_10percent_PEG_P Parameter: Treatment Value: 10percent PEG vs. No Treatment
  misc_feature: MA Experiment ID: 20001451 Result: Down-regulated in Transcription
  misc_feature: MA Experiment 20001451 PARAMETER Experiment Name: At_Far-red-induction_P Parameter: Age (day) Value: 7
  misc_feature: MA Experiment 20001451 PARAMETER Experiment Name: At_Far-red-induction_P Parameter: Light Value: Far-red vs. White
  misc_feature: MA Experiment 20001451 PARAMETER Experiment Name: At_Far-red-induction_P Parameter: Organism Value: A. thaliana
  misc_feature: MA Experiment 20001451 PARAMETER Experiment Name: At_Far-red-induction_P Parameter: Plant Line Value: Columbia
  misc_feature: MA Experiment 20001451 PARAMETER Experiment Name: At_Far-red-induction_P Parameter: Timepoint (hr) Value: 24
  misc_feature: MA Experiment 20001451 PARAMETER Experiment Name: At_Far-red-induction_P Parameter: Tissue Value: Whole Plant
  misc_feature: MA Experiment ID: 20001554 Result: Up-regulated in Transcription
  misc_feature: MA Experiment 20001554 PARAMETER Experiment Name: At_Drought_Soil_Dry_P Parameter: Age (day) Value: 21
  misc_feature: MA Experiment 20001554 PARAMETER Experiment Name: At_Drought_Soil_Dry_P Parameter: Organism Value: A. thaliana
  misc_feature: MA Experiment 20001554 PARAMETER Experiment Name: At_Drought_Soil_Dry_P Parameter: Plant Line Value: WS
  misc_feature: MA Experiment 20001554 PARAMETER Experiment Name: At_Drought_Soil_Dry_P Parameter: Post Timepoint (hr) Value: None
  misc_feature: MA Experiment 20001554 PARAMETER Experiment Name: At_Drought_Soil_Dry_P Parameter: Post-Treatment Value: None
  misc_feature: MA Experiment 20001554 PARAMETER Experiment Name: At_Drought_Soil_Dry_P Parameter: Timepoint (day) Value: 7
  misc_feature: MA Experiment 20001554 PARAMETER Experiment Name: At_Drought_Soil_Dry_P Parameter: Treatment Value: Drought vs. No Drought
  misc_feature: MA Experiment ID: 20001555 Result: Up-regulated in Transcription
  misc_feature: MA Experiment 20001555 PARAMETER Experiment Name: At_Drought_Soil_Dry_P Parameter: Age (day) Value: 24
  misc_feature: MA Experiment 20001555 PARAMETER Experiment Name: At_Drought_Soil_Dry_P Parameter: Organism Value: A. thaliana
  misc_feature: MA Experiment 20001555 PARAMETER Experiment Name: At_Drought_Soil_Dry_P Parameter: Plant Line Value: WS
  misc_feature: MA Experiment 20001555 PARAMETER Experiment Name: At_Drought_Soil_Dry_P Parameter: Post Timepoint (hr) Value: None
  misc_feature: MA Experiment 20001555 PARAMETER Experiment Name: At_Drought_Soil_Dry_P Parameter: Post-Treatment Value: None
  misc_feature: MA Experiment 20001555 PARAMETER Experiment Name: At_Drought_Soil_Dry_P Parameter: Timepoint (day) Value: 10
  misc_feature: MA Experiment 20001555 PARAMETER Experiment Name: At_Drought_Soil_Dry_P Parameter: Treatment Value: Drought vs. No Drought
  misc_feature: MA Experiment ID: 20001556 Result: Up-regulated in Transcription
  misc_feature: MA Experiment 20001556 PARAMETER Experiment Name: At_Drought_Soil_Dry_P Parameter: Age (day) Value: 26
  misc_feature: MA Experiment 20001556 PARAMETER Experiment Name: At_Drought_Soil_Dry_P Parameter: Organism Value: A. thaliana
  misc_feature: MA Experiment 20001556 PARAMETER Experiment Name: At_Drought_Soil_Dry_P Parameter: Plant Line Value: WS
  misc_feature: MA Experiment 20001556 PARAMETER Experiment Name: At_Drought_Soil_Dry_P Parameter: Post Timepoint (hr) Value: None
  misc_feature: MA Experiment 20001556 PARAMETER Experiment Name: At_Drought_Soil_Dry_P Parameter: Post-Treatment Value: None
  misc_feature: MA Experiment 20001556 PARAMETER Experiment Name: At_Drought_Soil_Dry_P Parameter: Timepoint (day) Value: 12
  misc_feature: MA Experiment 20001556 PARAMETER Experiment Name: At_Drought_Soil_Dry_P Parameter: Treatment Value: Drought vs. No Drought
  misc_feature: MA Experiment ID: 20001557 Result: Up-regulated in Transcription
  misc_feature: MA Experiment 20001557 PARAMETER Experiment Name: At_Drought_Soil_Dry_P Parameter: Age (day) Value: 27
  misc_feature: MA Experiment 20001557 PARAMETER Experiment Name: At_Drought_Soil_Dry_P Parameter: Organism Value: A. thaliana
  misc_feature: MA Experiment 20001557 PARAMETER Experiment Name: At_Drought_Soil_Dry_P Parameter: Plant Line Value: WS
  misc_feature: MA Experiment 20001557 PARAMETER Experiment Name: At_Drought_Soil_Dry_P Parameter: Post Timepoint (hr) Value: 3
  misc_feature: MA Experiment 20001557 PARAMETER Experiment Name: At_Drought_Soil_Dry_P Parameter: Post-Treatment Value: Re-Water vs. No Drought
  misc_feature: MA Experiment 20001557 PARAMETER Experiment Name: At_Drought_Soil_Dry_P Parameter: Timepoint (day) Value: 13
  misc_feature: MA Experiment 20001557 PARAMETER Experiment Name: At_Drought_Soil_Dry_P Parameter: Treatment Value: Drought vs. No Drought
  misc_feature: MA Experiment ID: 20001558 Result: Up-regulated in Transcription
  misc_feature: MA Experiment 20001558 PARAMETER Experiment Name: At_Drought_Soil_Dry_P Parameter: Age (day) Value: 27
  misc_feature: MA Experiment 20001558 PARAMETER Experiment Name: At_Drought_Soil_Dry_P Parameter: Organism Value: A. thaliana
  misc_feature: MA Experiment 20001558 PARAMETER Experiment Name: At_Drought_Soil_Dry_P Parameter: Plant Line Value: WS
  misc_feature: MA Experiment 20001558 PARAMETER Experiment Name: At_Drought_Soil_Dry_P Parameter: Post Timepoint (hr) Value: 6
  misc_feature: MA Experiment 20001558 PARAMETER Experiment Name: At_Drought_Soil_Dry_P Parameter: Post-Treatment Value: Re-Water vs. No Drought
  misc_feature: MA Experiment 20001558 PARAMETER Experiment Name: At_Drought_Soil_Dry_P Parameter: Timepoint (day) Value: 13
  misc_feature: MA Experiment 20001558 PARAMETER Experiment Name: At_Drought_Soil_Dry_P Parameter: Treatment Value: Drought vs. No Drought
  misc_feature: MA Experiment ID: 20001559 Result: Up-regulated in Transcription
  misc_feature: MA Experiment 20001559 PARAMETER Experiment Name: At_Drought_Soil_Dry_P Parameter: Age (day) Value: 28
  misc_feature: MA Experiment 20001559 PARAMETER Experiment Name: At_Drought_Soil_Dry_P Parameter: Organism Value: A. thaliana
  misc_feature: MA Experiment 20001559 PARAMETER Experiment Name: At_Drought_Soil_Dry_P Parameter: Plant Line Value: WS
  misc_feature: MA Experiment 20001559 PARAMETER Experiment Name: At_Drought_Soil_Dry_P Parameter: Post Timepoint (hr) Value: 29
  misc_feature: MA Experiment 20001559 PARAMETER Experiment Name: At_Drought_Soil_Dry_P Parameter: Post-Treatment Value: Re-Water vs. No Drought
  misc_feature: MA Experiment 20001559 PARAMETER Experiment Name: At_Drought_Soil_Dry_P Parameter: Timepoint (day) Value: 14
  misc_feature: MA Experiment 20001559 PARAMETER Experiment Name: At_Drought_Soil_Dry_P Parameter: Treatment Value: Drought vs. No Drought
  misc_feature: MA Experiment ID: 20001905 Result: Up-regulated in Transcription
  misc_feature: MA Experiment 20001905 PARAMETER Experiment Name: At_Drought_Reproduction_P Parameter: Age (day) Value: 40
  misc_feature: MA Experiment 20001905 PARAMETER Experiment Name: At_Drought_Reproduction_P Parameter: Organism Value: A. thaliana
  misc_feature: MA Experiment 20001905 PARAMETER Experiment Name: At_Drought_Reproduction_P Parameter: Plant Line Value: WS
  misc_feature: MA Experiment 20001905 PARAMETER Experiment Name: At_Drought_Reproduction_P Parameter: Timepoint (day) Value: 10
  misc_feature: MA Experiment 20001905 PARAMETER Experiment Name: At_Drought_Reproduction_P Parameter: Tissue Value: Rosettes
  misc_feature: MA Experiment 20001905 PARAMETER Experiment Name: At_Drought_Reproduction_P Parameter: Treatment Value: Drought vs. No Drought
  misc_feature: MA Experiment ID: 20001906 Result: Up-regulated in Transcription
  misc_feature: MA Experiment 20001906 PARAMETER Experiment Name: At_Drought_Reproduction_P Parameter: Age (day) Value: 35
  misc_feature: MA Experiment 20001906 PARAMETER Experiment Name: At_Drought_Reproduction_P Parameter: Organism Value: A. thaliana
  misc_feature: MA Experiment 20001906 PARAMETER Experiment Name: At_Drought_Reproduction_P Parameter: Plant Line Value: WS
  misc_feature: MA Experiment 20001906 PARAMETER Experiment Name: At_Drought_Reproduction_P Parameter: Timepoint (day) Value: 5
  misc_feature: MA Experiment 20001906 PARAMETER Experiment Name: At_Drought_Reproduction_P Parameter: Tissue Value: Siliques
  misc_feature: MA Experiment 20001906 PARAMETER Experiment Name: At_Drought_Reproduction_P Parameter: Treatment Value: Drought vs. No Drought
  misc_feature: MA Experiment ID: 20001907 Result: Up-regulated in Transcription
  misc_feature: MA Experiment 20001907 PARAMETER Experiment Name: At_Drought_Reproduction_P Parameter: Age (day) Value: 37
  misc_feature: MA Experiment 20001907 PARAMETER Experiment Name: At_Drought_Reproduction_P Parameter: Organism Value: A. thaliana
  misc_feature: MA Experiment 20001907 PARAMETER Experiment Name: At_Drought_Reproduction_P Parameter: Plant Line Value: WS
  misc_feature: MA Experiment 20001907 PARAMETER Experiment Name: At_Drought_Reproduction_P Parameter: Timepoint (day) Value: 7
  misc_feature: MA Experiment 20001907 PARAMETER Experiment Name: At_Drought_Reproduction_P Parameter: Tissue Value: Siliques
  misc_feature: MA Experiment 20001907 PARAMETER Experiment Name: At_Drought_Reproduction_P Parameter: Treatment Value: Drought vs. No Drought
  misc_feature: MA Experiment ID: 20001911 Result: Up-regulated in Transcription
  misc_feature: MA Experiment 20001911 PARAMETER Experiment Name: At_Drought_Reproduction_P Parameter: Age (day) Value: 40
  misc_feature: MA Experiment 20001911 PARAMETER Experiment Name: At_Drought_Reproduction_P Parameter: Organism Value: A. thaliana
  misc_feature: MA Experiment 20001911 PARAMETER Experiment Name: At_Drought_Reproduction_P Parameter: Plant Line Value: WS
  misc_feature: MA Experiment 20001911 PARAMETER Experiment Name: At_Drought_Reproduction_P Parameter: Timepoint (day) Value: 10
  misc_feature: MA Experiment 20001911 PARAMETER Experiment Name: At_Drought_Reproduction_P Parameter: Tissue Value: Flowers
  misc_feature: MA Experiment 20001911 PARAMETER Experiment Name: At_Drought_Reproduction_P Parameter: Treatment Value: Drought vs. No Drought
gaacaaaaaagtatactttctcgtggggcgatcacaggacaaaaccagaaaaagtaacagcttcctccgtcaactacgcacttcactgattcagtcttcgatttcaaacgatcaacaaacatttttatcataatcataatcagaaaaaagtgttaaactttctcctaaaaagatggattcttcttactcctttgccttggggacaagtagttctattttgccaaaactcagtttcaggaatgtagagaacagattttatggtgagaagaacaacaacaatggtttgtgtaaacgttttggatcagatttgggctccaagaagtttaggaatcaaaagttcaagcacggtgttgtttacgctgttgccacttcagataatccaaaaaaggctatgacagtaaagacttccatgtttgagagaagaaaggtagacccgcaaaatgtggctgcaatcattctaggaggaggcaatggagctaaactcttccctcttacaatgagagccgcaacaccagctgttcctgttggtggatgctacaggctgatcgatatcccgatgagtaactgtattaacagctgcatcaacaagatatttgtgctgacacagttcaactcagcttcccttaatcgacatttagcacgaacttattttgggaatggcataaactttggaggtggtttcgtagaggttcttgctgctacacaaacaccaggggaagctgggaagaagtggtttcaaggaacagcagatgctgtcagaaaattcctctgggtgtttgaggatgccaagaacaggaacattgagaacatacttattttgtctggagatcatctctatagaatgaactacatggactttgttcagtctcatgtggatagtaatgcggatattactctttcgtgtgcaccagttagtgaaagccgtgcatcaaattttggtctagtaaagattgatcgaggtgggcgtgtaatccatttctccgagaaaccaacaggagtcgacctgaaatcaatgcaaacagacacaacaatgcttggactgtctcatcaagaagcaacagattctccatacattgcatcaatgggagtttattgtttcaaaaccgaagctttgctgaaccttctaacaagacagtatccgagttccaatgactttggatctgaagttattcctgcagccataagagatcacgatgttcaaggatacatattcagagattactgggaggatattggaactataaagacattttatgaggctaatttagctcttgttgaggagcgaccaaagtttgaattctatgatccagaaactccgttctacacttctcctcggttcctcccaccaacaaaagctgagaaatgtcggatggtagattcaataatctcacatggatgtttcctgcgagaatgcagcgtccaacgttcaatcattggtgaacgatcacgtctagactacggggttgagcttcaggatacattgatgttaggtgcagattactaccaaactgagtctgagattgcatctctattagcagaaggaaaggttccaattggtattggtaaagacacaaaaatcaggaaatgcatcattgacaagaatgctaagatcggtaaaaacgtgatcatcatgaacaaaggcgatgtacaagaagcagataggccagaggaaggattctacattcgatcaggaatcactgtgatagtcgaaaaggcgacaattcaagatggtactgtaatatgaatggagagcttgaaagtaagtccaccgagcaacaatctgagattaaaaagcattttagctagccggtgaatgaaaatagaaagcttcgatcttttctttcccgcagtgcatctacaactagaagaactcaaatttagagatatagatttagagaacaataagaaacacagtcaagtattgatcagtgctccggccgagcagtctttctctcttttcaccttttgtatttaggaatctttgctgattctctttataatattattcaaaaaataagc

SEQ ID NO: 44868 - protein, 523 aa, Arabidopsis thaliana
  peptide (1)..(523): Ceres Seq. ID no. 13575548
  misc_feature (92)..(370): Pfam Name: Nucleotidyl transferase Pfam Description: Nucleotidyl transferase
  misc_feature (54)..(523): Homolog of NCBI NO: 7434886 NR Description: glucose-1-phosphate adenylyltransferase (EC
  misc_feature (21)..(523): Homolog of NCBI NO: 7434880 NR Description: glucose-1-phosphate adenylyltransferase (EC
  misc_feature (25)..(523): Homolog of NCBI NO: 5917791 NR Description: ADP-glucose pyrophosphorylase large subunit
  misc_feature (25)..(523): Homolog of NCBI NO: 7434869 NR Description: glucose-1-phosphate adenylyltransferase (EC
  misc_feature (55)..(523): Homolog of NCBI NO: 232166 NR Description: Glucose-1-phosphate adenylyltransferase large
  misc_feature (21)..(523): Homolog of NCBI NO: 7434884 NR Description: glucose-1-phosphate adenylyltransferase (EC
  misc_feature (21)..(523): Homolog of NCBI NO: 29421114 NR Description: ADP-glucose pyrophosphorylase large subunit
  misc_feature (21)..(523): Homolog of NCBI NO: 5923897 NR Description: ADP-glucose pyrophosphorylase large subunit
  misc_feature (1)..(523): Homolog of NCBI NO: 15234972 NR Description: glucose-1-phosphate adenylyltransferase, large
  misc_feature (1)..(523): Homolog of NCBI NO: 15226593 NR Description: glucose-1-phosphate adenylyltransferase, large
MDSSYSFALGTSSSILPKLSFRNVENRFYGEKNNNNGLCKRFGSDLGSKKFRNQKFKHGVVYAVATSDNPKKAMTVKTSMFERRKVDPQNVAAIILGGGNGAKLFPLTMRAATPAVPVGGCYRLIDIPMSNCINSCINKIFVLTQFNSASLNRHLARTYFGNGINFGGGFVEVLAATQTPGEAGKKWFQGTADAVRKFLWVFEDAKNRNIENILILSGDHLYRMNYMDFVQSHVDSNADITLSCAPVSESRASNFGLVKIDRGGRVIHFSEKPTGVDLKSMQTDTTMLGLSHQEATDSPYIASMGVYCFKTEALLNLLTRQYPSSNDFGSEVIPAAIRDHDVQGYIFRDYWEDIGTIKTFYEANLALVEERPKFEFYDPETPFYTSPRFLPPTKAEKCRMVDSIISHGCFLRECSVQRSIIGERSRLDYGVELQDTLMLGADYYQTESEIASLLAEGKVPIGIGKDTKIRKCIIDKNAKIGKNVIIMNKGDVQEADRPEEGFYIRSGITVIVEKATIQDGTVI

SEQ ID NO: 44869 - protein, 450 aa, Arabidopsis thaliana
  peptide (1)..(450): Ceres Seq. ID no. 13575549
  misc_feature (19)..(297): Pfam Name: Nucleotidyl transferase Pfam Description: Nucleotidyl transferase
  misc_feature (1)..(450): Homolog of NCBI NO: 7434886 NR Description: glucose-1-phosphate adenylyltransferase (EC
  misc_feature (1)..(450): Homolog of NCBI NO: 7434880 NR Description: glucose-1-phosphate adenylyltransferase (EC
  misc_feature (1)..(450): Homolog of NCBI NO: 5917791 NR Description: ADP-glucose pyrophosphorylase large subunit
  misc_feature (1)..(450): Homolog of NCBI NO: 7434869 NR Description: glucose-1-phosphate adenylyltransferase (EC
  misc_feature (1)..(450): Homolog of NCBI NO: 232166 NR Description: Glucose-1-phosphate adenylyltransferase large
  misc_feature (1)..(450): Homolog of NCBI NO: 7434884 NR Description: glucose-1-phosphate adenylyltransferase (EC
  misc_feature (1)..(450): Homolog of NCBI NO: 29421114 NR Description: ADP-glucose pyrophosphorylase large subunit
  misc_feature (1)..(450): Homolog of NCBI NO: 5923897 NR Description: ADP-glucose pyrophosphorylase large subunit
  misc_feature (1)..(450): Homolog of NCBI NO: 15234972 NR Description: glucose-1-phosphate adenylyltransferase, large
  misc_feature (1)..(450): Homolog of NCBI NO: 15226593 NR Description: glucose-1-phosphate adenylyltransferase, large
MTVKTSMFERRKVDPQNVAAIILGGGNGAKLFPLTMRAATPAVPVGGCYRLIDIPMSNCINSCINKIFVLTQFNSASLNRHLARTYFGNGINFGGGFVEVLAATQTPGEAGKKWFQGTADAVRKFLWVFEDAKNRNIENILILSGDHLYRMNYMDFVQSHVDSNADITLSCAPVSESRASNFGLVKIDRGGRVIHFSEKPTGVDLKSMQTDTTMLGLSHQEATDSPYIASMGVYCFKTEALLNLLTRQYPSSNDFGSEVIPAAIRDHDVQGYIFRDYWEDIGTIKTFYEANLALVEERPKFEFYDPETPFYTSPRFLPPTKAEKCRMVDSIISHGCFLRECSVQRSIIGERSRLDYGVELQDTLMLGADYYQTESEIASLLAEGKVPIGIGKDTKIRKCIIDKNAKIGKNVIIMNKGDVQEADRPEEGFYIRSGITVIVEKATIQDGTVI

SEQ ID NO: 44870 - protein, 444 aa, Arabidopsis thaliana
  peptide (1)..(444): Ceres Seq. ID no. 13575550
  misc_feature (13)..(291): Pfam Name: Nucleotidyl transferase Pfam Description: Nucleotidyl transferase
  misc_feature (1)..(444): Homolog of NCBI NO: 7434886 NR Description: glucose-1-phosphate adenylyltransferase (EC
  misc_feature (1)..(444): Homolog of NCBI NO: 7434880 NR Description: glucose-1-phosphate adenylyltransferase (EC
  misc_feature (1)..(444): Homolog of NCBI NO: 5917791 NR Description: ADP-glucose pyrophosphorylase large subunit
  misc_feature (1)..(444): Homolog of NCBI NO: 7434869 NR Description: glucose-1-phosphate adenylyltransferase (EC
  misc_feature (1)..(444): Homolog of NCBI NO: 232166 NR Description: Glucose-1-phosphate adenylyltransferase large
  misc_feature (1)..(444): Homolog of NCBI NO: 7434884 NR Description: glucose-1-phosphate adenylyltransferase (EC
  misc_feature (1)..(444): Homolog of NCBI NO: 29421114 NR Description: ADP-glucose pyrophosphorylase large subunit
  misc_feature (1)..(444): Homolog of NCBI NO: 5923897 NR Description: ADP-glucose pyrophosphorylase large subunit
  misc_feature (1)..(444): Homolog of NCBI NO: 15234972 NR Description: glucose-1-phosphate adenylyltransferase, large
  misc_feature (1)..(444): Homolog of NCBI NO: 15226593 NR Description: glucose-1-phosphate adenylyltransferase, large
MFERRKVDPQNVAAIILGGGNGAKLFPLTMRAATPAVPVGGCYRLIDIPMSNCINSCINKIFVLTQFNSASLNRHLARTYFGNGINFGGGFVEVLAATQTPGEAGKKWFQGTADAVRKFLWVFEDAKNRNIENILILSGDHLYRMNYMDFVQSHVDSNADITLSCAPVSESRASNFGLVKIDRGGRVIHFSEKPTGVDLKSMQTDTTMLGLSHQEATDSPYIASMGVYCFKTEALLNLLTRQYPSSNDFGSEVIPAAIRDHDVQGYIFRDYWEDIGTIKTFYEANLALVEERPKFEFYDPETPFYTSPRFLPPTKAEKCRMVDSIISHGCFLRECSVQRSIIGERSRLDYGVELQDTLMLGADYYQTESEIASLLAEGKVPIGIGKDTKIRKCIIDKNAKIGKNVIIMNKGDVQEADRPEEGFYIRSGITVIVEKATIQDGTVI

SEQ ID NO: 44871 - DNA, 3561 bp, Arabidopsis thaliana
  misc_feature (1)..(3561): Ceres Seq. ID no. 12639063
  misc_feature: MA Experiment ID: 20000307 Result: Up-regulated in Transcription
  misc_feature: MA Experiment 20000307 PARAMETER Experiment Name: At_Germinating_Seeds_Sub_P Parameter: Age (hr) Value: 24 vs. 0
  misc_feature: MA Experiment 20000307 PARAMETER Experiment Name: At_Germinating_Seeds_Sub_P Parameter: Organism Value: A. thaliana
  misc_feature: MA Experiment 20000307 PARAMETER Experiment Name: At_Germinating_Seeds_Sub_P Parameter: Plant Line Value: WS
  misc_feature: MA Experiment 20000307 PARAMETER Experiment Name: At_Germinating_Seeds_Sub_P Parameter: Tissue Value: Germinating Seeds
  misc_feature: MA Experiment ID: 20000440 Result: Up-regulated in Transcription
  misc_feature: MA Experiment 20000440 PARAMETER Experiment Name: At_Closed-Flower__Sub_P Parameter: Tissue Value: Closed Flower vs. Whole Plant
atgagctttctttagcgcggcagtttccaagtcggagaaggctaataataataaatggaatgagagagcagagggaaggaggattttgccagattgcaaaaatctcacaacgatgacggtgcagaaaacgccattaacaacgattacaagagctgttgtgcatttccgattattgaaaggctgatttgtccacgaagagagagagagatactaggagaaattcgtcgcttcccctggatctccttcttggggtttatactttatagggcatccggagctacgcacgtcctctgaggtaggtaggtgtctttgaaacaaggacgaataattcactgcacatgtgattccttgagagagccagatcgaactttctacagaagaggctgtgatatatcatcttcttaagtcctcccctcttcttcttcttcttctaaggtagggtagaagatgactacagaagatgatgatcagatgctaggaccaagcggcacccaggaaaagatctatgtttctgttcgtatgcgacctttaaacgacaaggaaaagtttaggaatgatgtccctgactgggagtgcatcaacaatactaccatcatttacaggagtcatctttctatctccgagcgttccatgtatccttctgcttacacatttgacagagtgtttagccctgagtgttgtacaaggcaggtgtatgaacaaggggcaaaggaagtcgctttctctgttgtcagtggcgttaatgctagtgtattcgcatatgggcaaacaagcagtggaaagacgtacactatgagcggaattactgactgcgccttggttgatatatatggctacattgacaagcacaaggaaagagaattcattcttaagttctctgctatggagatctacaatgagtctgtaagagatctcttaagtacagatactagtccactcagacttttagatgaccctgagaaagggacagttgttgagaaactcacagaggaaactctgcgagactggaatcatttcaaggagctcctatctgtctgcaaagcacaaaggcaaattggtgagacagctctaaatgaagttagctcccggtctcatcagattttgagattgacagtagaaagcatagctcgtgaattttctaccaatgataagtttagtactctaacagcgacagtgaacttcattgatcttgctggaagtgaacgtgcgtctcaatcattatcagccggcacaaggttaaaagaaggttgtcatataaaccgaagtttgttaacactgggaactgtgatccgtaagctaagtaaagaaaaaactgggcacattccattcagagattcaaaactgacacgcatacttcagtcttctttgggaggaaatgcaagaactgccataatttgcactatgagtcctgcgagaatccatgttgaacaatcaagaaacacactgttatttgcaagctgcgcaaaggaggtgacaacaaatgcacaagtcaatgttgtcatgtctgataaagctttagtaaagcacttgcagagggagttggctaaactggaaagtgagttgagaagccctagtcaggcttcaattgtttctgacacaactgcattactgacggagaaagaccttgaggttgaaaagcttaagaaagaggtattccaactagcacaacaactagagcaagctcgttccgagattaaggatcttcgacgaatggttgaagaagaaaaaaaccaagaaaaagagacgctatcaacagaaacagaagggttaaatgttctgatggaacatcaataccccaagctgcgggtgcgcaggacatgggactctgagaatacaacaccactgagccctatatcagctcaccgttccagtatatctccacgatcaactgaatatagttatgaagagaatgtctttcagctatcagatttcaggatagattctgcatcaagtagtccgcaacagcttgcgtttgtaactcctttccttaaggttccacttgatgatattcacgtgacagatactgtagaccaatctcatgttcacaaagaggaagctatagaagaacctcatgttcaggaggaacggttttatgaaatggctgaacacactgacggaaattctgaggataactgcagggaagttcggtgcatagaaacagagaagtcagatattagtataggtccagtggaaaatatgccggagagcagtccagacaaatacgaggctgtaactgcagaagaaccagtatctgtgacagagccaaagaacttacaacatccgacagaagaagcagtatgtgtgacagagacaaagaacttacaacatcccacagaagctgaaaacgaagaagaagaagaagaagaaagagtaaaggaagtcagtggtgcttctcctgaaccaaaacaagaaagcaacctcacaaaaaatcctgcattgtgtgatttggaatgttcacctgatgagtttgatacaagcatgtctaacctgagtagaatctcaacacctccagcccttatcactccctctcctgaaaagcctttctcttggattatggagagagattcacaacttttcagaggaatgaagctgactagaagtcgaagctgccgaccaagcttattatcgagcccttcctcctcttggttagagaaagatgctgatacaccgccaagctggtacgacaaagaatttatcaaaacagctgagagaaacttgacaatgtgcgacatcaagaaccagagattgttgcaggatgagtttagtgggaggagcatgccaacaacttggttcgagagaagcttgagtgacactcaaacggtggatgctgcttcacatggtgtcagcaacgaaatgtcgccaaatgaatcaccatttcggccatctgatgcttctgtgtttgagctccagacaagtggtagagcttcaataagccaggacagaacagaggagactgctgctcaaaaagacaagcaaatcattcatcgatcgatggaggaaagggaacagaagttcttggcctcgaattcaacgaagagtttcaaggacgcagcaatggacccaatacaagactacttagacacggccttgaattggccagtggagttcaagaggctacagagggagataatagagctatggcacgtgtgtaaagtctcaatggcacacagaagctacttcttccttctgttcagaggagatcagaaagattgcttgtacttggaggtagagctccgtagacttaagtacatcagagaatctttcgcccaaaatagcaacgatggcaacaatatgaccctaatctcctgcacgagggcattgacgagggagaggtataagctgagcaagctgatgcagaggaaactgtcgaaagaagagagagagaacttgttcttgagatggggcattgggctcaacacgaatcacagacgggtccagctggcgcgtcgtctctggtcggattacaaagacatgggtcatgtccgagagagcgcctccctcgttggtaagctcaatgggcatggaaatggaaaatcagattttgatgaaaccaacctctaa

SEQ ID NO: 44872 - protein, 1037 aa, Arabidopsis thaliana
  peptide (1)..(1037): Ceres Seq. ID no. 12639064
  misc_feature (16)..(431): Homolog of NCBI NO: 22329653 NR Description: kinesin heavy chain isolog, putative
  misc_feature (825)..(1036): Homolog of NCBI NO: 34914660 NR Description: putative kinesin [Oryza sativa (japonica
  misc_feature (16)..(427): Homolog of NCBI NO: 34914660 NR Description: putative kinesin [Oryza sativa (japonica
  misc_feature (886)..(1022): Homolog of NCBI NO: 15234898 NR Description: kinesin like protein; protein id: At4g38950.1
  misc_feature (12)..(424): Homolog of NCBI NO: 15234898 NR Description: kinesin like protein; protein id: At4g38950.1
  misc_feature (864)..(1024): Homolog of NCBI NO: 15208467 NR Description: kinesin heavy chain [Zea mays]
  misc_feature (25)..(562): Homolog of NCBI NO: 15208467 NR Description: kinesin heavy chain [Zea mays]
  misc_feature (6)..(673): Homolog of NCBI NO: 30693419 NR Description: expressed protein [Arabidopsis thaliana]
  misc_feature (1)..(425): Homolog of NCBI NO: 13937153 NR Description: AT5g66310/K1L20_9 [Arabidopsis thaliana]
  misc_feature (6)..(673): Homolog of NCBI NO: 11357626 NR Description: hypothetical protein F24M12.190 - Arabidopsis
  misc_feature (16)..(431): Homolog of NCBI NO: 22329653 NR Description: kinesin heavy chain isolog, putative
  misc_feature (825)..(1036): Homolog of NCBI NO: 34914660 NR Description: putative kinesin [Oryza sativa (japonica
  misc_feature (16)..(427): Homolog of NCBI NO: 34914660 NR Description: putative kinesin [Oryza sativa (japonica
  misc_feature (886)..(1022): Homolog of NCBI NO: 15234898 NR Description: kinesin like protein; protein id: At4g38950.1
  misc_feature (12)..(424): Homolog of NCBI NO: 15234898 NR Description: kinesin like protein; protein id: At4g38950.1
  misc_feature (864)..(1024): Homolog of NCBI NO: 15208467 NR Description: kinesin heavy chain [Zea mays]
  misc_feature (25)..(562): Homolog of NCBI NO: 15208467 NR Description: kinesin heavy chain [Zea mays]
  misc_feature (6)..(673): Homolog of NCBI NO: 30693419 NR Description: expressed protein [Arabidopsis thaliana]
  misc_feature (1)..(425): Homolog of NCBI NO: 13937153 NR Description: AT5g66310/K1L20_9 [Arabidopsis thaliana]
  misc_feature (6)..(673): Homolog of NCBI NO: 11357626 NR Description: hypothetical protein F24M12.190 - Arabidopsis
MTTEDDDQMLGPSGTQEKIYVSVRMRPLNDKEKFRNDVPDWECINNTTIIYRSHLSISERSMYPSAYTFDRVFSPECCTRQVYEQGAKEVAFSVVSGVNASVFAYGQTSSGKTYTMSGITDCALVDIYGYIDKHKEREFILKFSAMEIYNESVRDLLSTDTSPLRLLDDPEKGTVVEKLTEETLRDWNHFKELLSVCKAQRQIGETALNEVSSRSHQILRLTVESIAREFSTNDKFSTLTATVNFIDLAGSERASQSLSAGTRLKEGCHINRSLLTLGTVIRKLSKEKTGHIPFRDSKLTRILQSSLGGNARTAIICTMSPARIHVEQSRNTLLFASCAKEVTTNAQVNVVMSDKALVKHLQRELAKLESELRSPSQASIVSDTTALLTEKDLEVEKLKKEVFQLAQQLEQARSEIKDLRRMVEEEKNQEKETLSTETEGLNVLMEHQYPKLRVRRTWDSENTTPLSPISAHRSSISPRSTEYSYEENVFQLSDFRIDSASSSPQQLAFVTPFLKVPLDDIHVTDTVDQSHVHKEEAIEEPHVQEERFYEMAEHTDGNSEDNCREVRCIETEKSDISIGPVENMPESSPDKYEAVTAEEPVSVTEPKNLQHPTEEAVCVTETKNLQHPTEAENEEEEEEERVKEVSGASPEPKQESNLTKNPALCDLECSPDEFDTSMSNLSRISTPPALITPSPEKPFSWIMERDSQLFRGMKLTRSRSCRPSLLSSPSSSWLEKDADTPPSWYDKEFIKTAERNLTMCDIKNQRLLQDEFSGRSMPTTWFERSLSDTQTVDAASHGVSNEMSPNESPFRPSDASVFELQTSGRASISQDRTEETAAQKDKQIIHRSMEEREQKFLASNSTKSFKDAAMDPIQDYLDTALNWPVEFKRLQREIIELWHVCKVSMAHRSYFFLLFRGDQKDCLYLEVELRRLKYIRESFAQNSNDGNNMTLISCTRALTRERYKLSKLMQRKLSKEERENLFLRWGIGLNTNHRRVQLARRLWSDYKDMGHVRESASLVGKLNGHGNGKSDFDETNL

SEQ ID NO: 44873 - protein, 1029 aa, Arabidopsis thaliana
  peptide (1)..(1029): Ceres Seq. ID no. 12639065
  misc_feature (8)..(423): Homolog of NCBI NO: 22329653 NR Description: kinesin heavy chain isolog, putative
  misc_feature (817)..(1028): Homolog of NCBI NO: 34914660 NR Description: putative kinesin [Oryza sativa (japonica
  misc_feature (8)..(419): Homolog of NCBI NO: 34914660 NR Description: putative kinesin [Oryza sativa (japonica
  misc_feature (878)..(1014): Homolog of NCBI NO: 15234898 NR Description: kinesin like protein; protein id: At4g38950.1
  misc_feature (4)..(416): Homolog of NCBI NO: 15234898 NR Description: kinesin like protein; protein id: At4g38950.1
  misc_feature (856)..(1016): Homolog of NCBI NO: 15208467 NR Description: kinesin heavy chain [Zea mays]
  misc_feature (17)..(554): Homolog of NCBI NO: 15208467 NR Description: kinesin heavy chain [Zea mays]
  misc_feature (1)..(665): Homolog of NCBI NO: 30693419 NR Description: expressed protein [Arabidopsis thaliana]
  misc_feature (1)..(417): Homolog of NCBI NO: 13937153 NR Description: AT5g66310/K1L20_9 [Arabidopsis thaliana]
  misc_feature (1)..(665): Homolog of NCBI NO: 11357626 NR Description: hypothetical protein F24M12.190 - Arabidopsis
  misc_feature (8)..(423): Homolog of NCBI NO: 22329653 NR Description: kinesin heavy chain isolog, putative
  misc_feature (817)..(1028): Homolog of NCBI NO: 34914660 NR Description: putative kinesin [Oryza sativa (japonica
  misc_feature (8)..(419): Homolog of NCBI NO: 34914660 NR Description: putative kinesin [Oryza sativa (japonica
  misc_feature (878)..(1014): Homolog of NCBI NO: 15234898 NR Description: kinesin like protein; protein id: At4g38950.1
  misc_feature (4)..(416): Homolog of NCBI NO: 15234898 NR Description: kinesin like protein; protein id: At4g38950.1
  misc_feature (856)..(1016): Homolog of NCBI NO: 15208467 NR Description: kinesin heavy chain [Zea mays]
  misc_feature (17)..(554): Homolog of NCBI NO: 15208467 NR Description: kinesin heavy chain [Zea mays]
  misc_feature (1)..(665): Homolog of NCBI NO: 30693419 NR Description: expressed protein [Arabidopsis thaliana]
  misc_feature (1)..(417): Homolog of NCBI NO: 13937153 NR Description: AT5g66310/K1L20_9 [Arabidopsis thaliana]
  misc_feature (1)..(665): Homolog of NCBI NO: 11357626 NR Description: hypothetical protein F24M12.190 - Arabidopsis
MLGPSGTQEKIYVSVRMRPLNDKEKFRNDVPDWECINNTTIIYRSHLSISERSMYPSAYTFDRVFSPECCTRQVYEQGAKEVAFSVVSGVNASVFAYGQTSSGKTYTMSGITDCALVDIYGYIDKHKEREFILKFSAMEIYNESVRDLLSTDTSPLRLLDDPEKGTVVEKLTEETLRDWNHFKELLSVCKAQRQIGETALNEVSSRSHQILRLTVESIAREFSTNDKFSTLTATVNFIDLAGSERASQSLSAGTRLKEGCHINRSLLTLGTVIRKLSKEKTGHIPFRDSKLTRILQSSLGGNARTAIICTMSPARIHVEQSRNTLLFASCAKEVTTNAQVNVVMSDKALVKHLQRELAKLESELRSPSQASIVSDTTALLTEKDLEVEKLKKEVFQLAQQLEQARSEIKDLRRMVEEEKNQEKETLSTETEGLNVLMEHQYPKLRVRRTWDSENTTPLSPISAHRSSISPRSTEYSYEENVFQLSDFRIDSASSSPQQLAFVTPFLKVPLDDIHVTDTVDQSHVHKEEAIEEPHVQEERFYEMAEHTDGNSEDNCREVRCIETEKSDISIGPVENMPESSPDKYEAVTAEEPVSVTEPKNLQHPTEEAVCVTETKNLQHPTEAENEEEEEEERVKEVSGASPEPKQESNLTKNPALCDLECSPDEFDTSMSNLSRISTPPALITPSPEKPFSWIMERDSQLFRGMKLTRSRSCRPSLLSSPSSSWLEKDADTPPSWYDKEFIKTAERNLTMCDIKNQRLLQDEFSGRSMPTTWFERSLSDTQTVDAASHGVSNEMSPNESPFRPSDASVFELQTSGRASISQDRTEETAAQKDKQIIHRSMEEREQKFLASNSTKSFKDAAMDPIQDYLDTALNWPVEFKRLQREIIELWHVCKVSMAHRSYFFLLFRGDQKDCLYLEVELRRLKYIRESFAQNSNDGNNMTLISCTRALTRERYKLSKLMQRKLSKEERENLFLRWGIGLNTNHRRVQLARRLWSDYKDMGHVRESASLVGKLNGHGNGKSDFDETNL

SEQ ID NO: 44874 - protein, 1013 aa, Arabidopsis thaliana
  peptide (1)..(1013): Ceres Seq. ID no. 12639066
  misc_feature (1)..(407): Homolog of NCBI NO: 22329653 NR Description: kinesin heavy chain isolog, putative
  misc_feature (801)..(1012): Homolog of NCBI NO: 34914660 NR Description: putative kinesin [Oryza sativa (japonica
  misc_feature (1)..(403): Homolog of NCBI NO: 34914660 NR Description: putative kinesin [Oryza sativa (japonica
  misc_feature (862)..(998): Homolog of NCBI NO: 15234898 NR Description: kinesin like protein; protein id: At4g38950.1
  misc_feature (1)..(400): Homolog of NCBI NO: 15234898 NR Description: kinesin like protein; protein id: At4g38950.1
  misc_feature (840)..(1000): Homolog of NCBI NO: 15208467 NR Description: kinesin heavy chain [Zea mays]
  misc_feature (1)..(538): Homolog of NCBI NO: 15208467 NR Description: kinesin heavy chain [Zea mays]
  misc_feature (1)..(649): Homolog of NCBI NO: 30693419 NR Description: expressed protein [Arabidopsis thaliana]
  misc_feature (1)..(401): Homolog of NCBI NO: 13937153 NR Description: AT5g66310/K1L20_9 [Arabidopsis thaliana]
  misc_feature (1)..(649): Homolog of NCBI NO: 11357626 NR Description: hypothetical protein F24M12.190 - Arabidopsis
  misc_feature (1)..(407): Homolog of NCBI NO: 22329653 NR Description: kinesin heavy chain isolog, putative
  misc_feature (801)..(1012): Homolog of NCBI NO: 34914660 NR Description: putative kinesin [Oryza sativa (japonica
  misc_feature (1)..(403): Homolog of NCBI NO: 34914660 NR Description: putative kinesin [Oryza sativa (japonica
  misc_feature (862)..(998): Homolog of NCBI NO: 15234898 NR Description: kinesin like protein; protein id: At4g38950.1
  misc_feature (1)..(400): Homolog of NCBI NO: 15234898 NR Description: kinesin like protein; protein id: At4g38950.1
  misc_feature (840)..(1000): Homolog of NCBI NO: 15208467 NR Description: kinesin heavy chain [Zea mays]
  misc_feature (1)..(538): Homolog of NCBI NO: 15208467 NR Description: kinesin heavy chain [Zea mays]
  misc_feature (1)..(649): Homolog of NCBI NO: 30693419 NR Description: expressed protein [Arabidopsis thaliana]
  misc_feature (1)..(401): Homolog of NCBI NO: 13937153 NR Description: AT5g66310/K1L20_9 [Arabidopsis thaliana]
  misc_feature (1)..(649): Homolog of NCBI NO: 11357626 NR Description: hypothetical protein F24M12.190 - Arabidopsis
MRPLNDKEKFRNDVPDWECINNTTIIYRSHLSISERSMYPSAYTFDRVFSPECCTRQVYEQGAKEVAFSVVSGVNASVFAYGQTSSGKTYTMSGITDCALVDIYGYIDKHKEREFILKFSAMEIYNESVRDLLSTDTSPLRLLDDPEKGTVVEKLTEETLRDWNHFKELLSVCKAQRQIGETALNEVSSRSHQILRLTVESIAREFSTNDKFSTLTATVNFIDLAGSERASQSLSAGTRLKEGCHINRSLLTLGTVIRKLSKEKTGHIPFRDSKLTRILQSSLGGNARTAIICTMSPARIHVEQSRNTLLFASCAKEVTTNAQVNVVMSDKALVKHLQRELAKLESELRSPSQASIVSDTTALLTEKDLEVEKLKKEVFQLAQQLEQARSEIKDLRRMVEEEKNQEKETLSTETEGLNVLMEHQYPKLRVRRTWDSENTTPLSPISAHRSSISPRSTEYSYEENVFQLSDFRIDSASSSPQQLAFVTPFLKVPLDDIHVTDTVDQSHVHKEEAIEEPHVQEERFYEMAEHTDGNSEDNCREVRCIETEKSDISIGPVENMPESSPDKYEAVTAEEPVSVTEPKNLQHPTEEAVCVTETKNLQHPTEAENEEEEEEERVKEVSGASPEPKQESNLTKNPALCDLECSPDEFDTSMSNLSRISTPPALITPSPEKPFSWIMERDSQLFRGMKLTRSRSCRPSLLSSPSSSWLEKDADTPPSWYDKEFIKTAERNLTMCDIKNQRLLQDEFSGRSMPTTWFERSLSDTQTVDAASHGVSNEMSPNESPFRPSDASVFELQTSGRASISQDRTEETAAQKDKQIIHRSMEEREQKFLASNSTKSFKDAAMDPIQDYLDTALNWPVEFKRLQREIIELWHVCKVSMAHRSYFFLLFRGDQKDCLYLEVELRRLKYIRESFAQNSNDGNNMTLISCTRALTRERYKLSKLMQRKLSKEERENLFLRWGIGLNTNHRRVQLARRLWSDYKDMGHVRESASLVGKLNGHGNGKSDFDETNL

SEQ ID NO: 44875 - DNA, 1756 bp, Arabidopsis thaliana
  misc_feature (1)..(1756): Ceres Seq. ID no. 12559477
  misc_feature: MA Experiment ID: 20000327 Result: Down-regulated in Transcription
  misc_feature: MA Experiment 20000327 PARAMETER Experiment Name: At_42deg_Heat_Sub_P Parameter: Age (day) Value: 14
  misc_feature: MA Experiment 20000327 PARAMETER Experiment Name: At_42deg_Heat_Sub_P Parameter: Organism Value: A. thaliana
  misc_feature: MA Experiment 20000327 PARAMETER Experiment Name: At_42deg_Heat_Sub_P Parameter: Plant Line Value: WS
  misc_feature: MA Experiment 20000327 PARAMETER Experiment Name: At_42deg_Heat_Sub_P Parameter: Temperature (deg C) Value: 42 vs. 22
  misc_feature: MA Experiment 20000327 PARAMETER Experiment Name: At_42deg_Heat_Sub_P Parameter: Timepoint (hr) Value: 1
  misc_feature: MA Experiment 20000327 PARAMETER Experiment Name: At_42deg_Heat_Sub_P Parameter: Tissue Value: Aerial
  misc_feature: MA Experiment ID: 20000328 Result: Down-regulated in Transcription
  misc_feature: MA Experiment 20000328 PARAMETER Experiment Name: At_42deg_Heat_Sub_P Parameter: Age (day) Value: 14
  misc_feature: MA Experiment 20000328 PARAMETER Experiment Name: At_42deg_Heat_Sub_P Parameter: Organism Value: A. thaliana
  misc_feature: MA Experiment 20000328 PARAMETER Experiment Name: At_42deg_Heat_Sub_P Parameter: Plant Line Value: WS
  misc_feature: MA Experiment 20000328 PARAMETER Experiment Name: At_42deg_Heat_Sub_P Parameter: Temperature (deg C) Value: 42 vs. 22
  misc_feature: MA Experiment 20000328 PARAMETER Experiment Name: At_42deg_Heat_Sub_P Parameter: Timepoint (hr) Value: 6
  misc_feature: MA Experiment 20000328 PARAMETER Experiment Name: At_42deg_Heat_Sub_P Parameter: Tissue Value: Aerial
aatttaatctttttatttgttttgttcttcctcgattcaacactcgatgctgtgacaaagcccagattttggccggaaagttttgtgtgtttccggcgaagaatgcgaagaaaccggaagaatctgtaacggaatctaagctaaaagttaaagtacgatgtcggtgtacgacgctgctttccttaatacagagctttcgaaaccgacatcgatttttggtctccggctatgggtcgtgatcggaatcttacttggatctctaattgtcatcgcactctttcttctctccctctgcttaacttctcgccggaaaaatcgaaagccgagagccgatttcgcctccgccgccatcgctacaccgccgatttcaaaggagattaaagagatcgttccggcgcagaatcagtctgttccggcggagatccaggtcgatatcgggaagatcgagcatcgagtggtgttttcagatcgagtgtcgagtggtgagagtagaggaacagcgagtgcaagtgaaacggcgtcgtattccggtagcgggaattgtgggccggaggtgtcgcatcttggatggggccgatggtatactctgagagagcttgaagcggccacgaatgggctttgtgaagagaatgtaatcggagaaggtggttacgggattgtgtatcgtggcattttaactgatggaaccaaagtcgccgtcaagaacttgcttaacaataggggtcaagcagagaaggaattcaaagtagaagtggaagtcattgggcgagtacgacacaagaatcttgttaggcttttagggtattgcgtggaaggtgcatacaggatgctcgtgtatgactttgtcgacaatggtaatttggagcaatggattcacggtgatgttggcgatgtcagcccgctaacttgggatatacgtatgaatattatactggggatggccaaaggattggcgtatctacacgagggtcttgagccaaaagttgttcatcgggatattaaatcaagcaatatcttacttgatcgccaatggaatgctaaggtttcggattttggacttgctaagctcttggggtctgagagcagttatgtgactactcgtgtgatgggaactttcggttatgtagcaccagaatacgcttgcaccggaatgttaaacgagaagagtgatatctatagcttcggaatactaatcatggagataatcactggaagaaacccggttgattatagtcggcctcaaggagagacaaatctagtggattggcttaaatcaatggtgggaaaccgaagatcagaagaagttgttgatccgaaaatacccgaaccaccatcctcaaaggctcttaaacgagtgttgcttgtagctttgcgttgtgtggatcctgatgcgaacaagagacctaaaatgggtcatatcatacatatgcttgaagccgaagatctactctatcgcgatgaacgccgaacaacaagggaccatggaagccgcgagagacaagagacagctgtggttgctgccggtagtgaaagtggtgagagcggttcacggcatcatcagcaaaagcaaagatgaaaaaagagagtcacttgggttaagtgatttccacacgaccattatatttcatttttttttccggtatattattgtctcacttacataatattttcattctttggctcttcgagtcttggccttacgaaattaacattcttcttctttgtaaccttttgtcaacgatcacattcacatgtc

SEQ ID NO: 44876 - protein, 472 aa, Arabidopsis thaliana
  peptide (1)..(472): Ceres Seq. ID no. 12559478
  misc_feature (154)..(425): Pfam Name: Protein kinase domain Pfam Description: Protein kinase domain
  misc_feature (14)..(441): Homolog of NCBI NO: 30690058 NR Description: protein kinase family [Arabidopsis thaliana]
  misc_feature (10)..(90): Homolog of NCBI NO: 34897534 NR Description: OSJNBa0042L16.4 [Oryza sativa (japonica
  misc_feature (103)..(472): Homolog of NCBI NO: 34897534 NR Description: OSJNBa0042L16.4 [Oryza sativa (japonica
  misc_feature (5)..(462): Homolog of NCBI NO: 15235432 NR Description: putative serine/threonine protein kinase; protein
  misc_feature (1)..(364): Homolog of NCBI NO: 30678150 NR Description: protein kinase family [Arabidopsis thaliana]
  misc_feature (1)..(434): Homolog of NCBI NO: 15234142 NR Description: putative protein kinase; protein id: At4g01330.1
  misc_feature (1)..(188): Homolog of NCBI NO: 25518287 NR Description: hypothetical protein F22L4.8 - Arabidopsis
  misc_feature (188)..(472): Homolog of NCBI NO: 25518287 NR Description: hypothetical protein F22L4.8 - Arabidopsis
  misc_feature (1)..(472): Homolog of NCBI NO: 15223428 NR Description: protein serine/threonine kinase, putative
  misc_feature (1)..(472): Homolog of NCBI NO: 14194119 NR Description: At1g01540/F22L4_6 [Arabidopsis thaliana]
MSVYDAAFLNTELSKPTSIFGLRLWVVIGILLGSLIVIALFLLSLCLTSRRKNRKPRADFASAAIATPPISKEIKEIVPAQNQSVPAEIQVDIGKIEHRVVFSDRVSSGESRGTASASETASYSGSGNCGPEVSHLGWGRWYTLRELEAATNGLCEENVIGEGGYGIVYRGILTDGTKVAVKNLLNNRGQAEKEFKVEVEVIGRVRHKNLVRLLGYCVEGAYRMLVYDFVDNGNLEQWIHGDVGDVSPLTWDIRMNIILGMAKGLAYLHEGLEPKVVHRDIKSSNILLDRQWNAKVSDFGLAKLLGSESSYVTTRVMGTFGYVAPEYACTGMLNEKSDIYSFGILIMEIITGRNPVDYSRPQGETNLVDWLKSMVGNRRSEEVVDPKIPEPPSSKALKRVLLVALRCVDPDANKRPKMGHIIHMLEAEDLLYRDERRTTRDHGSRERQETAVVAAGSESGESGSRHHQQKQR

SEQ ID NO: 44877 - protein, 249 aa, Arabidopsis thaliana
  peptide (1)..(249): Ceres Seq. ID no. 12559479
  misc_feature (1)..(202): Pfam Name: Protein kinase domain Pfam Description: Protein kinase domain
  misc_feature (1)..(242): Homolog of NCBI NO: 37535714 NR Description: putative kinase [Oryza sativa (japonica
  misc_feature (1)..(210): Homolog of NCBI NO: 7488207 NR Description: probable serine/threonine-specific protein kinase
  misc_feature (1)..(218): Homolog of NCBI NO: 30690058 NR Description: protein kinase family [Arabidopsis thaliana]
  misc_feature (1)..(249): Homolog of NCBI NO: 34897534 NR Description: OSJNBa0042L16.4 [Oryza sativa (japonica
  misc_feature (1)..(239): Homolog of NCBI NO: 15235432 NR Description: putative serine/threonine protein kinase; protein
  misc_feature (1)..(141): Homolog of NCBI NO: 30678150 NR Description: protein kinase family [Arabidopsis thaliana]
  misc_feature (1)..(211): Homolog of NCBI NO: 15234142 NR Description: putative protein kinase; protein id: At4g01330.1
  misc_feature (1)..(249): Homolog of NCBI NO: 25518287 NR Description: hypothetical protein F22L4.8 - Arabidopsis
  misc_feature (1)..(249): Homolog of NCBI NO: 15223428 NR Description: protein serine/threonine kinase, putative
  misc_feature (1)..(249): Homolog of NCBI NO: 14194119 NR Description: At1g01540/F22L4_6 [Arabidopsis thaliana]
MLVYDFVDNGNLEQWIHGDVGDVSPLTWDIRMNIILGMAKGLAYLHEGLEPKVVHRDIKSSNILLDRQWNAKVSDFGLAKLLGSESSYVTTRVMGTFGYVAPEYACTGMLNEKSDIYSFGILIMEIITGRNPVDYSRPQGETNLVDWLKSMVGNRRSEEVVDPKIPEPPSSKALKRVLLVALRCVDPDANKRPKMGHIIHMLEAEDLLYRDERRTTRDHGSRERQETAVVAAGSESGESGSRHHQQKQR

SEQ ID NO: 44878 - DNA, 2010 bp, Arabidopsis thaliana; identical to SEQ ID NO: 36516
  misc_feature (1)..(2010): Ceres Seq. ID no. 12600087
  misc_feature: MA Experiment ID: 20000166 Result: Up-regulated in Transcription
  misc_feature: MA Experiment 20000166 PARAMETER Experiment Name: At_100uM_ABA_P Parameter: Age (day) Value: 14
  misc_feature: MA Experiment 20000166 PARAMETER Experiment Name: At_100uM_ABA_P Parameter: Organism Value: A. thaliana
  misc_feature: MA Experiment 20000166 PARAMETER Experiment Name: At_100uM_ABA_P Parameter: Plant Line Value: WS
  misc_feature: MA Experiment 20000166 PARAMETER Experiment Name: At_100uM_ABA_P Parameter: Timepoint (hr) Value: 1
  misc_feature: MA Experiment 20000166 PARAMETER Experiment Name: At_100uM_ABA_P Parameter: Tissue Value: Aerial
  misc_feature: MA Experiment 20000166 PARAMETER Experiment Name: At_100uM_ABA_P Parameter: Treatment Value: 100uM ABA vs. No Treatment
  misc_feature: MA Experiment ID: 20000169 Result: Up-regulated in Transcription
  misc_feature: MA Experiment 20000169 PARAMETER Experiment Name: At_100uM_ABA_P Parameter: Age (day) Value: 14
  misc_feature: MA Experiment 20000169 PARAMETER Experiment Name: At_100uM_ABA_P Parameter: Organism Value: A. thaliana
  misc_feature: MA Experiment 20000169 PARAMETER Experiment Name: At_100uM_ABA_P Parameter: Plant Line Value: WS
  misc_feature: MA Experiment 20000169 PARAMETER Experiment Name: At_100uM_ABA_P Parameter: Timepoint (hr) Value: 6
  misc_feature: MA Experiment 20000169 PARAMETER Experiment Name: At_100uM_ABA_P Parameter: Tissue Value: Aerial
  misc_feature: MA Experiment 20000169 PARAMETER Experiment Name: At_100uM_ABA_P Parameter: Treatment Value: 100uM ABA vs. No Treatment
  misc_feature: MA Experiment ID: 20000180 Result: Up-regulated in Transcription
  misc_feature: MA Experiment 20000180 PARAMETER Experiment Name: At_Germinating_Seeds_P Parameter: Age (hr) Value: 24 vs. 0
  misc_feature: MA Experiment 20000180 PARAMETER Experiment Name: At_Germinating_Seeds_P Parameter: Tissue Value: Germinating Seeds
  misc_feature: MA Experiment ID: 20000182 Result: Up-regulated in Transcription
  misc_feature: MA Experiment 20000182 PARAMETER Experiment Name: At_2mM_SA_P Parameter: Age (day) Value: 14
  misc_feature: MA Experiment 20000182 PARAMETER Experiment Name: At_2mM_SA_P Parameter: Organism Value: A. thaliana
  misc_feature: MA Experiment 20000182 PARAMETER Experiment Name: At_2mM_SA_P Parameter: Plant Line Value: WS
  misc_feature: MA Experiment 20000182 PARAMETER Experiment Name: At_2mM_SA_P Parameter: Timepoint (hr) Value: 6
  misc_feature: MA Experiment 20000182 PARAMETER Experiment Name: At_2mM_SA_P Parameter: Tissue Value: Aerial
  misc_feature: MA Experiment 20000182 PARAMETER Experiment Name: At_2mM_SA_P Parameter: Treatment Value: 2mM SA vs. No Treatment
  misc_feature: MA Experiment ID: 20000267 Result: Up-regulated in Transcription
  misc_feature: MA Experiment 20000267 PARAMETER Experiment Name: At_Drought_P Parameter: Age (day) Value: 7
  misc_feature: MA Experiment 20000267 PARAMETER Experiment Name: At_Drought_P Parameter: Organism Value: A. thaliana
  misc_feature: MA Experiment 20000267 PARAMETER Experiment Name: At_Drought_P Parameter: Plant Line Value: WS
  misc_feature: MA Experiment 20000267 PARAMETER Experiment Name: At_Drought_P Parameter: Timepoint (hr) Value: 6
  misc_feature: MA Experiment 20000267 PARAMETER Experiment Name: At_Drought_P Parameter: Tissue Value: Whole Plant
  misc_feature: MA Experiment 20000267 PARAMETER Experiment Name: At_Drought_P Parameter: Treatment Value: Drought vs. No Drought
  misc_feature: MA Experiment ID: 20000268 Result: Up-regulated in Transcription
  misc_feature: MA Experiment 20000268 PARAMETER Experiment Name: At_100mM_NaCl__P Parameter: Age (day) Value: 14
  misc_feature: MA Experiment 20000268 PARAMETER Experiment Name: At_100mM_NaCl__P Parameter: Organism Value: A. thaliana
  misc_feature: MA Experiment 20000268 PARAMETER Experiment Name: At_100mM_NaCl__P Parameter: Plant Line Value: WS
  misc_feature: MA Experiment 20000268 PARAMETER Experiment Name: At_100mM_NaCl__P Parameter: Timepoint (hr) Value: 6
  misc_feature: MA Experiment 20000268 PARAMETER Experiment Name: At_100mM_NaCl__P Parameter: Tissue Value: Whole Plant
  misc_feature: MA Experiment 20000268 PARAMETER Experiment Name: At_100mM_NaCl__P Parameter: Treatment Value: 100mM NaCl vs. No Treatment
  misc_feature: MA Experiment ID: 20000436 Result: Up-regulated in Transcription
  misc_feature: MA Experiment 20000436 PARAMETER Experiment Name: At_Drought_P Parameter: Age (day) Value: 7
  misc_feature: MA Experiment 20000436 PARAMETER Experiment Name: At_Drought_P Parameter: Organism Value: A. thaliana
  misc_feature: MA Experiment 20000436 PARAMETER Experiment Name: At_Drought_P Parameter: Plant Line Value: WS
  misc_feature: MA Experiment 20000436 PARAMETER Experiment Name: At_Drought_P Parameter: Timepoint (hr) Value: 12
  misc_feature: MA Experiment 20000436 PARAMETER Experiment Name: At_Drought_P Parameter: Tissue Value: Whole Plant
  misc_feature: MA Experiment 20000436 PARAMETER Experiment Name: At_Drought_P Parameter: Treatment Value: Drought vs. No Drought
  misc_feature: MA Experiment ID: 20000437 Result: Up-regulated in Transcription
  misc_feature: MA Experiment 20000437 PARAMETER Experiment Name: At_Drought_P Parameter: Age (day) Value: 8
  misc_feature: MA Experiment 20000437 PARAMETER Experiment Name: At_Drought_P Parameter: Organism Value: A. thaliana
  misc_feature: MA Experiment 20000437 PARAMETER Experiment Name: At_Drought_P Parameter: Plant Line Value: WS
  misc_feature: MA Experiment 20000437 PARAMETER Experiment Name: At_Drought_P Parameter: Timepoint (hr) Value: 24
  misc_feature: MA Experiment 20000437 PARAMETER Experiment Name: At_Drought_P Parameter: Tissue Value: Whole Plant
  misc_feature: MA Experiment 20000437 PARAMETER Experiment Name: At_Drought_P Parameter: Treatment Value: Drought vs. No Drought
  misc_feature: MA Experiment ID: 20000438 Result: Up-regulated in Transcription
  misc_feature: MA Experiment 20000438 PARAMETER Experiment Name: At_Shoots__P Parameter: Age (day) Value: 14
  misc_feature: MA Experiment 20000438 PARAMETER Experiment Name: At_Shoots__P Parameter: Tissue Value: Shoots vs. Whole Plant
  misc_feature: MA Experiment ID: 20000451 Result: Down-regulated in Transcription
  misc_feature: MA Experiment 20000451 PARAMETER Experiment Name: At_CS6879_Shoots-Roots_P Parameter: Age (day) Value: 14
  misc_feature: MA Experiment 20000451 PARAMETER Experiment Name: At_CS6879_Shoots-Roots_P Parameter: Organism Value: A. thaliana
  misc_feature: MA Experiment 20000451 PARAMETER Experiment Name: At_CS6879_Shoots-Roots_P Parameter: Plant Line Value: CS6879 vs. WS
  misc_feature: MA Experiment 20000451 PARAMETER Experiment Name: At_CS6879_Shoots-Roots_P Parameter: Tissue Value: Roots
  misc_feature: MA Experiment ID: 20000453 Result: Up-regulated in Transcription
  misc_feature: MA Experiment 20000453 PARAMETER Experiment Name: At_100uM_ABA_P Parameter: Age (day) Value: 15
  misc_feature: MA Experiment 20000453 PARAMETER Experiment Name: At_100uM_ABA_P Parameter: Organism Value: A. thaliana
  misc_feature: MA Experiment 20000453 PARAMETER Experiment Name: At_100uM_ABA_P Parameter: Plant Line Value: WS
  misc_feature: MA Experiment 20000453 PARAMETER Experiment Name: At_100uM_ABA_P Parameter: Timepoint (hr) Value: 24
  misc_feature: MA Experiment 20000453 PARAMETER Experiment Name: At_100uM_ABA_P Parameter: Tissue Value: Aerial
  misc_feature: MA Experiment 20000453 PARAMETER Experiment Name: At_100uM_ABA_P Parameter: Treatment Value: 100uM ABA vs. No Treatment
  misc_feature: MA Experiment ID: 20000455 Result: Up-regulated in Transcription
  misc_feature: MA Experiment 20000455 PARAMETER Experiment Name: At_100uM_ABA_P Parameter: Age (day) Value: 16
  misc_feature: MA Experiment 20000455 PARAMETER Experiment Name: At_100uM_ABA_P Parameter: Organism Value: A. thaliana
  misc_feature: MA Experiment 20000455 PARAMETER Experiment Name: At_100uM_ABA_P Parameter: Plant Line Value: WS
  misc_feature: MA Experiment 20000455 PARAMETER Experiment Name: At_100uM_ABA_P Parameter: Timepoint (hr) Value: 48
  misc_feature: MA Experiment 20000455 PARAMETER Experiment Name: At_100uM_ABA_P Parameter: Tissue Value: Aerial
  misc_feature: MA Experiment 20000455 PARAMETER Experiment Name: At_100uM_ABA_P Parameter: Treatment Value: 100uM ABA vs. No Treatment
  misc_feature: MA Experiment ID: 20000575 Result: Up-regulated in Transcription
  misc_feature: MA Experiment 20000575 PARAMETER Experiment Name: At_100uM_ABA_Mutants__P Parameter: Organism Value: A. thaliana
  misc_feature: MA Experiment 20000575 PARAMETER Experiment Name: At_100uM_ABA_Mutants__P Parameter: Plant Line Value: CS22
  misc_feature: MA Experiment 20000575 PARAMETER Experiment Name: At_100uM_ABA_Mutants__P Parameter: Timepoint (hr) Value: 6
  misc_feature: MA Experiment 20000575 PARAMETER Experiment Name: At_100uM_ABA_Mutants__P Parameter: Tissue Value: Whole Plant
  misc_feature: MA Experiment 20000575 PARAMETER Experiment Name: At_100uM_ABA_Mutants__P Parameter: Treatment Value: 1uM ABA vs. No Treatment
  misc_feature: MA Experiment ID: 20000576 Result: Up-regulated in Transcription
  misc_feature: MA Experiment 20000576 PARAMETER Experiment Name: At_100uM_ABA_Mutants__P Parameter: Organism Value: A. thaliana
  misc_feature: MA Experiment 20000576 PARAMETER Experiment Name: At_100uM_ABA_Mutants__P Parameter: Plant Line Value: CS23
  misc_feature: MA Experiment 20000576 PARAMETER Experiment Name: At_100uM_ABA_Mutants__P Parameter: Timepoint (hr) Value: 6
  misc_feature: MA Experiment 20000576 PARAMETER Experiment Name: At_100uM_ABA_Mutants__P Parameter: Tissue Value: Whole Plant
  misc_feature: MA Experiment 20000576 PARAMETER Experiment Name: At_100uM_ABA_Mutants__P Parameter: Treatment Value: 1uM ABA vs. No Treatment
  misc_feature: MA Experiment ID: 20001450 Result: Up-regulated in Transcription
  misc_feature: MA Experiment 20001450 PARAMETER Experiment Name: At_Far-red-induction_P Parameter: Age (day) Value: 7
  misc_feature: MA Experiment 20001450 PARAMETER Experiment Name: At_Far-red-induction_P Parameter: Light Value: Far-red vs. White
  misc_feature: MA Experiment 20001450 PARAMETER Experiment Name: At_Far-red-induction_P Parameter: Organism Value: A. thaliana
  misc_feature: MA Experiment 20001450 PARAMETER Experiment Name: At_Far-red-induction_P Parameter: Plant Line Value: Columbia
  misc_feature: MA Experiment 20001450 PARAMETER Experiment Name: At_Far-red-induction_P Parameter: Timepoint (hr) Value: 8
  misc_feature: MA Experiment 20001450 PARAMETER Experiment Name: At_Far-red-induction_P Parameter: Tissue Value: Whole Plant
  misc_feature: MA Experiment ID: 20001451 Result: Up-regulated in Transcription
  misc_feature: MA Experiment 20001451 PARAMETER Experiment Name: At_Far-red-induction_P Parameter: Age (day) Value: 7
  misc_feature: MA Experiment 20001451 PARAMETER Experiment Name: At_Far-red-induction_P Parameter: Light Value: Far-red vs. White
  misc_feature: MA Experiment 20001451 PARAMETER Experiment Name: At_Far-red-induction_P Parameter: Organism Value: A. thaliana
  misc_feature: MA Experiment 20001451 PARAMETER Experiment Name: At_Far-red-induction_P Parameter: Plant Line Value: Columbia
  misc_feature: MA Experiment 20001451 PARAMETER Experiment Name: At_Far-red-induction_P Parameter: Timepoint (hr) Value: 24
  misc_feature: MA Experiment 20001451 PARAMETER Experiment Name: At_Far-red-induction_P Parameter: Tissue Value: Whole Plant
  misc_feature: MA Experiment ID: 20001457 Result: Up-regulated in Transcription
  misc_feature: MA Experiment 20001457 PARAMETER Experiment Name: At_50mM_NH4NO3_L-to-H_P Parameter: Age (day) Value: Undefined
  misc_feature: MA Experiment 20001457 PARAMETER Experiment Name: At_50mM_NH4NO3_L-to-H_P Parameter: Organism Value: Undefined
  misc_feature: MA Experiment 20001457 PARAMETER Experiment Name: At_50mM_NH4NO3_L-to-H_P Parameter: Plant Line Value: Undefined
  misc_feature: MA Experiment 20001457 PARAMETER Experiment Name: At_50mM_NH4NO3_L-to-H_P Parameter: Timepoint (hr) Value: 0.5
  misc_feature: MA Experiment 20001457 PARAMETER Experiment Name: At_50mM_NH4NO3_L-to-H_P Parameter: Tissue Value: Siliques
  misc_feature: MA Experiment 20001457 PARAMETER Experiment Name: At_50mM_NH4NO3_L-to-H_P Parameter: Treatment Value: 50mM NH4NO3 vs. 100mM Manitol
  misc_feature: MA Experiment ID: 20001554 Result: Up-regulated in Transcription
  misc_feature: MA Experiment 20001554 PARAMETER Experiment Name: At_Drought_Soil_Dry_P Parameter: Age (day) Value: 21
  misc_feature: MA Experiment 20001554 PARAMETER Experiment Name: At_Drought_Soil_Dry_P Parameter: Organism Value: A. thaliana
  misc_feature: MA Experiment 20001554 PARAMETER Experiment Name: At_Drought_Soil_Dry_P Parameter: Plant Line Value: WS
  misc_feature: MA Experiment 20001554 PARAMETER Experiment Name: At_Drought_Soil_Dry_P Parameter: Post Timepoint (hr) Value: None
  misc_feature: MA Experiment 20001554 PARAMETER Experiment Name: At_Drought_Soil_Dry_P Parameter: Post-Treatment Value: None
  misc_feature: MA Experiment 20001554 PARAMETER Experiment Name: At_Drought_Soil_Dry_P Parameter: Timepoint (day) Value: 7
  misc_feature: MA Experiment 20001554 PARAMETER Experiment Name: At_Drought_Soil_Dry_P Parameter: Treatment Value: Drought vs. No Drought
  misc_feature: MA Experiment ID: 20001556 Result: Up-regulated in Transcription
  misc_feature: MA Experiment 20001556 PARAMETER Experiment Name: At_Drought_Soil_Dry_P Parameter: Age (day) Value: 26
  misc_feature: MA Experiment 20001556 PARAMETER Experiment Name: At_Drought_Soil_Dry_P Parameter: Organism Value: A. thaliana
  misc_feature: MA Experiment 20001556 PARAMETER Experiment Name: At_Drought_Soil_Dry_P Parameter: Plant Line Value: WS
  misc_feature: MA Experiment 20001556 PARAMETER Experiment Name: At_Drought_Soil_Dry_P Parameter: Post Timepoint (hr) Value: None
  misc_feature: MA Experiment 20001556 PARAMETER Experiment Name: At_Drought_Soil_Dry_P Parameter: Post-Treatment Value: None
  misc_feature: MA Experiment 20001556 PARAMETER Experiment Name: At_Drought_Soil_Dry_P Parameter: Timepoint (day) Value: 12
  misc_feature: MA Experiment 20001556 PARAMETER Experiment Name: At_Drought_Soil_Dry_P Parameter: Treatment Value: Drought vs. No Drought
  misc_feature: MA Experiment ID: 20001559 Result: Up-regulated in Transcription
  misc_feature: MA Experiment 20001559 PARAMETER Experiment Name: At_Drought_Soil_Dry_P Parameter: Age (day) Value: 28
  misc_feature: MA Experiment 20001559 PARAMETER Experiment Name: At_Drought_Soil_Dry_P Parameter: Organism Value: A. thaliana
  misc_feature: MA Experiment 20001559 PARAMETER Experiment Name: At_Drought_Soil_Dry_P Parameter: Plant Line Value: WS
  misc_feature: MA Experiment 20001559 PARAMETER Experiment Name: At_Drought_Soil_Dry_P Parameter: Post Timepoint (hr) Value: 29
  misc_feature: MA Experiment 20001559 PARAMETER Experiment Name: At_Drought_Soil_Dry_P Parameter: Post-Treatment Value: Re-Water vs. No Drought
  misc_feature: MA Experiment 20001559 PARAMETER Experiment Name: At_Drought_Soil_Dry_P Parameter: Timepoint (day) Value: 14
  misc_feature: MA Experiment 20001559 PARAMETER Experiment Name: At_Drought_Soil_Dry_P Parameter: Treatment Value: Drought vs. No Drought
  misc_feature: MA Experiment ID: 20001757 Result: Down-regulated in Transcription
  misc_feature: MA Experiment 20001757 PARAMETER Experiment Name: At_50mM_NH4NO3_L-to-H_P Parameter: Timepoint (hr) Value: 6
  misc_feature: MA Experiment 20001757 PARAMETER Experiment Name: At_50mM_NH4NO3_L-to-H_P Parameter: Tissue Value: Leaf
  misc_feature: MA Experiment 20001757 PARAMETER Experiment Name: At_50mM_NH4NO3_L-to-H_P Parameter: Treatment Value: 50mM NH4NO3 vs 100mM Mannitol
  misc_feature: MA Experiment ID: 20001904 Result: Up-regulated in Transcription
  misc_feature: MA Experiment 20001904 PARAMETER Experiment Name: At_Drought_Reproduction_P Parameter: Age (day) Value: 37
  misc_feature: MA Experiment 20001904 PARAMETER Experiment Name: At_Drought_Reproduction_P Parameter: Organism Value: A. thaliana
  misc_feature: MA Experiment 20001904 PARAMETER Experiment Name: At_Drought_Reproduction_P Parameter: Plant Line Value: WS
  misc_feature: MA Experiment 20001904 PARAMETER Experiment Name: At_Drought_Reproduction_P Parameter: Timepoint (day) Value: 7
  misc_feature: MA Experiment 20001904 PARAMETER Experiment Name: At_Drought_Reproduction_P Parameter: Tissue Value: Rosettes
  misc_feature: MA Experiment 20001904 PARAMETER Experiment Name: At_Drought_Reproduction_P Parameter: Treatment Value: Drought vs. No Drought
  misc_feature: MA Experiment ID: 20001905 Result: Up-regulated in Transcription
  misc_feature: MA Experiment 20001905 PARAMETER Experiment Name: At_Drought_Reproduction_P Parameter: Age (day) Value: 40
  misc_feature: MA Experiment 20001905 PARAMETER Experiment Name: At_Drought_Reproduction_P Parameter: Organism Value: A. thaliana
  misc_feature: MA Experiment 20001905 PARAMETER Experiment Name: At_Drought_Reproduction_P Parameter: Plant Line Value: WS
  misc_feature: MA Experiment 20001905 PARAMETER Experiment Name: At_Drought_Reproduction_P Parameter: Timepoint (day) Value: 10
  misc_feature: MA Experiment 20001905 PARAMETER Experiment Name: At_Drought_Reproduction_P Parameter: Tissue Value: Rosettes
  misc_feature: MA Experiment 20001905 PARAMETER Experiment Name: At_Drought_Reproduction_P Parameter: Treatment Value: Drought vs. No Drought
  misc_feature: MA Experiment ID: 20001906 Result: Up-regulated in Transcription
  misc_feature: MA Experiment 20001906 PARAMETER Experiment Name: At_Drought_Reproduction_P Parameter: Age (day) Value: 35
  misc_feature: MA Experiment 20001906 PARAMETER Experiment Name: At_Drought_Reproduction_P Parameter: Organism Value: A. thaliana
  misc_feature: MA Experiment 20001906 PARAMETER Experiment Name: At_Drought_Reproduction_P Parameter: Plant Line Value: WS
  misc_feature: MA Experiment 20001906 PARAMETER Experiment Name: At_Drought_Reproduction_P Parameter: Timepoint (day) Value: 5
  misc_feature: MA Experiment 20001906 PARAMETER Experiment Name: At_Drought_Reproduction_P Parameter: Tissue Value: Siliques
  misc_feature: MA Experiment 20001906 PARAMETER Experiment Name: At_Drought_Reproduction_P Parameter: Treatment Value: Drought vs. No Drought
  misc_feature: MA Experiment ID: 20001907 Result: Up-regulated in Transcription
  misc_feature: MA Experiment 20001907 PARAMETER Experiment Name: At_Drought_Reproduction_P Parameter: Age (day) Value: 37
  misc_feature: MA Experiment 20001907 PARAMETER Experiment Name: At_Drought_Reproduction_P Parameter: Organism Value: A. thaliana
  misc_feature: MA Experiment 20001907 PARAMETER Experiment Name: At_Drought_Reproduction_P Parameter: Plant Line Value: WS
  misc_feature: MA Experiment 20001907 PARAMETER Experiment Name: At_Drought_Reproduction_P Parameter: Timepoint (day) Value: 7
  misc_feature: MA Experiment 20001907 PARAMETER Experiment Name: At_Drought_Reproduction_P Parameter: Tissue Value: Siliques
  misc_feature: MA Experiment 20001907 PARAMETER Experiment Name: At_Drought_Reproduction_P Parameter: Treatment Value: Drought vs. No Drought
  misc_feature: MA Experiment ID: 20001908 Result: Up-regulated in Transcription
  misc_feature: MA Experiment 20001908 PARAMETER Experiment Name: At_Drought_Reproduction_P Parameter: Age (day) Value: 40
  misc_feature: MA Experiment 20001908 PARAMETER Experiment Name: At_Drought_Reproduction_P Parameter: Organism Value: A. thaliana
  misc_feature: MA Experiment 20001908 PARAMETER Experiment Name: At_Drought_Reproduction_P Parameter: Plant Line Value: WS
  misc_feature: MA Experiment 20001908 PARAMETER Experiment Name: At_Drought_Reproduction_P Parameter: Timepoint (day) Value: 10
  misc_feature: MA Experiment 20001908 PARAMETER Experiment Name: At_Drought_Reproduction_P Parameter: Tissue Value: Siliques
  misc_feature: MA Experiment 20001908 PARAMETER Experiment Name: At_Drought_Reproduction_P Parameter: Treatment Value: Drought vs. No Drought
  misc_feature: MA Experiment ID: 20001910 Result: Up-regulated in Transcription
  misc_feature: MA Experiment 20001910 PARAMETER Experiment Name: At_Drought_Reproduction_P Parameter: Age (day) Value: 37
  misc_feature: MA Experiment 20001910 PARAMETER Experiment Name: At_Drought_Reproduction_P Parameter: Organism Value: A. thaliana
  misc_feature: MA Experiment 20001910 PARAMETER Experiment Name: At_Drought_Reproduction_P Parameter: Plant Line Value: WS
  misc_feature: MA Experiment 20001910 PARAMETER Experiment Name: At_Drought_Reproduction_P Parameter: Timepoint (day) Value: 7
  misc_feature: MA Experiment 20001910 PARAMETER Experiment Name: At_Drought_Reproduction_P Parameter: Tissue Value: Flowers
  misc_feature: MA Experiment 20001910 PARAMETER Experiment Name: At_Drought_Reproduction_P Parameter: Treatment Value: Drought vs. No Drought
  misc_feature: MA Experiment ID: 20001911 Result: Up-regulated in Transcription
  misc_feature: MA Experiment 20001911 PARAMETER Experiment Name: At_Drought_Reproduction_P Parameter: Age (day) Value: 40
  misc_feature: MA Experiment 20001911 PARAMETER Experiment Name: At_Drought_Reproduction_P Parameter: Organism Value: A. thaliana
  misc_feature: MA Experiment 20001911 PARAMETER Experiment Name: At_Drought_Reproduction_P Parameter: Plant Line Value: WS
  misc_feature: MA Experiment 20001911 PARAMETER Experiment Name: At_Drought_Reproduction_P Parameter: Timepoint (day) Value: 10
  misc_feature: MA Experiment 20001911 PARAMETER Experiment Name: At_Drought_Reproduction_P Parameter: Tissue Value: Flowers
  misc_feature: MA Experiment 20001911 PARAMETER Experiment Name: At_Drought_Reproduction_P Parameter: Treatment Value: Drought vs. No Drought

SEQ ID NO: 44879 - protein, 536 aa, Arabidopsis thaliana; identical to SEQ ID NO: 36517
  peptide (1)..(536): Ceres Seq. ID no. 12600088
  misc_feature (137)..(416): Homolog of NCBI NO: 25408639 NR Description: hypothetical protein At2g39130 [imported] -
  misc_feature (11)..(532): Homolog of NCBI NO: 22326569 NR Description: putative protein
  misc_feature (18)..(531): Homolog of NCBI NO: 30679549 NR Description: amino acid transporter family [Arabidopsis
  misc_feature (21)..(100): Homolog of NCBI NO: 15292735 NR Description: unknown protein [Arabidopsis thaliana]
  misc_feature (137)..(532): Homolog of NCBI NO: 15292735 NR Description: unknown protein [Arabidopsis thaliana]
  misc_feature (21)..(100): Homolog of NCBI NO: 30687791 NR Description: amino acid transporter family [Arabidopsis
  misc_feature (137)..(532): Homolog of NCBI NO: 30687791 NR Description: amino acid transporter family [Arabidopsis
  misc_feature (130)..(536): Homolog of NCBI NO: 23397299 NR Description: unknown protein [Arabidopsis thaliana]
  misc_feature (1)..(337): Homolog of NCBI NO: 7487631 NR Description: hypothetical protein At2g41190 [imported] -
  misc_feature (1)..(536): Homolog of NCBI NO: 18405629 NR Description: expressed protein
  misc_feature (137)..(416): Homolog of NCBI NO: 25408639 NR Description: hypothetical protein At2g39130 [imported] -
  misc_feature (11)..(532): Homolog of NCBI NO: 22326569 NR Description: putative protein
  misc_feature (18)..(531): Homolog of NCBI NO: 30679549 NR Description: amino acid transporter family [Arabidopsis
  misc_feature (21)..(100): Homolog of NCBI NO: 15292735 NR Description: unknown protein [Arabidopsis thaliana]
  misc_feature (137)..(532): Homolog of NCBI NO: 15292735 NR Description: unknown protein [Arabidopsis thaliana]
  misc_feature (21)..(100): Homolog of NCBI NO: 30687791 NR Description: amino acid transporter family [Arabidopsis
  misc_feature (137)..(532): Homolog of NCBI NO: 30687791 NR Description: amino acid transporter family [Arabidopsis
  misc_feature (130)..(536): Homolog of NCBI NO: 23397299 NR Description: unknown protein [Arabidopsis thaliana]
  misc_feature (1)..(337): Homolog of NCBI NO: 7487631 NR Description: hypothetical protein At2g41190 [imported] -
  misc_feature (1)..(536): Homolog of NCBI NO: 18405629 NR Description: expressed protein

SEQ ID NO: 44880 - protein, 377 aa, Arabidopsis thaliana; identical to SEQ ID NO: 36518
  peptide (1)..(377): Ceres Seq. ID no. 12600089
  misc_feature (1)..(372): Homolog of NCBI NO: 11358406 NR Description: hypothetical protein T7H20.230 - Arabidopsis
  misc_feature (277)..(373): Homolog of NCBI NO: 25408639 NR Description: hypothetical protein At2g39130 [imported] -
  misc_feature (1)..(257): Homolog of NCBI NO: 25408639 NR Description: hypothetical protein At2g39130 [imported] -
  misc_feature (1)..(373): Homolog of NCBI NO: 22326569 NR Description: putative protein
  misc_feature (1)..(372): Homolog of NCBI NO: 30679549 NR Description: amino acid transporter family [Arabidopsis
  misc_feature (1)..(373): Homolog of NCBI NO: 15292735 NR Description: unknown protein [Arabidopsis thaliana]
  misc_feature (1)..(373): Homolog of NCBI NO: 30687791 NR Description: amino acid transporter family [Arabidopsis
  misc_feature (1)..(377): Homolog of NCBI NO: 23397299 NR Description: unknown protein [Arabidopsis thaliana]
  misc_feature (1)..(178): Homolog of NCBI NO: 7487631 NR Description: hypothetical protein At2g41190 [imported] -
  misc_feature (1)..(377): Homolog of NCBI NO: 18405629 NR Description: expressed protein
  misc_feature (1)..(372): Homolog of NCBI NO: 11358406 NR Description: hypothetical protein T7H20.230 - Arabidopsis
  misc_feature (277)..(373): Homolog of NCBI NO: 25408639 NR Description: hypothetical protein At2g39130 [imported] -
  misc_feature (1)..(257): Homolog of NCBI NO: 25408639 NR Description: hypothetical protein At2g39130 [imported] -
  misc_feature (1)..(373): Homolog of NCBI NO: 22326569 NR Description: putative protein
  misc_feature (1)..(372): Homolog of NCBI NO: 30679549 NR Description: amino acid transporter family [Arabidopsis
  misc_feature (1)..(373): Homolog of NCBI NO: 15292735 NR Description: unknown protein [Arabidopsis thaliana]
  misc_feature (1)..(373): Homolog of NCBI NO: 30687791 NR Description: amino acid transporter family [Arabidopsis
  misc_feature (1)..(377): Homolog of NCBI NO: 23397299 NR Description: unknown protein [Arabidopsis thaliana]
  misc_feature (1)..(178): Homolog of NCBI NO: 7487631 NR Description: hypothetical protein At2g41190 [imported] -
  misc_feature (1)..(377): Homolog of NCBI NO: 18405629 NR Description: expressed protein

SEQ ID NO: 44881 - protein, 357 aa, Arabidopsis thaliana; identical to SEQ ID NO: 36519
  peptide (1)..(357): Ceres Seq. ID no. 12600090
  misc_feature (1)..(352): Homolog of NCBI NO: 11358406 NR Description: hypothetical protein T7H20.230 - Arabidopsis
  misc_feature (257)..(353): Homolog of NCBI NO: 25408639 NR Description: hypothetical protein At2g39130 [imported] -
  misc_feature (1)..(237): Homolog of NCBI NO: 25408639 NR Description: hypothetical protein At2g39130 [imported] -
  misc_feature (1)..(353): Homolog of NCBI NO: 22326569 NR Description: putative protein
  misc_feature (1)..(352): Homolog of NCBI NO: 30679549 NR Description: amino acid transporter family [Arabidopsis
  misc_feature (1)..(353): Homolog of NCBI NO: 15292735 NR Description: unknown protein [Arabidopsis thaliana]
  misc_feature (1)..(353): Homolog of NCBI NO: 30687791 NR Description: amino acid transporter family [Arabidopsis
  misc_feature (1)..(357): Homolog of NCBI NO: 23397299 NR Description: unknown protein [Arabidopsis thaliana]
  misc_feature (1)..(158): Homolog of NCBI NO: 7487631 NR Description: hypothetical protein At2g41190 [imported] -
  misc_feature (1)..(357): Homolog of NCBI NO: 18405629 NR Description: expressed protein
  misc_feature (1)..(352): Homolog of NCBI NO: 11358406 NR Description: hypothetical protein T7H20.230 - Arabidopsis
  misc_feature (257)..(353): Homolog of NCBI NO: 25408639 NR Description: hypothetical protein At2g39130 [imported] -
  misc_feature (1)..(237): Homolog of NCBI NO: 25408639 NR Description: hypothetical protein At2g39130 [imported] -
  misc_feature (1)..(353): Homolog of NCBI NO: 22326569 NR Description: putative protein
  misc_feature (1)..(352): Homolog of NCBI NO: 30679549 NR Description: amino acid transporter family [Arabidopsis
  misc_feature (1)..(353): Homolog of NCBI NO: 15292735 NR Description: unknown protein [Arabidopsis thaliana]
  misc_feature (1)..(353): Homolog of NCBI NO: 30687791 NR Description: amino acid transporter family [Arabidopsis
  misc_feature (1)..(357): Homolog of NCBI NO: 23397299 NR Description: unknown protein [Arabidopsis thaliana]
  misc_feature (1)..(158): Homolog of NCBI NO: 7487631 NR Description: hypothetical protein At2g41190 [imported] -
  misc_feature (1)..(357): Homolog of NCBI NO: 18405629 NR Description: expressed protein

SEQ ID NO: 44882 - DNA, 2105 bp, Arabidopsis thaliana
  misc_feature (1)..(2105): Ceres Seq. ID no. 12559607
  misc_feature: MA Experiment ID: 20000180 Result: Up-regulated in Transcription
  misc_feature: MA Experiment 20000180 PARAMETER Experiment Name: At_Germinating_Seeds_P Parameter: Age (hr) Value: 24 vs. 0
  misc_feature: MA Experiment 20000180 PARAMETER Experiment Name: At_Germinating_Seeds_P Parameter: Tissue Value: Germinating Seeds
  misc_feature: MA Experiment ID: 20000184 Result: Up-regulated in Transcription
  misc_feature: MA Experiment 20000184 PARAMETER Experiment Name: At_Shoots__P Parameter: Age (day) Value: 7
  misc_feature: MA Experiment 20000184 PARAMETER Experiment Name: At_Shoots__P Parameter: Tissue Value: Shoots vs. Whole Plant
  misc_feature: MA Experiment ID: 20000185 Result: Up-regulated in Transcription
  misc_feature: MA Experiment 20000185 PARAMETER Experiment Name: At_Roots__P Parameter: Age (day) Value: 7 vs. 21
  misc_feature: MA Experiment 20000185 PARAMETER Experiment Name: At_Roots__P Parameter: Organism Value: A. thaliana
  misc_feature: MA Experiment 20000185 PARAMETER Experiment Name: At_Roots__P Parameter: Tissue Value: Roots vs. Whole Plant
  misc_feature: MA Experiment ID: 20000227 Result: Down-regulated in Transcription
  misc_feature: MA Experiment 20000227 PARAMETER Experiment Name: At_Root-Tips-vs-Tops_P Parameter: Tissue Value: Root Tips vs. Root Tops
  misc_feature: MA Experiment ID: 20000234 Result: Down-regulated in Transcription
  misc_feature: MA Experiment 20000234 PARAMETER Experiment Name: At_Siliques_P Parameter: Age (day) Value: 21
  misc_feature: MA Experiment 20000234 PARAMETER Experiment Name: At_Siliques_P Parameter: Organism Value: A. thaliana
  misc_feature: MA Experiment 20000234 PARAMETER Experiment Name: At_Siliques_P Parameter: Plant Line Value: WS
  misc_feature: MA Experiment 20000234 PARAMETER Experiment Name: At_Siliques_P Parameter: Tissue Value: Less Than 5mm Siliques vs. Whole Plant
  misc_feature: MA Experiment ID: 20000235 Result: Down-regulated in Transcription
  misc_feature: MA Experiment 20000235 PARAMETER Experiment Name: At_Siliques_P Parameter: Age (day) Value: 21
  misc_feature: MA Experiment 20000235 PARAMETER Experiment Name: At_Siliques_P Parameter: Organism Value: A. thaliana
  misc_feature: MA Experiment 20000235 PARAMETER Experiment Name: At_Siliques_P Parameter: Plant Line Value: WS
  misc_feature: MA Experiment 20000235 PARAMETER Experiment Name: At_Siliques_P Parameter: Tissue Value: 5-10mm Siliques vs. Whole Plant
  misc_feature: MA Experiment ID: 20000264 Result: Up-regulated in Transcription
  misc_feature: MA Experiment 20000264 PARAMETER Experiment Name: At_Open_Flower_P Parameter: Age (day) Value: 21
  misc_feature: MA Experiment 20000264 PARAMETER Experiment Name: At_Open_Flower_P Parameter: Plant Line Value: WS
  misc_feature: MA Experiment 20000264 PARAMETER Experiment Name: At_Open_Flower_P Parameter: Tissue Value: Open Flower vs. Whole Plant
  misc_feature: MA Experiment ID: 20000437 Result: Down-regulated in Transcription
  misc_feature: MA Experiment 20000437 PARAMETER Experiment Name: At_Drought_P Parameter: Age (day) Value: 8
  misc_feature: MA Experiment 20000437 PARAMETER Experiment Name: At_Drought_P Parameter: Organism Value: A. thaliana
  misc_feature: MA Experiment 20000437 PARAMETER Experiment Name: At_Drought_P Parameter: Plant Line Value: WS
  misc_feature: MA Experiment 20000437 PARAMETER Experiment Name: At_Drought_P Parameter: Timepoint (hr) Value: 24
  misc_feature: MA Experiment 20000437 PARAMETER Experiment Name: At_Drought_P Parameter: Tissue Value: Whole Plant
  misc_feature: MA Experiment 20000437 PARAMETER Experiment Name: At_Drought_P Parameter: Treatment Value: Drought vs. No Drought
  misc_feature: MA Experiment ID: 20000438 Result: Up-regulated in Transcription
  misc_feature: MA Experiment 20000438 PARAMETER Experiment Name: At_Shoots__P Parameter: Age (day) Value: 14
  misc_feature: MA Experiment 20000438 PARAMETER Experiment Name: At_Shoots__P Parameter: Tissue Value: Shoots vs. Whole Plant
  misc_feature: MA Experiment ID: 20000439 Result: Up-regulated in Transcription
  misc_feature: MA Experiment 20000439 PARAMETER Experiment Name: At_Roots__P Parameter: Age (day) Value: 14 vs. 21
  misc_feature: MA Experiment 20000439 PARAMETER Experiment Name: At_Roots__P Parameter: Organism Value: A. thaliana
  misc_feature: MA Experiment 20000439 PARAMETER Experiment Name: At_Roots__P Parameter: Tissue Value: Roots vs. Whole Plant
  misc_feature: MA Experiment ID: 20000444 Result: Up-regulated in Transcription
  misc_feature: MA Experiment 20000444 PARAMETER Experiment Name: At_100uM_NAA__P Parameter: Age (day) Value: 14
  misc_feature: MA Experiment 20000444 PARAMETER Experiment Name: At_100uM_NAA__P Parameter: Organism Value: A. thaliana
  misc_feature: MA Experiment 20000444 PARAMETER Experiment Name: At_100uM_NAA__P Parameter: Plant Line Value: WS
  misc_feature: MA Experiment 20000444 PARAMETER Experiment Name: At_100uM_NAA__P Parameter: Timepoint (hr) Value: 1
  misc_feature: MA Experiment 20000444 PARAMETER Experiment Name: At_100uM_NAA__P Parameter: Tissue Value: Aerial
  misc_feature: MA Experiment 20000444 PARAMETER Experiment Name: At_100uM_NAA__P Parameter: Treatment Value: 100uM NAA vs. No Treatment
  misc_feature: MA Experiment ID: 20000794 Result: Up-regulated in Transcription
  misc_feature: MA Experiment 20000794 PARAMETER Experiment Name: At_Petals_P Parameter: Age (day) Value: 23-25 days
  misc_feature: MA Experiment 20000794 PARAMETER Experiment Name: At_Petals_P Parameter: Plant Line Value: WS
  misc_feature: MA Experiment 20000794 PARAMETER Experiment Name: At_Petals_P Parameter: Tissue Value: Petals vs. Whole plant
  misc_feature: MA Experiment ID: 20001247 Result: Up-regulated in Transcription
  misc_feature: MA Experiment 20001247 PARAMETER Experiment Name: At_Far-red-induction_P Parameter: Age (day) Value: 7
  misc_feature: MA Experiment 20001247 PARAMETER Experiment Name: At_Far-red-induction_P Parameter: Light Value: Far-red vs. White
  misc_feature: MA Experiment 20001247 PARAMETER Experiment Name: At_Far-red-induction_P Parameter: Organism Value: A. thaliana
  misc_feature: MA Experiment 20001247 PARAMETER Experiment Name: At_Far-red-induction_P Parameter: Plant Line Value: Columbia
  misc_feature: MA Experiment 20001247 PARAMETER Experiment Name: At_Far-red-induction_P Parameter: Timepoint (hr) Value: 1
  misc_feature: MA Experiment 20001247 PARAMETER Experiment Name: At_Far-red-induction_P Parameter: Tissue Value: Whole Plant
  misc_feature: MA Experiment ID: 20001451 Result: Up-regulated in Transcription
  misc_feature: MA Experiment 20001451 PARAMETER Experiment Name: At_Far-red-induction_P Parameter: Age (day) Value: 7
  misc_feature: MA Experiment 20001451 PARAMETER Experiment Name: At_Far-red-induction_P Parameter: Light Value: Far-red vs. White
  misc_feature: MA Experiment 20001451 PARAMETER Experiment Name: At_Far-red-induction_P Parameter: Organism Value: A. thaliana
  misc_feature: MA Experiment 20001451 PARAMETER Experiment Name: At_Far-red-induction_P Parameter: Plant Line Value: Columbia
  misc_feature: MA Experiment 20001451 PARAMETER Experiment Name: At_Far-red-induction_P Parameter: Timepoint (hr) Value: 24
  misc_feature: MA Experiment 20001451 PARAMETER Experiment Name: At_Far-red-induction_P Parameter: Tissue Value: Whole Plant
  misc_feature: MA Experiment ID: 20001556 Result: Down-regulated in Transcription
  misc_feature: MA Experiment 20001556 PARAMETER Experiment Name: At_Drought_Soil_Dry_P Parameter: Age (day) Value: 26
  misc_feature: MA Experiment 20001556 PARAMETER Experiment Name: At_Drought_Soil_Dry_P Parameter: Organism Value: A. thaliana
  misc_feature: MA Experiment 20001556 PARAMETER Experiment Name: At_Drought_Soil_Dry_P Parameter: Plant Line Value: WS
  misc_feature: MA Experiment 20001556 PARAMETER Experiment Name: At_Drought_Soil_Dry_P Parameter: Post Timepoint (hr) Value: None
  misc_feature: MA Experiment 20001556 PARAMETER Experiment Name: At_Drought_Soil_Dry_P Parameter: Post-Treatment Value: None
  misc_feature: MA Experiment 20001556 PARAMETER Experiment Name: At_Drought_Soil_Dry_P Parameter: Timepoint (day) Value: 12
  misc_feature: MA Experiment 20001556 PARAMETER Experiment Name: At_Drought_Soil_Dry_P Parameter: Treatment Value: Drought vs. No Drought
  misc_feature: MA Experiment ID: 20001557 Result: Down-regulated in Transcription
  misc_feature: MA Experiment 20001557 PARAMETER Experiment Name: At_Drought_Soil_Dry_P Parameter: Age (day) Value: 27
  misc_feature: MA Experiment 20001557 PARAMETER Experiment Name: At_Drought_Soil_Dry_P Parameter: Organism Value: A. thaliana
  misc_feature: MA Experiment 20001557 PARAMETER Experiment Name: At_Drought_Soil_Dry_P Parameter: Plant Line Value: WS
  misc_feature: MA Experiment 20001557 PARAMETER Experiment Name: At_Drought_Soil_Dry_P Parameter: Post Timepoint (hr) Value: 3
  misc_feature: MA Experiment 20001557 PARAMETER Experiment Name: At_Drought_Soil_Dry_P Parameter: Post-Treatment Value: Re-Water vs. No Drought
  misc_feature: MA Experiment 20001557 PARAMETER Experiment Name: At_Drought_Soil_Dry_P Parameter: Timepoint (day) Value: 13
  misc_feature: MA Experiment 20001557 PARAMETER Experiment Name: At_Drought_Soil_Dry_P Parameter: Treatment Value: Drought vs. No Drought
  misc_feature: MA Experiment ID: 20001904 Result: Up-regulated in Transcription
  misc_feature: MA Experiment 20001904 PARAMETER Experiment Name: At_Drought_Reproduction_P Parameter: Age (day) Value: 37
  misc_feature: MA Experiment 20001904 PARAMETER Experiment Name: At_Drought_Reproduction_P Parameter: Organism Value: A. thaliana
  misc_feature: MA Experiment 20001904 PARAMETER Experiment Name: At_Drought_Reproduction_P Parameter: Plant Line Value: WS
  misc_feature: MA Experiment 20001904 PARAMETER Experiment Name: At_Drought_Reproduction_P Parameter: Timepoint (day) Value: 7
  misc_feature: MA Experiment 20001904 PARAMETER Experiment Name: At_Drought_Reproduction_P Parameter: Tissue Value: Rosettes
  misc_feature: MA Experiment 20001904 PARAMETER Experiment Name: At_Drought_Reproduction_P Parameter: Treatment Value: Drought vs. No Drought
agagaagaagtgattctctaaacaacaaaaataaaataaaactcttctttctctatttctgttgaaggtacctcatcattgcaacacaaacttaaagctttgtttgtgtctgctttcagacaatgataccaagttacgacccaaatgatacagaggctggtctcaagcttctcgaggatctgacaacaaatgcagaggctatccaacaacaagttcttcaccaaatactctctcaaaactctggaactcaatatctccgagcatttctggacggagaagccgacaagaatcaacaaagcttcaaaaacaaagtccctgtggtgaattatgacgacgtaaagcctttcattcaacgaatcgctgatggagaatcatctgatatcgtctctgctcagcccatcacagaactcctcactagttcggggacttctgcaggaaagccgaagttgatgccttctacagctgaagaattggaaaggaagacatttttctacagcatgcttgtgcctatcatgaacaaatatgtggatgggctagatgagggaaaagggatgtatcttctattcataaaaccagagatcaagactccgtcaggtctaatggcccgtcctgttttgaccagctactacaaaagtcaacatttcagaaacagaccattcaacaagtacaacgtctacactagccctgaccagaccattctttgtcaagacagcaagcagagcatgtactgtcagcttctctgcggtctagtacagcgatctcatgtcctaagagtcggagctgtctttgcctctgcctttcttcgagcagtcaagttcttggaggatcattacaaagagctttgcgctgacattagaaccggtactgtcactagctggatcactgactcatcctgcagagactcggtcttgtcgatccttaatggcccaaatcaagaattggctgatgaaattgagagtgagtgcgctgaaaagtcgtgggaaggaatcttgaggaggatatggcctaaggctaaatatgttgaggtgattgtgactggttcgatggctcaatacattccgacactagagttttatagcggaggtttaccgttggtttcaacgatgtatgcttcctctgagtgttactttggtatcaaccttaatccgttgtgtgatcctgccgatgtttcctacacgcttcttcctaacatggcttacttcgagttcttgcccgtcgacgacaaatcccacgaagagattcactttgcaactcactccaacaccgatgatgatgatgatgctctcaaggaagatctcatcgtcaatcttgttaatgtcgaagtcggtcaatactacgaaatcgtcatcactacattcacaggtttgtacagatacagagtaggcgatattctaaaagtgacgggtttccacaacaaagcgcctcaattccgtttcgtgcagcgaagaaacgttgtactaagcatcgacactgacaaaacgagcgaagaagatctactaaacgcagtgacacaagctaaactaaaccatcttcaacatccttcaagcctcttgctcacggagtacacaagctacgcagacacgtcatcaatcccagggcattacgtgctcttctgggagctaaagccacgtcacagcaatgacccaccaaagcttgacgacaagacaatggaggattgttgctctgaggttgaggattgtttggattacgtctacaggagatgcaggaacagggacaagtcgattgggccattggagataagagtggtgagtttgggcacgtttgattcgttaatggatttttgtgtctcacaaggatcatctttgaatcagtataagactccaagatgtgttaaatctggaggagctcttgagattcttgattccagagttattgggaggttcttcagtaagagagttcctcaatgggaaccacttggtttagattcttagactttacttctttttctttaatgtatgattaaagtcttgattttataagtataagatcttcatttgttaagttgctaattggtgtttctttttttaattgttaagcttttgtctcttttgtaacaaactttcagcaaagtcctctcattttgt

SEQ ID NO: 44883 - protein, 609 aa, Arabidopsis thaliana
  peptide (1)..(609): Ceres Seq. ID no. 12559608
  misc_feature (12)..(585): Pfam Name: GH3 auxin-responsive promoter Pfam Description: GH3 auxin-responsive promoter
  misc_feature (9)..(365): Homolog of NCBI NO: 15226032 NR Description: putative auxin-regulated protein; protein id:
  misc_feature (9)..(604): Homolog of NCBI NO: 34909816 NR Description: putative auxin-responsive GH3 protein
  misc_feature (393)..(604): Homolog of NCBI NO: 15227787 NR Description: unknown protein
  misc_feature (1)..(364): Homolog of NCBI NO: 15227787 NR Description: unknown protein
  misc_feature (9)..(604): Homolog of NCBI NO: 15227128 NR Description: putative auxin-responsive protein
  misc_feature (9)..(604): Homolog of NCBI NO: 15235538 NR Description: auxin-responsive GH3 - like protein
  misc_feature (14)..(604): Homolog of NCBI NO: 15237038 NR Description: GH3 like protein
  misc_feature (14)..(602): Homolog of NCBI NO: 17978966 NR Description: AT5g54510/F24B18_13 [Arabidopsis thaliana]
  misc_feature (14)..(604): Homolog of NCBI NO: 15239653 NR Description: auxin-responsive-like protein
  misc_feature (144)..(609): Homolog of NCBI NO: 30690222 NR Description: auxin-regulated GH3 protein -related [Arabidopsis
MIPSYDPNDTEAGLKLLEDLTTNAEAIQQQVLHQILSQNSGTQYLRAFLDGEADKNQQSFKNKVPVVNYDDVKPFIQRIADGESSDIVSAQPITELLTSSGTSAGKPKLMPSTAEELERKTFFYSMLVPIMNKYVDGLDEGKGMYLLFIKPEIKTPSGLMARPVLTSYYKSQHFRNRPFNKYNVYTSPDQTILCQDSKQSMYCQLLCGLVQRSHVLRVGAVFASAFLRAVKFLEDHYKELCADIRTGTVTSWITDSSCRDSVLSILNGPNQELADEIESECAEKSWEGILRRIWPKAKYVEVIVTGSMAQYIPTLEFYSGGLPLVSTMYASSECYFGINLNPLCDPADVSYTLLPNMAYFEFLPVDDKSHEEIHFATHSNTDDDDDALKEDLIVNLVNVEVGQYYEIVITTFTGLYRYRVGDILKVTGFHNKAPQFRFVQRRNVVLSIDTDKTSEEDLLNAVTQAKLNHLQHPSSLLLTEYTSYADTSSIPGHYVLFWELKPRHSNDPPKLDDKTMEDCCSEVEDCLDYVYRRCRNRDKSIGPLEIRVVSLGTFDSLMDFCVSQGSSLNQYKTPRCVKSGGALEILDSRVIGRFFSKRVPQWEPLGLDS

SEQ ID NO: 44884 - protein, 500 aa, Arabidopsis thaliana
  peptide (1)..(500): Ceres Seq. ID no. 12559609
  misc_feature (1)..(476): Pfam Name: GH3 auxin-responsive promoter Pfam Description: GH3 auxin-responsive promoter
  misc_feature (1)..(256): Homolog of NCBI NO: 15226032 NR Description: putative auxin-regulated protein; protein id:
  misc_feature (1)..(495): Homolog of NCBI NO: 34909816 NR Description: putative auxin-responsive GH3 protein
  misc_feature (284)..(495): Homolog of NCBI NO: 15227787 NR Description: unknown protein
  misc_feature (1)..(255): Homolog of NCBI NO: 15227787 NR Description: unknown protein
  misc_feature (1)..(495): Homolog of NCBI NO: 15227128 NR Description: putative auxin-responsive protein
  misc_feature (1)..(495): Homolog of NCBI NO: 15235538 NR Description: auxin-responsive GH3 - like protein
  misc_feature (1)..(495): Homolog of NCBI NO: 15237038 NR Description: GH3 like protein
  misc_feature (1)..(493): Homolog of NCBI NO: 17978966 NR Description: AT5g54510/F24B18_13 [Arabidopsis thaliana]
  misc_feature (1)..(495): Homolog of NCBI NO: 15239653 NR Description: auxin-responsive-like protein
  misc_feature (35)..(500): Homolog of NCBI NO: 30690222 NR Description: auxin-regulated GH3 protein -related [Arabidopsis
MPSTAEELERKTFFYSMLVPIMNKYVDGLDEGKGMYLLFIKPEIKTPSGLMARPVLTSYYKSQHFRNRPFNKYNVYTSPDQTILCQDSKQSMYCQLLCGLVQRSHVLRVGAVFASAFLRAVKFLEDHYKELCADIRTGTVTSWITDSSCRDSVLSILNGPNQELADEIESECAEKSWEGILRRIWPKAKYVEVIVTGSMAQYIPTLEFYSGGLPLVSTMYASSECYFGINLNPLCDPADVSYTLLPNMAYFEFLPVDDKSHEEIHFATHSNTDDDDDALKEDLIVNLVNVEVGQYYEIVITTFTGLYRYRVGDILKVTGFHNKAPQFRFVQRRNVVLSIDTDKTSEEDLLNAVTQAKLNHLQHPSSLLLTEYTSYADTSSIPGHYVLFWELKPRHSNDPPKLDDKTMEDCCSEVEDCLDYVYRRCRNRDKSIGPLEIRVVSLGTFDSLMDFCVSQGSSLNQYKTPRCVKSGGALEILDSRVIGRFFSKRVPQWEPLGLDS

SEQ ID NO: 44885 - protein, 484 aa, Arabidopsis thaliana
  peptide (1)..(484): Ceres Seq. ID no. 12559610
  misc_feature (1)..(460): Pfam Name: GH3 auxin-responsive promoter Pfam Description: GH3 auxin-responsive promoter
  misc_feature (1)..(240): Homolog of NCBI NO: 15226032 NR Description: putative auxin-regulated protein; protein id:
  misc_feature (1)..(479): Homolog of NCBI NO: 34909816 NR Description: putative auxin-responsive GH3 protein
  misc_feature (268)..(479): Homolog of NCBI NO: 15227787 NR Description: unknown protein
  misc_feature (1)..(239): Homolog of NCBI NO: 15227787 NR Description: unknown protein
  misc_feature (1)..(479): Homolog of NCBI NO: 15227128 NR Description: putative auxin-responsive protein
  misc_feature (1)..(479): Homolog of NCBI NO: 15235538 NR Description: auxin-responsive GH3 - like protein
  misc_feature (1)..(479): Homolog of NCBI NO: 15237038 NR Description: GH3 like protein
  misc_feature (1)..(477): Homolog of NCBI NO: 17978966 NR Description: AT5g54510/F24B18_13 [Arabidopsis thaliana]
  misc_feature (1)..(479): Homolog of NCBI NO: 15239653 NR Description: auxin-responsive-like protein
  misc_feature (19)..(484): Homolog of NCBI NO: 30690222 NR Description: auxin-regulated GH3 protein -related [Arabidopsis
MLVPIMNKYVDGLDEGKGMYLLFIKPEIKTPSGLMARPVLTSYYKSQHFRNRPFNKYNVYTSPDQTILCQDSKQSMYCQLLCGLVQRSHVLRVGAVFASAFLRAVKFLEDHYKELCADIRTGTVTSWITDSSCRDSVLSILNGPNQELADEIESECAEKSWEGILRRIWPKAKYVEVIVTGSMAQYIPTLEFYSGGLPLVSTMYASSECYFGINLNPLCDPADVSYTLLPNMAYFEFLPVDDKSHEEIHFATHSNTDDDDDALKEDLIVNLVNVEVGQYYEIVITTFTGLYRYRVGDILKVTGFHNKAPQFRFVQRRNVVLSIDTDKTSEEDLLNAVTQAKLNHLQHPSSLLLTEYTSYADTSSIPGHYVLFWELKPRHSNDPPKLDDKTMEDCCSEVEDCLDYVYRRCRNRDKSIGPLEIRVVSLGTFDSLMDFCVSQGSSLNQYKTPRCVKSGGALEILDSRVIGRFFSKRVPQWEPLGLDS

SEQ ID NO: 44886 - DNA, 2200 bp, Arabidopsis thaliana
  misc_feature (1)..(2200): Ceres Seq. ID no. 13575611
  misc_feature: MA Experiment ID: 108463 Result: Up-regulated in Transcription
  misc_feature: MA Experiment 108463 PARAMETER Experiment Name: At_Germinating_Seeds_cDNA_P Parameter: Age (day) Value: 3 vs. 0
  misc_feature: MA Experiment 108463 PARAMETER Experiment Name: At_Germinating_Seeds_cDNA_P Parameter: Tissue Value: Germinating Seeds
  misc_feature: MA Experiment ID: 108501 Result: Up-regulated in Transcription
  misc_feature: MA Experiment 108501 PARAMETER Experiment Name: At_ap2_floral_buds_cDNA_P Parameter: Plant Line Value: ap2 (Ler.)
  misc_feature: MA Experiment 108501 PARAMETER Experiment Name: At_ap2_floral_buds_cDNA_P Parameter: Tissue Value: Closed Flower
  misc_feature: MA Experiment ID: 108572 Result: Up-regulated in Transcription
  misc_feature: MA Experiment 108572 PARAMETER Experiment Name: At_Drought_cDNA_P Parameter: Timepoint (hr) Value: 1
  misc_feature: MA Experiment 108572 PARAMETER Experiment Name: At_Drought_cDNA_P Parameter: Tissue Value: Aerial
  misc_feature: MA Experiment 108572 PARAMETER Experiment Name: At_Drought_cDNA_P Parameter: Treatment Value: Drought vs. No Drought
  misc_feature: MA Experiment ID: 108576 Result: Up-regulated in Transcription
  misc_feature: MA Experiment 108576 PARAMETER Experiment Name: At_42deg_Heat_cDNA_P Parameter: Temperature (deg C) Value: 42 vs. 22
  misc_feature: MA Experiment 108576 PARAMETER Experiment Name: At_42deg_Heat_cDNA_P Parameter: Timepoint (hr) Value: 1
  misc_feature: MA Experiment 108576 PARAMETER Experiment Name: At_42deg_Heat_cDNA_P Parameter: Tissue Value: Aerial
  misc_feature: MA Experiment ID: 108595 Result: Up-regulated in Transcription
  misc_feature: MA Experiment 108595 PARAMETER Experiment Name: At_Ler-pi_Ovule_cDNA_P Parameter: Plant Line Value: null
  misc_feature: MA Experiment ID: 20000069 Result: Down-regulated in Transcription
  misc_feature: MA Experiment 20000069 PARAMETER Experiment Name: At_100uM_ABA_Mutants_cDNA_P Parameter: Plant Line Value: CS23
  misc_feature: MA Experiment 20000069 PARAMETER Experiment Name: At_100uM_ABA_Mutants_cDNA_P Parameter: Timepoint (hr) Value: 6
  misc_feature: MA Experiment 20000069 PARAMETER Experiment Name: At_100uM_ABA_Mutants_cDNA_P Parameter: Tissue Value: Aerial
  misc_feature: MA Experiment 20000069 PARAMETER Experiment Name: At_100uM_ABA_Mutants_cDNA_P Parameter: Treatment Value: 100uM ABA vs. No Treatment
  misc_feature: MA Experiment ID: 20000086 Result: Down-regulated in Transcription
  misc_feature: MA Experiment 20000086 PARAMETER Experiment Name: At_100uM_ABA_Mutants_cDNA_P Parameter: Plant Line Value: CS22
  misc_feature: MA Experiment 20000086 PARAMETER Experiment Name: At_100uM_ABA_Mutants_cDNA_P Parameter: Timepoint (hr) Value: 6
  misc_feature: MA Experiment 20000086 PARAMETER Experiment Name: At_100uM_ABA_Mutants_cDNA_P Parameter: Tissue Value: Aerial
  misc_feature: MA Experiment 20000086 PARAMETER Experiment Name: At_100uM_ABA_Mutants_cDNA_P Parameter: Treatment Value: 100uM ABA vs. No Treatment
  misc_feature: MA Experiment ID: 20000093 Result: Up-regulated in Transcription
  misc_feature: MA Experiment 20000093 PARAMETER Experiment Name: At_42deg_Heat_cDNA_P Parameter: Temperature (deg C) Value: 42 vs. 22
  misc_feature: MA Experiment 20000093 PARAMETER Experiment Name: At_42deg_Heat_cDNA_P Parameter: Timepoint (hr) Value: 0.5
  misc_feature: MA Experiment 20000093 PARAMETER Experiment Name: At_42deg_Heat_cDNA_P Parameter: Tissue Value: Aerial
  misc_feature: MA Experiment ID: 20000112 Result: Up-regulated in Transcription
  misc_feature: MA Experiment 20000112 PARAMETER Experiment Name: At_42deg_Heat_cDNA_P Parameter: Temperature (deg C) Value: 42 vs. 22
  misc_feature: MA Experiment 20000112 PARAMETER Experiment Name: At_42deg_Heat_cDNA_P Parameter: Timepoint (hr) Value: 2
  misc_feature: MA Experiment 20000112 PARAMETER Experiment Name: At_42deg_Heat_cDNA_P Parameter: Tissue Value: Aerial
  misc_feature: MA Experiment ID: 20000113 Result: Up-regulated in Transcription
  misc_feature: MA Experiment 20000113 PARAMETER Experiment Name: At_42deg_Heat_cDNA_P Parameter: Temperature (deg C) Value: 42 vs. 22
  misc_feature: MA Experiment 20000113 PARAMETER Experiment Name: At_42deg_Heat_cDNA_P Parameter: Timepoint (hr) Value: 8
  misc_feature: MA Experiment 20000113 PARAMETER Experiment Name: At_42deg_Heat_cDNA_P Parameter: Tissue Value: Aerial
  misc_feature: MA Experiment ID: 20000117 Result: Down-regulated in Transcription
  misc_feature: MA Experiment 20000117 PARAMETER Experiment Name: At_100uM_ABA_Mutants_cDNA_P Parameter: Plant Line Value: Columbia
  misc_feature: MA Experiment 20000117 PARAMETER Experiment Name: At_100uM_ABA_Mutants_cDNA_P Parameter: Timepoint (hr) Value: 6
  misc_feature: MA Experiment 20000117 PARAMETER Experiment Name: At_100uM_ABA_Mutants_cDNA_P Parameter: Tissue Value: Aerial
  misc_feature: MA Experiment 20000117 PARAMETER Experiment Name: At_100uM_ABA_Mutants_cDNA_P Parameter: Treatment Value: 100uM ABA vs. No Treatment
  misc_feature: MA Experiment ID: 20000144 Result: Up-regulated in Transcription
  misc_feature: MA Experiment 20000144 PARAMETER Experiment Name: At_42deg_Heat_cDNA_P Parameter: Temperature (deg C) Value: 42 vs. 22
  misc_feature: MA Experiment 20000144 PARAMETER Experiment Name: At_42deg_Heat_cDNA_P Parameter: Timepoint (hr) Value: 1
  misc_feature: MA Experiment 20000144 PARAMETER Experiment Name: At_42deg_Heat_cDNA_P Parameter: Tissue Value: Aerial
  misc_feature: MA Experiment ID: 20000171 Result: Up-regulated in Transcription
  misc_feature: MA Experiment 20000171 PARAMETER Experiment Name: At_42deg_Heat_P Parameter: Age (day) Value: 14
  misc_feature: MA Experiment 20000171 PARAMETER Experiment Name: At_42deg_Heat_P Parameter: Organism Value: A. thaliana
  misc_feature: MA Experiment 20000171 PARAMETER Experiment Name: At_42deg_Heat_P Parameter: Plant Line Value: WS
  misc_feature: MA Experiment 20000171 PARAMETER Experiment Name: At_42deg_Heat_P Parameter: Temperature (deg C) Value: 42 vs. 22
  misc_feature: MA Experiment 20000171 PARAMETER Experiment Name: At_42deg_Heat_P Parameter: Timepoint (hr) Value: 1
  misc_feature: MA Experiment 20000171 PARAMETER Experiment Name: At_42deg_Heat_P Parameter: Tissue Value: Aerial
  misc_feature: MA Experiment ID: 20000173 Result: Up-regulated in Transcription
  misc_feature: MA Experiment 20000173 PARAMETER Experiment Name: At_42deg_Heat_P Parameter: Age (day) Value: 14
  misc_feature: MA Experiment 20000173 PARAMETER Experiment Name: At_42deg_Heat_P Parameter: Organism Value: A. thaliana
  misc_feature: MA Experiment 20000173 PARAMETER Experiment Name: At_42deg_Heat_P Parameter: Plant Line Value: WS
  misc_feature: MA Experiment 20000173 PARAMETER Experiment Name: At_42deg_Heat_P Parameter: Temperature (deg C) Value: 42 vs. 22
  misc_feature: MA Experiment 20000173 PARAMETER Experiment Name: At_42deg_Heat_P Parameter: Timepoint (hr) Value: 6
  misc_feature: MA Experiment 20000173 PARAMETER Experiment Name: At_42deg_Heat_P Parameter: Tissue Value: Aerial
  misc_feature: MA Experiment ID: 20001248 Result: Down-regulated in Transcription
  misc_feature: MA Experiment 20001248 PARAMETER Experiment Name: At_Far-red-induction_P Parameter: Age (day) Value: 7
  misc_feature: MA Experiment 20001248 PARAMETER Experiment Name: At_Far-red-induction_P Parameter: Light Value: Far-red vs. White
  misc_feature: MA Experiment 20001248 PARAMETER Experiment Name: At_Far-red-induction_P Parameter: Organism Value: A. thaliana
  misc_feature: MA Experiment 20001248 PARAMETER Experiment Name: At_Far-red-induction_P Parameter: Plant Line Value: Columbia
  misc_feature: MA Experiment 20001248 PARAMETER Experiment Name: At_Far-red-induction_P Parameter: Timepoint (hr) Value: 4
  misc_feature: MA Experiment 20001248 PARAMETER Experiment Name: At_Far-red-induction_P Parameter: Tissue Value: Whole Plant
  misc_feature: MA Experiment ID: 20001560 Result: Down-regulated in Transcription
  misc_feature: MA Experiment 20001560 PARAMETER Experiment Name: At_Drought_Soil_Dry_P Parameter: Age (day) Value: 28
  misc_feature: MA Experiment 20001560 PARAMETER Experiment Name: At_Drought_Soil_Dry_P Parameter: Organism Value: A. thaliana
  misc_feature: MA Experiment 20001560 PARAMETER Experiment Name: At_Drought_Soil_Dry_P Parameter: Plant Line Value: WS
  misc_feature: MA Experiment 20001560 PARAMETER Experiment Name: At_Drought_Soil_Dry_P Parameter: Post Timepoint (hr) Value: None
  misc_feature: MA Experiment 20001560 PARAMETER Experiment Name: At_Drought_Soil_Dry_P Parameter: Post-Treatment Value: None
  misc_feature: MA Experiment 20001560 PARAMETER Experiment Name: At_Drought_Soil_Dry_P Parameter: Timepoint (day) Value: 14
  misc_feature: MA Experiment 20001560 PARAMETER Experiment Name: At_Drought_Soil_Dry_P Parameter: Treatment Value: Drought vs. No Drought
  misc_feature: MA Experiment ID: 20001757 Result: Down-regulated in Transcription
  misc_feature: MA Experiment 20001757 PARAMETER Experiment Name: At_50mM_NH4NO3_L-to-H_P Parameter: Timepoint (hr) Value: 6
  misc_feature: MA Experiment 20001757 PARAMETER Experiment Name: At_50mM_NH4NO3_L-to-H_P Parameter: Tissue Value: Leaf
  misc_feature: MA Experiment 20001757 PARAMETER Experiment Name: At_50mM_NH4NO3_L-to-H_P Parameter: Treatment Value: 50mM NH4NO3 vs 100mM Mannitol
atggcgaaaaatattttaccatctcctgtggtaaaaaaaaaacatttaccatctccagtacaaatgtcccacgacaacaaccgcttcttcttcctcatccctcggatttacaaagaaacttgtcttcacgttaatcacgccacgtgtctgaacccaatttccaacgtgtctctcacattctcgaattcgactcttttagtggttctcgtcctctctgggcttttagactgggctcgaaccatctccattccaccgataacatcgaaacccgccacgtgtcctccctcctctgtctctcgtctatatatccacgctcttgttcgtcgattcgagatcacacacacaaccaccaaacacaaagcttttcaaaacccagagaaaatgttcatcgagagcttcaaagtagagagtccaaatgtcaaatacacagagaatgagatcaattcggtgtacgattacgaaacaacagaggtcgtccacgagaatcgtaacggtacatatcaatgggtcgtgaagccaaagactgtcaaatacgatttcaaaacagacactcgtgtccccaaattaggggttatgcttgttggttggggaggaaacaatggatcaacactaaccgctggtgtcattgctaacaaagaaggaatatcgtgggcgactaaagacaaagtgcaacaagctaattactttggttcacttactcaagcttcatcgattcgtgttggctcttacaatggtgaagagatctatgctcctttcaagagtcttcttccaatggtgaatccagaggatgttgtgtttggtggttgggatataagtgacatgaatttagcagacgctatggctagagctagagttcttgatattgatctgcagaaacaacttagaccttacatggagaacatgatcccacttcctggtatctatgaccctgatttcatcgctgctaatcaaggttcacgtgctaatagcgtgatcaaaggtaccaagaaggaacaagttgatcacatcatcaaggacatgagggagtttaaggagaagaacaaagtggataagttggttgtgttatggactgcaaacacagagcgttatagcaatgtgattgtaggacttaacgatacgacggagaatctattggcttctgttgaaaaggacgagtctgagatctcgccgtctacgttgtatgcgattgcttgtgttcttgaaggcattcctttcatcaatgggagtcctcagaatacttttgtccccggtcttatcgaattggctatatcgaagaattgtttgattggtggggatgatttcaagagtggtcagactaagatgaaatccgttttggttgatttccttgttggagctggcattaagcctacttcgattgtgagctataatcatttgggaaacaacgacgggatgaacctctcagcgccacagactttccgctctaaggagatttcaaagagcaatgttgtagacgacatggtagctagtaatggcatcctctttgagcctggtgaacaccctgaccatgtcgttgtcatcaagtatgtgccatatgttgcggatagtaaaagagcaatggatgagtacacgtctgagatattcatgggagggaggaacactatagtgttgcataacacttgtgaggactctctcttggctgcaccaattatcttggatcttgtccttctcgctgaactcagcaccagaatccaatttaaagctgaaggagaggggaagtttcactctttccacccggtagctaccatactcagttacctcacaaaggcacctcttgtaccgcccggaacaccggtggttaacgctctgtcgaagcagcgggcaatgctggaaaacattcttagggcatgtgttgggcttgcgccagagaacaacatgatcatggagtacaagtgaaggatgaggaagaagaagtaaaggtacctaagatgaccttaggatatgaaggacactgctccattgtttcatttatatatatcattttgtatgtatattatatgaatgtgtgtgtgacggataatatggataagcttagggttaacttgtgtgatatggatctggtcggtttatttggtgagaagattagctaagcttttggatcaaatgtgtaaaagatttaagtaattatgcttgtgtctccttgtaatataaccaaacttatgatctatgaatatggattttc

SEQ ID NO: 44887 - protein, 637 aa, Arabidopsis thaliana
  peptide (1)..(637): Ceres Seq. ID no. 13575612
  misc_feature (188)..(622): Pfam Name: Myo-inositol-1-phosphate synthase Pfam Description: Myo-inositol-1-phosphate synthase
  misc_feature (128)..(637): Homolog of NCBI NO: 14548099 NR Description: Inositol-3-phosphate synthase
  misc_feature (128)..(637): Homolog of NCBI NO: 14548095 NR Description: Inositol-3-phosphate synthase
  misc_feature (128)..(637): Homolog of NCBI NO: 14548092 NR Description: Inositol-3-phosphate synthase
  misc_feature (128)..(637): Homolog of NCBI NO: 1161312 NR Description: myo-inositol-1-phosphate synthase
  misc_feature (129)..(637): Homolog of NCBI NO: 7488491 NR Description: inositol-3-phosphate synthase (EC 5.5.1.4)
  misc_feature (128)..(637): Homolog of NCBI NO: 15236025 NR Description: myo-inositol-1-phosphate synthase [Arabidopsis
  misc_feature (128)..(637): Homolog of NCBI NO: 14548093 NR Description: Inositol-3-phosphate synthase
  misc_feature (128)..(637): Homolog of NCBI NO: 14548098 NR Description: Inositol-3-phosphate synthase
  misc_feature (128)..(637): Homolog of NCBI NO: 973313 NR Description: myo-inositol 1-phosphate synthase isozyme-2
  misc_feature (128)..(637): Homolog of NCBI NO: 15227169 NR Description: myo-inositol 1-phosphate synthase -related
MAKNILPSPVVKKKHLPSPVQMSHDNNRFFFLIPRIYKETCLHVNHATCLNPISNVSLTFSNSTLLVVLVLSGLLDWARTISIPPITSKPATCPPSSVSRLYIHALVRRFEITHTTTKHKAFQNPEKMFIESFKVESPNVKYTENEINSVYDYETTEVVHENRNGTYQWVVKPKTVKYDFKTDTRVPKLGVMLVGWGGNNGSTLTAGVIANKEGISWATKDKVQQANYFGSLTQASSIRVGSYNGEEIYAPFKSLLPMVNPEDVVFGGWDISDMNLADAMARARVLDIDLQKQLRPYMENMIPLPGIYDPDFIAANQGSRANSVIKGTKKEQVDHIIKDMREFKEKNKVDKLVVLWTANTERYSNVIVGLNDTTENLLASVEKDESEISPSTLYAIACVLEGIPFINGSPQNTFVPGLIELAISKNCLIGGDDFKSGQTKMKSVLVDFLVGAGIKPTSIVSYNHLGNNDGMNLSAPQTFRSKEISKSNVVDDMVASNGILFEPGEHPDHVVVIKYVPYVADSKRAMDEYTSEIFMGGRNTIVLHNTCEDSLLAAPIILDLVLLAELSTRIQFKAEGEGKFHSFHPVATILSYLTKAPLVPPGTPVVNALSKQRAMLENILRACVGLAPENNMIMEYK

SEQ ID NO: 44888 - protein, 616 aa, Arabidopsis thaliana
  peptide (1)..(616): Ceres Seq. ID no. 13575613
  misc_feature (167)..(601): Pfam Name: Myo-inositol-1-phosphate synthase Pfam Description: Myo-inositol-1-phosphate synthase
  misc_feature (107)..(616): Homolog of NCBI NO: 14548099 NR Description: Inositol-3-phosphate synthase
  misc_feature (107)..(616): Homolog of NCBI NO: 14548095 NR Description: Inositol-3-phosphate synthase
  misc_feature (107)..(616): Homolog of NCBI NO: 14548092 NR Description: Inositol-3-phosphate synthase
  misc_feature (107)..(616): Homolog of NCBI NO: 1161312 NR Description: myo-inositol-1-phosphate synthase
  misc_feature (108)..(616): Homolog of NCBI NO: 7488491 NR Description: inositol-3-phosphate synthase (EC 5.5.1.4)
  misc_feature (107)..(616): Homolog of NCBI NO: 15236025 NR Description: myo-inositol-1-phosphate synthase [Arabidopsis
  misc_feature (107)..(616): Homolog of NCBI NO: 14548093 NR Description: Inositol-3-phosphate synthase
  misc_feature (107)..(616): Homolog of NCBI NO: 14548098 NR Description: Inositol-3-phosphate synthase
  misc_feature (107)..(616): Homolog of NCBI NO: 973313 NR Description: myo-inositol 1-phosphate synthase isozyme-2
  misc_feature (107)..(616): Homolog of NCBI NO: 15227169 NR Description: myo-inositol 1-phosphate synthase -related
MSHDNNRFFFLIPRIYKETCLHVNHATCLNPISNVSLTFSNSTLLVVLVLSGLLDWARTISIPPITSKPATCPPSSVSRLYIHALVRRFEITHTTTKHKAFQNPEKMFIESFKVESPNVKYTENEINSVYDYETTEVVHENRNGTYQWVVKPKTVKYDFKTDTRVPKLGVMLVGWGGNNGSTLTAGVIANKEGISWATKDKVQQANYFGSLTQASSIRVGSYNGEEIYAPFKSLLPMVNPEDVVFGGWDISDMNLADAMARARVLDIDLQKQLRPYMENMIPLPGIYDPDFIAANQGSRANSVIKGTKKEQVDHIIKDMREFKEKNKVDKLVVLWTANTERYSNVIVGLNDTTENLLASVEKDESEISPSTLYAIACVLEGIPFINGSPQNTFVPGLIELAISKNCLIGGDDFKSGQTKMKSVLVDFLVGAGIKPTSIVSYNHLGNNDGMNLSAPQTFRSKEISKSNVVDDMVASNGILFEPGEHPDHVVVIKYVPYVADSKRAMDEYTSEIFMGGRNTIVLHNTCEDSLLAAPIILDLVLLAELSTRIQFKAEGEGKFHSFHPVATILSYLTKAPLVPPGTPVVNALSKQRAMLENILRACVGLAPENNMIMEYK

SEQ ID NO: 44889 - protein, 510 aa, Arabidopsis thaliana
  peptide (1)..(510): Ceres Seq. ID no. 13575614
  misc_feature (61)..(495): Pfam Name: Myo-inositol-1-phosphate synthase Pfam Description: Myo-inositol-1-phosphate synthase
  misc_feature (1)..(510): Homolog of NCBI NO: 14548099 NR Description: Inositol-3-phosphate synthase
  misc_feature (1)..(510): Homolog of NCBI NO: 14548095 NR Description: Inositol-3-phosphate synthase
  misc_feature (1)..(510): Homolog of NCBI NO: 14548092 NR Description: Inositol-3-phosphate synthase
  misc_feature (1)..(510): Homolog of NCBI NO: 1161312 NR Description: myo-inositol-1-phosphate synthase
  misc_feature (2)..(510): Homolog of NCBI NO: 7488491 NR Description: inositol-3-phosphate synthase (EC 5.5.1.4)
  misc_feature (1)..(510): Homolog of NCBI NO: 15236025 NR Description: myo-inositol-1-phosphate synthase [Arabidopsis
  misc_feature (1)..(510): Homolog of NCBI NO: 14548093 NR Description: Inositol-3-phosphate synthase
  misc_feature (1)..(510): Homolog of NCBI NO: 14548098 NR Description: Inositol-3-phosphate synthase
  misc_feature (1)..(510): Homolog of NCBI NO: 973313 NR Description: myo-inositol 1-phosphate synthase isozyme-2
  misc_feature (1)..(510): Homolog of NCBI NO: 15227169 NR Description: myo-inositol 1-phosphate synthase -related
MFIESFKVESPNVKYTENEINSVYDYETTEVVHENRNGTYQWVVKPKTVKYDFKTDTRVPKLGVMLVGWGGNNGSTLTAGVIANKEGISWATKDKVQQANYFGSLTQASSIRVGSYNGEEIYAPFKSLLPMVNPEDVVFGGWDISDMNLADAMARARVLDIDLQKQLRPYMENMIPLPGIYDPDFIAANQGSRANSVIKGTKKEQVDHIIKDMREFKEKNKVDKLVVLWTANTERYSNVIVGLNDTTENLLASVEKDESEISPSTLYAIACVLEGIPFINGSPQNTFVPGLIELAISKNCLIGGDDFKSGQTKMKSVLVDFLVGAGIKPTSIVSYNHLGNNDGMNLSAPQTFRSKEISKSNVVDDMVASNGILFEPGEHPDHVVVIKYVPYVADSKRAMDEYTSEIFMGGRNTIVLHNTCEDSLLAAPIILDLVLLAELSTRIQFKAEGEGKFHSFHPVATILSYLTKAPLVPPGTPVVNALSKQRAMLENILRACVGLAPENNMIMEYK

SEQ ID NO: 44890 - DNA, 1777 bp, Arabidopsis thaliana
  misc_feature (1)..(1777): Ceres Seq. ID no. 12559619
  misc_feature: MA Experiment ID: 20000185 Result: Up-regulated in Transcription
  misc_feature: MA Experiment 20000185 PARAMETER Experiment Name: At_Roots__P Parameter: Age (day) Value: 7 vs. 21
  misc_feature: MA Experiment 20000185 PARAMETER Experiment Name: At_Roots__P Parameter: Organism Value: A. thaliana
  misc_feature: MA Experiment 20000185 PARAMETER Experiment Name: At_Roots__P Parameter: Tissue Value: Roots vs. Whole Plant
  misc_feature: MA Experiment ID: 20001557 Result: Up-regulated in Transcription
  misc_feature: MA Experiment 20001557 PARAMETER Experiment Name: At_Drought_Soil_Dry_P Parameter: Age (day) Value: 27
  misc_feature: MA Experiment 20001557 PARAMETER Experiment Name: At_Drought_Soil_Dry_P Parameter: Organism Value: A. thaliana
  misc_feature: MA Experiment 20001557 PARAMETER Experiment Name: At_Drought_Soil_Dry_P Parameter: Plant Line Value: WS
  misc_feature: MA Experiment 20001557 PARAMETER Experiment Name: At_Drought_Soil_Dry_P Parameter: Post Timepoint (hr) Value: 3
  misc_feature: MA Experiment 20001557 PARAMETER Experiment Name: At_Drought_Soil_Dry_P Parameter: Post-Treatment Value: Re-Water vs. No Drought
  misc_feature: MA Experiment 20001557 PARAMETER Experiment Name: At_Drought_Soil_Dry_P Parameter: Timepoint (day) Value: 13
  misc_feature: MA Experiment 20001557 PARAMETER Experiment Name: At_Drought_Soil_Dry_P Parameter: Treatment Value: Drought vs. No Drought
  misc_feature: MA Experiment ID: 20001905 Result: Up-regulated in Transcription
  misc_feature: MA Experiment 20001905 PARAMETER Experiment Name: At_Drought_Reproduction_P Parameter: Age (day) Value: 40
  misc_feature: MA Experiment 20001905 PARAMETER Experiment Name: At_Drought_Reproduction_P Parameter: Organism Value: A. thaliana
  misc_feature: MA Experiment 20001905 PARAMETER Experiment Name: At_Drought_Reproduction_P Parameter: Plant Line Value: WS
  misc_feature: MA Experiment 20001905 PARAMETER Experiment Name: At_Drought_Reproduction_P Parameter: Timepoint (day) Value: 10
  misc_feature: MA Experiment 20001905 PARAMETER Experiment Name: At_Drought_Reproduction_P Parameter: Tissue Value: Rosettes
  misc_feature: MA Experiment 20001905 PARAMETER Experiment Name: At_Drought_Reproduction_P Parameter: Treatment Value: Drought vs. No Drought
atcgtcagatttagcgatttcacctccattttcttcgatcagtgctagaaccagagcctacctagctcgcaccttaaggaggtgattcagtttacaagcaaaatggtgaagatttgctgcattggagctggatatgttggtggtccaaccatggctgtcattgctctaaagtgtccatctgttgaagtagctgttgttgatatctctgtgccaaggatcaatgcctggaacagtgatcagttaccgatctatgagcctggtcttgatgatgtcgttaagcagtgccgtggaaagaatctcttcttcagcaccgatgttgagaaacatgtgagagaggctgacattgtttttgtgtctgtcaacacccctactaagacccgtggtcttggagctggcaaagctgcggatttgacttactgggagagcgctgctcgtatgattgccgatgtttcggtttccgacaagattgttgttgagaaatcaactgttcctgtcaaaaccgcagaggcaattgagaagattcttacacacaacagcaaaggaatcaaattccagattctgtcaaaccctgagttccttgctgaaggaaccgctattgaagaccttttcatgcctgaccgtgtcctcatcggtggtcgtgaaacaactgaaggctttgcagccgtcaaagccttgaaagacatttatgcccaatgggtccctgaagagagaatcctcaccaccaatctatggtctgccgagctttccaagcttgcagctaatgccttcctagcccagagaatctcatcagtcaatgcaatgtccgctctctgtgaggcaactggcgccaatgtctcagaggtctcttatgctgtgggcaaagactctcgtattggtcccaagttcttgaactctagtgttgggttcggaggatcttgtttccagaaagatattctcaacttagtctacatctgcgaatgcaacggcttacccgaagttgctgagtactggaaacaagtcatcaagatcaacgactaccagaaaacccgatttgttaaccgcattgtctcttcaatgtttaacacagtctccaacaaaaagattgcggttctcggcttcgctttcaagaaagacactggagacactagagagactccagccattgatgtctgcaaaggtctgttaggtgacaaggctcgtctcagcatctacgacccacaagtcactgaagagcagatccaaagagacttaaccatgaacaaattcgactgggaccacccacttcatctccagcccatgagccccaccactgtgaagcaagtctcagtcgcttgggacgcatacactgcaaccaaagacgcccacggtatctgcattttaaccgagtgggacgagttcaagaaacttgatttccagcggatctttgagaatatgcagaaaccggcttttgtttttgacggtagaaacgtggtcgacgctgataaactcagggagattgggtttattgtttactccattggtaagccattggaccagtggctcaaggacatgcctgctcttgcctaaacaacaaccaaacctcttccttagcttttttctccattttttccgaattctcatgagtttttccatatatctttaactacagtatgtttgatcaataattgtttcttttgttcttcctattatgaattcctacagagattttaggtttggttcttgttggtaattatgtaccttgggttatcaaatattgtaagcttttcgaatattactttcataatataaaagttttccc

SEQ ID NO: 44891 - protein, 480 aa, Arabidopsis thaliana
  peptide (1)..(480): Ceres Seq. ID no. 12559620
  misc_feature (2)..(200): Pfam Name: UDP-glucose/GDP-mannose dehydrogenase family, Pfam Description: UDP-glucose/GDP-mannose dehydrogenase family,
  misc_feature (1)..(480): Homolog of NCBI NO: 15983404 NR Description: AT3g29360/MUO10_6 [Arabidopsis thaliana]
  misc_feature (1)..(480): Homolog of NCBI NO: 15228687 NR Description: UDP-glucose dehydrogenase, putative
  misc_feature (1)..(480): Homolog of NCBI NO: 21618158 NR Description: UDP-glucose dehydrogenase, putative [Arabidopsis
  misc_feature (1)..(480): Homolog of NCBI NO: 15242316 NR Description: UDP-glucose dehydrogenase-like protein
MVKICCIGAGYVGGPTMAVIALKCPSVEVAVVDISVPRINAWNSDQLPIYEPGLDDVVKQCRGKNLFFSTDVEKHVREADIVFVSVNTPTKTRGLGAGKAADLTYWESAARMIADVSVSDKIVVEKSTVPVKTAEAIEKILTHNSKGIKFQILSNPEFLAEGTAIEDLFMPDRVLIGGRETTEGFAAVKALKDIYAQWVPEERILTTNLWSAELSKLAANAFLAQRISSVNAMSALCEATGANVSEVSYAVGKDSRIGPKFLNSSVGFGGSCFQKDILNLVYICECNGLPEVAEYWKQVIKINDYQKTRFVNRIVSSMFNTVSNKKIAVLGFAFKKDTGDTRETPAIDVCKGLLGDKARLSIYDPQVTEEQIQRDLTMNKFDWDHPLHLQPMSPTTVKQVSVAWDAYTATKDAHGICILTEWDEFKKLDFQRIFENMQKPAFVFDGRNVVDADKLREIGFIVYSIGKPLDQWLKDMPALA

SEQ ID NO: 44892 - protein, 464 aa, Arabidopsis thaliana
  peptide (1)..(464): Ceres Seq. ID no. 12559621
  misc_feature (1)..(184): Pfam Name: UDP-glucose/GDP-mannose dehydrogenase family, Pfam Description: UDP-glucose/GDP-mannose dehydrogenase family,
  misc_feature (1)..(464): Homolog of NCBI NO: 15983404 NR Description: AT3g29360/MUO10_6 [Arabidopsis thaliana]
  misc_feature (1)..(464): Homolog of NCBI NO: 15228687 NR Description: UDP-glucose dehydrogenase, putative
  misc_feature (1)..(464): Homolog of NCBI NO: 21618158 NR Description: UDP-glucose dehydrogenase, putative [Arabidopsis
  misc_feature (1)..(464): Homolog of NCBI NO: 15242316 NR Description: UDP-glucose dehydrogenase-like protein
MAVIALKCPSVEVAVVDISVPRINAWNSDQLPIYEPGLDDVVKQCRGKNLFFSTDVEKHVREADIVFVSVNTPTKTRGLGAGKAADLTYWESAARMIADVSVSDKIVVEKSTVPVKTAEAIEKILTHNSKGIKFQILSNPEFLAEGTAIEDLFMPDRVLIGGRETTEGFAAVKALKDIYAQWVPEERILTTNLWSAELSKLAANAFLAQRISSVNAMSALCEATGANVSEVSYAVGKDSRIGPKFLNSSVGFGGSCFQKDILNLVYICECNGLPEVAEYWKQVIKINDYQKTRFVNRIVSSMFNTVSNKKIAVLGFAFKKDTGDTRETPAIDVCKGLLGDKARLSIYDPQVTEEQIQRDLTMNKFDWDHPLHLQPMSPTTVKQVSVAWDAYTATKDAHGICILTEWDEFKKLDFQRIFENMQKPAFVFDGRNVVDADKLREIGFIVYSIGKPLDQWLKDMPALA

SEQ ID NO: 44893 - protein, 369 aa, Arabidopsis thaliana
  peptide (1)..(369): Ceres Seq. ID no. 12559622
  misc_feature (1)..(89): Pfam Name: UDP-glucose/GDP-mannose dehydrogenase family, Pfam Description: UDP-glucose/GDP-mannose dehydrogenase family,
  misc_feature (1)..(369): Homolog of NCBI NO: 15983404 NR Description: AT3g29360/MUO10_6 [Arabidopsis thaliana]
  misc_feature (1)..(369): Homolog of NCBI NO: 15228687 NR Description: UDP-glucose dehydrogenase, putative
  misc_feature (1)..(369): Homolog of NCBI NO: 21618158 NR Description: UDP-glucose dehydrogenase, putative [Arabidopsis
  misc_feature (1)..(369): Homolog of NCBI NO: 15242316 NR Description: UDP-glucose dehydrogenase-like protein
MIADVSVSDKIVVEKSTVPVKTAEAIEKILTHNSKGIKFQILSNPEFLAEGTAIEDLFMPDRVLIGGRETTEGFAAVKALKDIYAQWVPEERILTTNLWSAELSKLAANAFLAQRISSVNAMSALCEATGANVSEVSYAVGKDSRIGPKFLNSSVGFGGSCFQKDILNLVYICECNGLPEVAEYWKQVIKINDYQKTRFVNRIVSSMFNTVSNKKIAVLGFAFKKDTGDTRETPAIDVCKGLLGDKARLSIYDPQVTEEQIQRDLTMNKFDWDHPLHLQPMSPTTVKQVSVAWDAYTATKDAHGICILTEWDEFKKLDFQRIFENMQKPAFVFDGRNVVDADKLREIGFIVYSIGKPLDQWLKDMPALA

SEQ ID NO: 44894 - DNA, 3759 bp, Arabidopsis thaliana
  misc_feature (1)..(3759): Ceres Seq. ID no. 12559623
  misc_feature: MA Experiment ID: 20000180 Result: Down-regulated in Transcription
  misc_feature: MA Experiment 20000180 PARAMETER Experiment Name: At_Germinating_Seeds_P Parameter: Age (hr) Value: 24 vs. 0
  misc_feature: MA Experiment 20000180 PARAMETER Experiment Name: At_Germinating_Seeds_P Parameter: Tissue Value: Germinating Seeds
  misc_feature: MA Experiment ID: 20000234 Result: Up-regulated in Transcription
  misc_feature: MA Experiment 20000234 PARAMETER Experiment Name: At_Siliques_P Parameter: Age (day) Value: 21
  misc_feature: MA Experiment 20000234 PARAMETER Experiment Name: At_Siliques_P Parameter: Organism Value: A. thaliana
  misc_feature: MA Experiment 20000234 PARAMETER Experiment Name: At_Siliques_P Parameter: Plant Line Value: WS
  misc_feature: MA Experiment 20000234 PARAMETER Experiment Name: At_Siliques_P Parameter: Tissue Value: Less Than 5mm Siliques vs. Whole Plant
  misc_feature: MA Experiment ID: 20000235 Result: Up-regulated in Transcription
  misc_feature: MA Experiment 20000235 PARAMETER Experiment Name: At_Siliques_P Parameter: Age (day) Value: 21
  misc_feature: MA Experiment 20000235 PARAMETER Experiment Name: At_Siliques_P Parameter: Organism Value: A. thaliana
  misc_feature: MA Experiment 20000235 PARAMETER Experiment Name: At_Siliques_P Parameter: Plant Line Value: WS
  misc_feature: MA Experiment 20000235 PARAMETER Experiment Name: At_Siliques_P Parameter: Tissue Value: 5-10mm Siliques vs. Whole Plant
  misc_feature: MA Experiment ID: 20000265 Result: Up-regulated in Transcription
  misc_feature: MA Experiment 20000265 PARAMETER Experiment Name: At_Open_Flower_P Parameter: Age (day) Value: 21
  misc_feature: MA Experiment 20000265 PARAMETER Experiment Name: At_Open_Flower_P Parameter: Plant Line Value: WS
  misc_feature: MA Experiment 20000265 PARAMETER Experiment Name: At_Open_Flower_P Parameter: Tissue Value: Closed Flower vs. Whole Plant
  misc_feature: MA Experiment ID: 20000286 Result: Up-regulated in Transcription
  misc_feature: MA Experiment 20000286 PARAMETER Experiment Name: At_Open_Flower_P Parameter: Age (day) Value: 21
  misc_feature: MA Experiment 20000286 PARAMETER Experiment Name: At_Open_Flower_P Parameter: Plant Line Value: WS
  misc_feature: MA Experiment 20000286 PARAMETER Experiment Name: At_Open_Flower_P Parameter: Tissue Value: Half Open vs. Whole Plant
atgcagcaaaactctgttcttcttgctctgtttttcctctgtttctcatccgggttgggttcgggtcaaccgggtcaaagagacgatcttcaaactcttctcgaactgaagaactcttttatcacaaacccaaaagaagaagacgttctccgagattggaattccggtagtcccagttactgcaactggaccggcgtcacatgcggtggtcgtgaaatcatcggtttaaatctctccggtttaggtttaaccggttcaatttctccttcgatcggccggtttaacaacctaatccacatcgatttgtcttcgaaccgtcttgtcggtcccatcccaacgactctctctaacctctcctcttcattggaatcgttgcatctcttctctaacctactcagtggcgatataccgagtcaactcggctcacttgtgaatctcaaatcgttaaaactcggagacaacgaactcaacggaacaatcccggagacgtttgggaacctcgtcaacctccagatgcttgctttggcttcgtgtagactcaccggtcttataccgagtcgattcggtagactcgttcagctccagactttgatactacaagacaacgaactcgaaggaccgattccggcggaaatcggaaactgcaccagcctcgctttgtttgccgcggcgtttaatcgtctcaacggttcgttaccggcggagctgaatcgacttaagaacctccagacgctgaatttgggagataacagtttctccggtgagataccgagtcaactcggtgatttggttagtatccaataccttaatttgattggtaatcagttacagggtttgattccaaagagattaacagaattagcgaatcttcaaacacttgatttgtcttctaataatctcaccggagtgatacacgaagagttctggagaatgaatcagcttgagttcttggtattagcgaaaaatcgtctctctggttcgttaccaaagactatatgttctaacaacacaagcttgaagcaactgtttctgtctgaaactcagctttccggcgaaattccagcggaaatcagcaactgtcagtcattaaaattgcttgatttgtcgaacaatacgcttacaggtcaaatcccggattcgttgtttcagctcgtcgaactcacgaatctttatcttaacaacaatagcttggagggtacgttatcttcatcaatatcaaacctcacgaatctacaagagtttactctctatcacaataacttggaaggcaaggtacctaaagaaatcggatttcttggtaaattggagattatgtatctgtatgagaatcggttttcgggtgaaatgccggttgagattgggaattgcacgagactgcaggagattgattggtacgggaatcgtttaagtggagagattccttcttcaattggaagattgaaagatcttactcgtcttcacttgagagagaacgagcttgtaggtaacattcccgccagtttaggtaactgtcatcaaatgacggttatcgatttagcggataaccagctctcgggttcaattccttcctcgttcgggttcttaacggcattagaactgtttatgatctacaacaattctcttcaaggaaatcttccggattcacttatcaacctcaagaacctcacaagaatcaatttttcaagcaacaagttcaatggttcgataagtccattgtgcggttcaagctcgtatctctcgtttgatgtcacggaaaacggatttgagggagatatacctcttgagctaggtaagtctacgaatcttgatcggttaaggctggggaagaatcagttcacaggaagaatccctcggacatttgggaagatcagtgagctttctttattggatatttcaagaaactctctctcaggaatcataccggtggagctcggtttgtgcaagaagctgacacacattgatctcaacaataactatctttcaggggtgatacctacatggcttggaaagcttccattgttgggagagctaaagctttcttctaataagtttgttgggtctctccctactgagattttcagcttaaccaatattcttacgctatttcttgatggtaactcactcaacggctcgatcccgcaagagattggtaacttgcaagctctcaatgcgttgaacctcgaagagaatcagctttcaggtcctctgccttctacaatagggaaactgagcaagcttttcgagcttcggttatcgagaaacgctttaaccggagagattcctgttgagattggacagctgcaagatcttcaaagtgctttagatctcagctacaacaactttaccggacgtataccgtctacgatttcgacgttacctaagcttgaatctcttgatctgtctcacaatcagcttgtaggagaagttcctggccaaatcggtgacatgaaaagcttgggatatcttaacctctcttacaacaaccttgagggaaagttaaagaaacagttctctagatggcaagctgatgcgtttgtaggcaatgcaggtctttgtggaagccctcttagtcattgcaacagagctggatcaaagaatcaacgaagtcttagtccgaaaacagtggttataatctctgcgatttcatcattagcagcgattgctttgatggtacttgttatcatcctcttcttcaagcaaaaccatgatcttttcaagaaagtgcgaggcggaaacagcgcattttcatcgaactcttcttcttcacaagctcctctatttagtaatggaggtgcaaagtcagatataaagtgggatgacataatggaagctacacattaccttaacgaagagttcatgattggatcaggagggtcaggaaaagtttacaaagcggagttaaagaacggcgagacgatagctgtgaagaagattctttggaaagatgatttgatgtcaaacaagagctttaacagagaagttaagacacttggaacaatcagacatagacatttggttaagctaatgggttattgtagcagtaaagcagatggtttgaatctgttgatctacgagtatatggcgaatggaagcgtttgggattggcttcatgccaacgagaatacgaagaaaaaggaggttcttggttgggaaacaagattgaaaatagcacttgggttggctcaaggagtggagtatcttcattatgactgtgttcctccgattgttcatcgcgatattaagtctagtaatgtgcttcttgattccaacatagaagcacatttaggagatttcggactcgccaagatcctaaccgggaattatgacaccaacacagaatcaaacactatgtttgcaggctcttatggctacatcgcgccagagtatgcgtactcgttgaaggcgactgagaagagcgatgtttacagtatggggatagtgttgatggagattgtgactggtaaaatgccaaccgaagcaatgtttgatgaagagacggatatggtgagatgggtagagacagttcttgatacacctccgggttctgaagcaagagagaagctgattgattcagagcttaaatcgctgttaccttgcgaagaagaagcagcttatcaggttcttgaaatagcacttcagtgcacaaaaagttatcctcaagagagaccttcttcaagacaagctagtgaatatcttcttaatgtcttcaacaatagagctgccagttacagggagatgcaaactgataccgataaatga

SEQ ID NO: 44895 - protein, 1252 aa, Arabidopsis thaliana
  peptide (1)..(1252): Ceres Seq. ID no. 12559624
  misc_feature (173)..(1224): Homolog of NCBI NO: 7434426 NR Description: hypothetical protein F23E13.70 - Arabidopsis
  misc_feature (256)..(1239): Homolog of NCBI NO: 29119653 NR Description: LRR receptor-like kinase 2 [Arabidopsis thaliana]
  misc_feature (256)..(1239): Homolog of NCBI NO: 15229457 NR Description: leucine-rich repeat transmembrane protein kinase,
  misc_feature (256)..(1235): Homolog of NCBI NO: 30692999 NR Description: leucine-rich repeat transmembrane protein kinase,
  misc_feature (148)..(1245): Homolog of NCBI NO: 28392988 NR Description: putative leucine-rich repeat transmembrane
  misc_feature (148)..(1245): Homolog of NCBI NO: 15237426 NR Description: leucine-rich repeat transmembrane protein kinase,
  misc_feature (216)..(1227): Homolog of NCBI NO: 15225805 NR Description: putative receptor-like protein kinase; protein
  misc_feature (215)..(1250): Homolog of NCBI NO: 15220056 NR Description: putative leucine-rich receptor protein kinase
  misc_feature (228)..(1252): Homolog of NCBI NO: 15237562 NR Description: leucine-rich repeat transmembrane protein kinase,
  misc_feature (29)..(1235): Homolog of NCBI NO: 34901854 NR Description: putative receptor protein kinase
MQQNSVLLALFFLCFSSGLGSGQPGQRDDLQTLLELKNSFITNPKEEDVLRDWNSGSPSYCNWTGVTCGGREIIGLNLSGLGLTGSISPSIGRFNNLIHIDLSSNRLVGPIPTTLSNLSSSLESLHLFSNLLSGDIPSQLGSLVNLKSLKLGDNELNGTIPETFGNLVNLQMLALASCRLTGLIPSRFGRLVQLQTLILQDNELEGPIPAEIGNCTSLALFAAAFNRLNGSLPAELNRLKNLQTLNLGDNSFSGEIPSQLGDLVSIQYLNLIGNQLQGLIPKRLTELANLQTLDLSSNNLTGVIHEEFWRMNQLEFLVLAKNRLSGSLPKTICSNNTSLKQLFLSETQLSGEIPAEISNCQSLKLLDLSNNTLTGQIPDSLFQLVELTNLYLNNNSLEGTLSSSISNLTNLQEFTLYHNNLEGKVPKEIGFLGKLEIMYLYENRFSGEMPVEIGNCTRLQEIDWYGNRLSGEIPSSIGRLKDLTRLHLRENELVGNIPASLGNCHQMTVIDLADNQLSGSIPSSFGFLTALELFMIYNNSLQGNLPDSLINLKNLTRINFSSNKFNGSISPLCGSSSYLSFDVTENGFEGDIPLELGKSTNLDRLRLGKNQFTGRIPRTFGKISELSLLDISRNSLSGIIPVELGLCKKLTHIDLNNNYLSGVIPTWLGKLPLLGELKLSSNKFVGSLPTEIFSLTNILTLFLDGNSLNGSIPQEIGNLQALNALNLEENQLSGPLPSTIGKLSKLFELRLSRNALTGEIPVEIGQLQDLQSALDLSYNNFTGRIPSTISTLPKLESLDLSHNQLVGEVPGQIGDMKSLGYLNLSYNNLEGKLKKQFSRWQADAFVGNAGLCGSPLSHCNRAGSKNQRSLSPKTVVIISAISSLAAIALMVLVIILFFKQNHDLFKKVRGGNSAFSSNSSSSQAPLFSNGGAKSDIKWDDIMEATHYLNEEFMIGSGGSGKVYKAELKNGETIAVKKILWKDDLMSNKSFNREVKTLGTIRHRHLVKLMGYCSSKADGLNLLIYEYMANGSVWDWLHANENTKKKEVLGWETRLKIALGLAQGVEYLHYDCVPPIVHRDIKSSNVLLDSNIEAHLGDFGLAKILTGNYDTNTESNTMFAGSYGYIAPEYAYSLKATEKSDVYSMGIVLMEIVTGKMPTEAMFDEETDMVRWVETVLDTPPGSEAREKLIDSELKSLLPCEEEAAYQVLEIALQCTKSYPQERPSSRQASEYLLNVFNNRAASYREMQTDTDK

SEQ ID NO: 44896 - protein, 1081 aa, Arabidopsis thaliana
  peptide (1)..(1081): Ceres Seq. ID no. 12559625
  misc_feature (2)..(1053): Homolog of NCBI NO: 7434426 NR Description: hypothetical protein F23E13.70 - Arabidopsis
  misc_feature (85)..(1068): Homolog of NCBI NO: 29119653 NR Description: LRR receptor-like kinase 2 [Arabidopsis thaliana]
  misc_feature (85)..(1068): Homolog of NCBI NO: 15229457 NR Description: leucine-rich repeat transmembrane protein kinase,
  misc_feature (85)..(1064): Homolog of NCBI NO: 30692999 NR Description: leucine-rich repeat transmembrane protein kinase,
  misc_feature (1)..(1074): Homolog of NCBI NO: 28392988 NR Description: putative leucine-rich repeat transmembrane
  misc_feature (1)..(1074): Homolog of NCBI NO: 15237426 NR Description: leucine-rich repeat transmembrane protein kinase,
  misc_feature (45)..(1056): Homolog of NCBI NO: 15225805 NR Description: putative receptor-like protein kinase; protein
  misc_feature (44)..(1079): Homolog of NCBI NO: 15220056 NR Description: putative leucine-rich receptor protein kinase
  misc_feature (57)..(1081): Homolog of NCBI NO: 15237562 NR Description: leucine-rich repeat transmembrane protein kinase,
  misc_feature (1)..(1064): Homolog of NCBI NO: 34901854 NR Description: putative receptor protein kinase
MLALASCRLTGLIPSRFGRLVQLQTLILQDNELEGPIPAEIGNCTSLALFAAAFNRLNGSLPAELNRLKNLQTLNLGDNSFSGEIPSQLGDLVSIQYLNLIGNQLQGLIPKRLTELANLQTLDLSSNNLTGVIHEEFWRMNQLEFLVLAKNRLSGSLPKTICSNNTSLKQLFLSETQLSGEIPAEISNCQSLKLLDLSNNTLTGQIPDSLFQLVELTNLYLNNNSLEGTLSSSISNLTNLQEFTLYHNNLEGKVPKEIGFLGKLEIMYLYENRFSGEMPVEIGNCTRLQEIDWYGNRLSGEIPSSIGRLKDLTRLHLRENELVGNIPASLGNCHQMTVIDLADNQLSGSIPSSFGFLTALELFMIYNNSLQGNLPDSLINLKNLTRINFSSNKFNGSISPLCGSSSYLSFDVTENGFEGDIPLELGKSTNLDRLRLGKNQFTGRIPRTFGKISELSLLDISRNSLSGIIPVELGLCKKLTHIDLNNNYLSGVIPTWLGKLPLLGELKLSSNKFVGSLPTEIFSLTNILTLFLDGNSLNGSIPQEIGNLQALNALNLEENQLSGPLPSTIGKLSKLFELRLSRNALTGEIPVEIGQLQDLQSALDLSYNNFTGRIPSTISTLPKLESLDLSHNQLVGEVPGQIGDMKSLGYLNLSYNNLEGKLKKQFSRWQADAFVGNAGLCGSPLSHCNRAGSKNQRSLSPKTVVIISAISSLAAIALMVLVIILFFKQNHDLFKKVRGGNSAFSSNSSSSQAPLFSNGGAKSDIKWDDIMEATHYLNEEFMIGSGGSGKVYKAELKNGETIAVKKILWKDDLMSNKSFNREVKTLGTIRHRHLVKLMGYCSSKADGLNLLIYEYMANGSVWDWLHANENTKKKEVLGWETRLKIALGLAQGVEYLHYDCVPPIVHRDIKSSNVLLDSNIEAHLGDFGLAKILTGNYDTNTESNTMFAGSYGYIAPEYAYSLKATEKSDVYSMGIVLMEIVTGKMPTEAMFDEETDMVRWVETVLDTPPGSEAREKLIDSELKSLLPCEEEAAYQVLEIALQCTKSYPQERPSSRQASEYLLNVFNNRAASYREMQTDTDK

SEQ ID NO: 44897 - protein, 942 aa, Arabidopsis thaliana
  peptide (1)..(942): Ceres Seq. ID no. 12559626
  misc_feature (1)..(914): Homolog of NCBI NO: 7434426 NR Description: hypothetical protein F23E13.70 - Arabidopsis
  misc_feature (1)..(929): Homolog of NCBI NO: 29119653 NR Description: LRR receptor-like kinase 2 [Arabidopsis thaliana]
  misc_feature (1)..(929): Homolog of NCBI NO: 15229457 NR Description: leucine-rich repeat transmembrane protein kinase,
  misc_feature (1)..(925): Homolog of NCBI NO: 30692999 NR Description: leucine-rich repeat transmembrane protein kinase,
  misc_feature (1)..(935): Homolog of NCBI NO: 28392988 NR Description: putative leucine-rich repeat transmembrane
  misc_feature (1)..(935): Homolog of NCBI NO: 15237426 NR Description: leucine-rich repeat transmembrane protein kinase,
  misc_feature (1)..(917): Homolog of NCBI NO: 15225805 NR Description: putative receptor-like protein kinase; protein
  misc_feature (1)..(940): Homolog of NCBI NO: 15220056 NR Description: putative leucine-rich receptor protein kinase
  misc_feature (1)..(942): Homolog of NCBI NO: 15237562 NR Description: leucine-rich repeat transmembrane protein kinase,
  misc_feature (1)..(925): Homolog of NCBI NO: 34901854 NR Description: putative receptor protein kinase
MNQLEFLVLAKNRLSGSLPKTICSNNTSLKQLFLSETQLSGEIPAEISNCQSLKLLDLSNNTLTGQIPDSLFQLVELTNLYLNNNSLEGTLSSSISNLTNLQEFTLYHNNLEGKVPKEIGFLGKLEIMYLYENRFSGEMPVEIGNCTRLQEIDWYGNRLSGEIPSSIGRLKDLTRLHLRENELVGNIPASLGNCHQMTVIDLADNQLSGSIPSSFGFLTALELFMIYNNSLQGNLPDSLINLKNLTRINFSSNKFNGSISPLCGSSSYLSFDVTENGFEGDIPLELGKSTNLDRLRLGKNQFTGRIPRTFGKISELSLLDISRNSLSGIIPVELGLCKKLTHIDLNNNYLSGVIPTWLGKLPLLGELKLSSNKFVGSLPTEIFSLTNILTLFLDGNSLNGSIPQEIGNLQALNALNLEENQLSGPLPSTIGKLSKLFELRLSRNALTGEIPVEIGQLQDLQSALDLSYNNFTGRIPSTISTLPKLESLDLSHNQLVGEVPGQIGDMKSLGYLNLSYNNLEGKLKKQFSRWQADAFVGNAGLCGSPLSHCNRAGSKNQRSLSPKTVVIISAISSLAAIALMVLVIILFFKQNHDLFKKVRGGNSAFSSNSSSSQAPLFSNGGAKSDIKWDDIMEATHYLNEEFMIGSGGSGKVYKAELKNGETIAVKKILWKDDLMSNKSFNREVKTLGTIRHRHLVKLMGYCSSKADGLNLLIYEYMANGSVWDWLHANENTKKKEVLGWETRLKIALGLAQGVEYLHYDCVPPIVHRDIKSSNVLLDSNIEAHLGDFGLAKILTGNYDTNTESNTMFAGSYGYIAPEYAYSLKATEKSDVYSMGIVLMEIVTGKMPTEAMFDEETDMVRWVETVLDTPPGSEAREKLIDSELKSLLPCEEEAAYQVLEIALQCTKSYPQERPSSRQASEYLLNVFNNRAASYREMQTDTDK

SEQ ID NO: 44898 - DNA, 1372 bp, Arabidopsis thaliana
  misc_feature (1)..(1372): Ceres Seq. ID no. 13575618
gttctcatccataaaccaacgaaaaatgaaggaccaacttggattcagaattgtgctctgttctgcggttttcataattctgactcaaaacagagctctcgcagacttggacagcgagtcccatgaggttaactcagaatcggtaggagaagaacaatgggagatggtgcagaggaaagggatgcaattcactctaaatggacaaccattctatgtgaatggcttcaacacatactggatgatgactcttgcagctgacaattccacgagaggcaaagtgacggaagtgttccaacaagcctctgcggttggaatgacggtaggcaggacatgggctttcaacgatggccaatggagagctctccagaaatctccctctgtttacgatgaagaggtcttcaaggccctcgacttcgtgctgagcgaggccagaaagtacaaaatcaggcttatactgtcattggtcaacaactgggacgcctatggcggcaaagctcagtacgttaaatggggaaacgcctccggccttaatctcacttccgatgacgacttcttcaccaaccccaccctcagaaacttctaccaatcccatgtccggacagtgctgaatagagtgaacaccttcacaaacataacttacaagaacgaccccacaatcttcgcctgggaacttatgaatgagcctcgttgcccctctgatccttccggcgacaaactccagtcttggatacaagaaatggcggtgtttgtgaagagcttagacgctaaacacttggtggagatcggacttgaaggcttctatggtccctctgcccctgcgagaaccagattcaaccccaacccctacgctgcacaagtcggaactgacttcatcagaaataatcaggttcttggcattgattttgcctcggttcacgtctatccagattcctggatatctccggcagtatcaaattctttcctggaattcacaagctcttggatgcaagctcatgttgaggacgcagagatgtacttgggaatgccggttctgttcacagagtttggtgtgtctgcacatgaccctggtttcaacacgtctttccgtgacatgatgttgaacacagtgtacaagatgaccctcaactcaacaaggaaaggaggggctggtgccgggagtctggtctggcaggtcttccctcagggggcagagttcatggatgacggctatgcggtttacctcacaagagctcacacagcttcaaaaatcatatctctgcagtcaaagcgactagccatcttcaactccttgtgtagctggagatgcagatggggatgcaagaaaaagaatcagactgctcttgatgccctcctctcgcacgacgagctttaa

SEQ ID NO: 44899 - protein, 456 aa, Arabidopsis thaliana
  peptide (1)..(456): Ceres Seq. ID no. 13575619
  misc_feature (60)..(384): Pfam Name: Cellulase (glycosyl hydrolase family 5) Pfam Description: Cellulase (glycosyl hydrolase family 5)
  misc_feature (20)..(434): Homolog of NCBI NO: 10129675 NR Description: (1-4)-beta-mannan endohydrolase [Coffea arabica]
  misc_feature (56)..(424): Homolog of NCBI NO: 22382040 NR Description: inactive endo-beta-mannanase [Lycopersicon
  misc_feature (56)..(424): Homolog of NCBI NO: 21307619 NR Description: mannan endo-1,4-beta-mannosidase [Lycopersicon
  misc_feature (54)..(425): Homolog of NCBI NO: 23477717 NR Description: endo-beta-mannanase [Daucus carota]
  misc_feature (56)..(425): Homolog of NCBI NO: 15529113 NR Description: endo-beta-mannanase [Lycopersicon esculentum]
  misc_feature (19)..(421): Homolog of NCBI NO: 37544517 NR Description: mannan endo-1,4-beta-mannosidase precursor
  misc_feature (56)..(424): Homolog of NCBI NO: 34912090 NR Description: putative mannan endo-1,4-beta-mannosidase
  misc_feature (56)..(430): Homolog of NCBI NO: 15239973 NR Description: glycosyl hydrolase family 5/cellulase
  misc_feature (39)..(425): Homolog of NCBI NO: 10178872 NR Description: (1-4)-beta-mannan endohydrolase [Coffea arabica]
  misc_feature (9)..(456): Homolog of NCBI NO: 15241093 NR Description: glycosyl hydrolase family 5/cellulase
FSSINQRKMKDQLGFRIVLCSAVFIILTQNRALADLDSESHEVNSESVGEEQWEMVQRKGMQFTLNGQPFYVNGFNTYWMMTLAADNSTRGKVTEVFQQASAVGMTVGRTWAFNDGQWRALQKSPSVYDEEVFKALDFVLSEARKYKIRLILSLVNNWDAYGGKAQYVKWGNASGLNLTSDDDFFTNPTLRNFYQSHVRTVLNRVNTFTNITYKNDPTIFAWELMNEPRCPSDPSGDKLQSWIQEMAVFVKSLDAKHLVEIGLEGFYGPSAPARTRFNPNPYAAQVGTDFIRNNQVLGIDFASVHVYPDSWISPAVSNSFLEFTSSWMQAHVEDAEMYLGMPVLFTEFGVSAHDPGFNTSFRDMMLNTVYKMTLNSTRKGGAGAGSLVWQVFPQGAEFMDDGYAVYLTRAHTASKIISLQSKRLAIFNSLCSWRCRWGCKKKNQTALDALLSHDEL

SEQ ID NO: 44900 - protein, 448 aa, Arabidopsis thaliana
  peptide (1)..(448): Ceres Seq. ID no. 13575620
  misc_feature (52)..(376): Pfam Name: Cellulase (glycosyl hydrolase family 5) Pfam Description: Cellulase (glycosyl hydrolase family 5)
  misc_feature (12)..(426): Homolog of NCBI NO: 10129675 NR Description: (1-4)-beta-mannan endohydrolase [Coffea arabica]
  misc_feature (48)..(416): Homolog of NCBI NO: 22382040 NR Description: inactive endo-beta-mannanase [Lycopersicon
  misc_feature (48)..(416): Homolog of NCBI NO: 21307619 NR Description: mannan endo-1,4-beta-mannosidase [Lycopersicon
  misc_feature (46)..(417): Homolog of NCBI NO: 23477717 NR Description: endo-beta-mannanase [Daucus carota]
  misc_feature (48)..(417): Homolog of NCBI NO: 15529113 NR Description: endo-beta-mannanase [Lycopersicon esculentum]
  misc_feature (11)..(413): Homolog of NCBI NO: 37544517 NR Description: mannan endo-1,4-beta-mannosidase precursor
  misc_feature (48)..(416): Homolog of NCBI NO: 34912090 NR Description: putative mannan endo-1,4-beta-mannosidase
  misc_feature (48)..(422): Homolog of NCBI NO: 15239973 NR Description: glycosyl hydrolase family 5/cellulase
  misc_feature (31)..(417): Homolog of NCBI NO: 10178872 NR Description: (1-4)-beta-mannan endohydrolase [Coffea arabica]
  misc_feature (1)..(448): Homolog of NCBI NO: 15241093 NR Description: glycosyl hydrolase family 5/cellulase
MKDQLGFRIVLCSAVFIILTQNRALADLDSESHEVNSESVGEEQWEMVQRKGMQFTLNGQPFYVNGFNTYWMMTLAADNSTRGKVTEVFQQASAVGMTVGRTWAFNDGQWRALQKSPSVYDEEVFKALDFVLSEARKYKIRLILSLVNNWDAYGGKAQYVKWGNASGLNLTSDDDFFTNPTLRNFYQSHVRTVLNRVNTFTNITYKNDPTIFAWELMNEPRCPSDPSGDKLQSWIQEMAVFVKSLDAKHLVEIGLEGFYGPSAPARTRFNPNPYAAQVGTDFIRNNQVLGIDFASVHVYPDSWISPAVSNSFLEFTSSWMQAHVEDAEMYLGMPVLFTEFGVSAHDPGFNTSFRDMMLNTVYKMTLNSTRKGGAGAGSLVWQVFPQGAEFMDDGYAVYLTRAHTASKIISLQSKRLAIFNSLCSWRCRWGCKKKNQTALDALLSHDEL

SEQ ID NO: 44901 - protein, 402 aa, Arabidopsis thaliana
  peptide (1)..(402): Ceres Seq. ID no. 13575621
  misc_feature (6)..(330): Pfam Name: Cellulase (glycosyl hydrolase family 5) Pfam Description: Cellulase (glycosyl hydrolase family 5)
  misc_feature (1)..(380): Homolog of NCBI NO: 10129675 NR Description: (1-4)-beta-mannan endohydrolase [Coffea arabica]
  misc_feature (2)..(370): Homolog of NCBI NO: 22382040 NR Description: inactive endo-beta-mannanase [Lycopersicon
  misc_feature (2)..(370): Homolog of NCBI NO: 21307619 NR Description: mannan endo-1,4-beta-mannosidase [Lycopersicon
  misc_feature (1)..(371): Homolog of NCBI NO: 23477717 NR Description: endo-beta-mannanase [Daucus carota]
  misc_feature (2)..(371): Homolog of NCBI NO: 15529113 NR Description: endo-beta-mannanase [Lycopersicon esculentum]
  misc_feature (1)..(367): Homolog of NCBI NO: 37544517 NR Description: mannan endo-1,4-beta-mannosidase precursor
  misc_feature (2)..(370): Homolog of NCBI NO: 34912090 NR Description: putative mannan endo-1,4-beta-mannosidase
  misc_feature (2)..(376): Homolog of NCBI NO: 15239973 NR Description: glycosyl hydrolase family 5/cellulase
  misc_feature (1)..(371): Homolog of NCBI NO: 10178872 NR Description: (1-4)-beta-mannan endohydrolase [Coffea arabica]
  misc_feature (1)..(402): Homolog of NCBI NO: 15241093 NR Description: glycosyl hydrolase family 5/cellulase
MVQRKGMQFTLNGQPFYVNGFNTYWMMTLAADNSTRGKVTEVFQQASAVGMTVGRTWAFNDGQWRALQKSPSVYDEEVFKALDFVLSEARKYKIRLILSLVNNWDAYGGKAQYVKWGNASGLNLTSDDDFFTNPTLRNFYQSHVRTVLNRVNTFTNITYKNDPTIFAWELMNEPRCPSDPSGDKLQSWIQEMAVFVKSLDAKHLVEIGLEGFYGPSAPARTRFNPNPYAAQVGTDFIRNNQVLGIDFASVHVYPDSWISPAVSNSFLEFTSSWMQAHVEDAEMYLGMPVLFTEFGVSAHDPGFNTSFRDMMLNTVYKMTLNSTRKGGAGAGSLVWQVFPQGAEFMDDGYAVYLTRAHTASKIISLQSKRLAIFNSLCSWRCRWGCKKKNQTALDALLSHDEL

SEQ ID NO: 44902 - DNA, 2826 bp, Arabidopsis thaliana
  misc_feature (1)..(2826): Ceres Seq. ID no. 13575622
  misc_feature: MA Experiment ID: 20000185 Result: Up-regulated in Transcription
  misc_feature: MA Experiment 20000185 PARAMETER Experiment Name: At_Roots__P Parameter: Age (day) Value: 7 vs. 21
  misc_feature: MA Experiment 20000185 PARAMETER Experiment Name: At_Roots__P Parameter: Organism Value: A. thaliana
  misc_feature: MA Experiment 20000185 PARAMETER Experiment Name: At_Roots__P Parameter: Tissue Value: Roots vs. Whole Plant
  misc_feature: MA Experiment ID: 20000234 Result: Up-regulated in Transcription
  misc_feature: MA Experiment 20000234 PARAMETER Experiment Name: At_Siliques_P Parameter: Age (day) Value: 21
  misc_feature: MA Experiment 20000234 PARAMETER Experiment Name: At_Siliques_P Parameter: Organism Value: A. thaliana
  misc_feature: MA Experiment 20000234 PARAMETER Experiment Name: At_Siliques_P Parameter: Plant Line Value: WS
  misc_feature: MA Experiment 20000234 PARAMETER Experiment Name: At_Siliques_P Parameter: Tissue Value: Less Than 5mm Siliques vs. Whole Plant
  misc_feature: MA Experiment ID: 20000264 Result: Up-regulated in Transcription
  misc_feature: MA Experiment 20000264 PARAMETER Experiment Name: At_Open_Flower_P Parameter: Age (day) Value: 21
  misc_feature: MA Experiment 20000264 PARAMETER Experiment Name: At_Open_Flower_P Parameter: Plant Line Value: WS
  misc_feature: MA Experiment 20000264 PARAMETER Experiment Name: At_Open_Flower_P Parameter: Tissue Value: Open Flower vs. Whole Plant
  misc_feature: MA Experiment ID: 20000439 Result: Up-regulated in Transcription
  misc_feature: MA Experiment 20000439 PARAMETER Experiment Name: At_Roots__P Parameter: Age (day) Value: 14 vs. 21
  misc_feature: MA Experiment 20000439 PARAMETER Experiment Name: At_Roots__P Parameter: Organism Value: A. thaliana
  misc_feature: MA Experiment 20000439 PARAMETER Experiment Name: At_Roots__P Parameter: Tissue Value: Roots vs. Whole Plant
  misc_feature: MA Experiment ID: 20000794 Result: Up-regulated in Transcription
  misc_feature: MA Experiment 20000794 PARAMETER Experiment Name: At_Petals_P Parameter: Age (day) Value: 23-25 days
  misc_feature: MA Experiment 20000794 PARAMETER Experiment Name: At_Petals_P Parameter: Plant Line Value: WS
  misc_feature: MA Experiment 20000794 PARAMETER Experiment Name: At_Petals_P Parameter: Tissue Value: Petals vs. Whole plant
atggagtcacgaatggatcagtacgagcttatggaacagatcgggagaggagcgtttggtgctgctattttagttcatcataaagctgagagaaagaagtatgttttgaagaagatcagattagctagacaaacggaacgttgccggagatctgctcatcaagagatgtctttgattgcaagagttcaacatccttatattgtggagtttaaagaagcttgggttgagaaaaaggctgagttgatgaaaaagtcaaatggtgtttattttcctgaggagaaactttgcaagtggtttactcaattattattagctgttgagtatctgcattctaactatgttctacatcgggatctaaagtgttccaacattttccttacaaaagatcaagatgttcgccttggggactttggtcttgccaaaactttgaaggcggatgacctaacttcctcggttgttggaactccaaactacatgtgcccggaactgcttgctgatatcccttatggttttaagtcagatatctggtccttaggctgttgtatatatgagatggctgcgtatcgacctgctttcaaagcttttgatatggcagggcttataagcaaggttaatcgctcctcaattggtccgttgcctccgtgctattcaccatctttaaaagcactcatcaagggaatgttaaggaagaaccccgagtatcggccaaacgcctccgagattttgaagcatccttatctgcagccatatgttgagcagtaccgtccaacgctttctgcggcgtctataactccagaaaagcctctcaattctcgcgagggtcggaggagtatggctgaaagtcagaatagcaatagttcaagtgaaaaagataacttctacgtgagtgacaaaaatatccgatatgtggttccaagtaatggtaataaagtcactgagaccgattcaggttttgtcgatgatgaagacatcttagaccatgtgcaacaatcagctgaaaatggtaatctccagagtgtttcagcaacaaaaccagatggccatgggattttaaagcccgtacacagtgaccagcgaccagacgttattcaaccaaggcacccaaaaactatcagaaacatcatgatggttttgaaagaagagaaagctcgagaaaatggttcacccatgagatctaatcgaagtagaccttctagtgttccgacacagaagaataatgttgaaactccatcaaagattcccaaacttggtgacattgctcatagctccaagactaacgcaagtacgcctattccaccatcaaagctggcctctgattccgcaaggactccaggatcatttccaccaaagcatcatatgccagtgattgactcttctccaaaacttaagcctagaaacgacagaatttcaccttctcctgctgctaaacatgaggctgaagaggcgatgtcagttaagcgtaggcaaagaacacctcctactttgccaagaagaacgtctttgatagcgcaccagtcgagacaactaggagcagatatttcaaatatggcagcaaaggaaaccgcgaagctacatccatctgtgccatcagagtctgaaactaattctcatcaatctcgtgttcatgcttctcctgtgagtacgacgccagagccaaagagaacctctgttggatctgccaaaggaatgcagagtgaaagcagcaactctatctcgtcgtcgttgtccatgcaggcatttgagctctgtgatgatgcttccaccccatatattgacatgacagaacatacaactcctgatgaccacagaagatcctgtcacagtgaatactcatattcatttccagatatctcctcagagatgatgatccgtagagatgaacatagcaccagtatgcggctgactgaaattcccgactctgtttccggtgtacaaaacaccattgcccatcatcagccagaaagagagcaaggaagctgtcccactgtgctcaaagatgatagtcctgcaacattacagagctacgagcctaacacatcacaacatcaacacggtgatgacaaattcacagtcaaagaattcgtctcctctgttcccggacccgcaccattgcctttgcatgttgaaccatcacaccaagtgaattcccactcggataacaaaacaagcgtaatgtctcagaactcagctcttgagaagaacaacagtcattcccatcctcatcccgtggttgatgatgtcatacatgttattcgccacagcagtttccgagtagggagcgaccagccggtcatggaaagtgttgaagtcggtgtccaaaacgtcgatatggggaaactcataaacgttgtgagagatgaaatggaagtgagaaaaggagccactccctcagaatcacccaccacaagatcgatcatctcagagcctgactcaagaaccgagcctcgtcctaaagaaccagaccccatcaccaattactcagaaacaaagagctttaactcctgctcggattcttcaccagctgagaccagaactaactcattcgtgcctgaagaggaaacaactccgactccacctgttaaagagacgttggacatcaagtcgttcagacagagagcagaagcgcttgaaggtctattggaactatctgcggatttgctggaacagagcaggctcgaagagctagccattgtgttgcagccgtttgggaagaacaaagtttcgcctcgagaaaccgctatttggttggccaagagtttgaaaggaatgatgatcgaagacatcaataataataatagcagtggcagctccaggaattgttcatga

SEQ ID NO: 44903 - protein, 941 aa, Arabidopsis thaliana
  peptide (1)..(941): Ceres Seq. ID no. 13575623
  misc_feature (8)..(247): Pfam Name: Protein kinase domain Pfam Description: Protein kinase domain
  misc_feature (5)..(293): Homolog of NCBI NO: 15241745 NR Description: protein kinase, putative [Arabidopsis thaliana]
  misc_feature (831)..(921): Homolog of NCBI NO: 22331918 NR Description: protein kinase family [Arabidopsis thaliana]
  misc_feature (5)..(345): Homolog of NCBI NO: 22331918 NR Description: protein kinase family [Arabidopsis thaliana]
  misc_feature (806)..(921): Homolog of NCBI NO: 15637110 NR Description: LSTK-1-like kinase [Lycopersicon esculentum]
  misc_feature (5)..(430): Homolog of NCBI NO: 15637110 NR Description: LSTK-1-like kinase [Lycopersicon esculentum]
  misc_feature (800)..(922): Homolog of NCBI NO: 34393832 NR Description: putative NIMA-related protein kinase
  misc_feature (5)..(309): Homolog of NCBI NO: 34393832 NR Description: putative NIMA-related protein kinase
  misc_feature (833)..(921): Homolog of NCBI NO: 15221843 NR Description: protein kinase family [Arabidopsis thaliana]
  misc_feature (5)..(272): Homolog of NCBI NO: 15221843 NR Description: protein kinase family [Arabidopsis thaliana]
  misc_feature (1)..(932): Homolog of NCBI NO: 34908554 NR Description: putative kinase [Oryza sativa (japonica
MESRMDQYELMEQIGRGAFGAAILVHHKAERKKYVLKKIRLARQTERCRRSAHQEMSLIARVQHPYIVEFKEAWVEKKAELMKKSNGVYFPEEKLCKWFTQLLLAVEYLHSNYVLHRDLKCSNIFLTKDQDVRLGDFGLAKTLKADDLTSSVVGTPNYMCPELLADIPYGFKSDIWSLGCCIYEMAAYRPAFKAFDMAGLISKVNRSSIGPLPPCYSPSLKALIKGMLRKNPEYRPNASEILKHPYLQPYVEQYRPTLSAASITPEKPLNSREGRRSMAESQNSNSSSEKDNFYVSDKNIRYVVPSNGNKVTETDSGFVDDEDILDHVQQSAENGNLQSVSATKPDGHGILKPVHSDQRPDVIQPRHPKTIRNIMMVLKEEKARENGSPMRSNRSRPSSVPTQKNNVETPSKIPKLGDIAHSSKTNASTPIPPSKLASDSARTPGSFPPKHHMPVIDSSPKLKPRNDRISPSPAAKHEAEEAMSVKRRQRTPPTLPRRTSLIAHQSRQLGADISNMAAKETAKLHPSVPSESETNSHQSRVHASPVSTTPEPKRTSVGSAKGMQSESSNSISSSLSMQAFELCDDASTPYIDMTEHTTPDDHRRSCHSEYSYSFPDISSEMMIRRDEHSTSMRLTEIPDSVSGVQNTIAHHQPEREQGSCPTVLKDDSPATLQSYEPNTSQHQHGDDKFTVKEFVSSVPGPAPLPLHVEPSHQVNSHSDNKTSVMSQNSALEKNNSHSHPHPVVDDVIHVIRHSSFRVGSDQPVMESVEVGVQNVDMGKLINVVRDEMEVRKGATPSESPTTRSIISEPDSRTEPRPKEPDPITNYSETKSFNSCSDSSPAETRTNSFVPEEETTPTPPVKETLDIKSFRQRAEALEGLLELSADLLEQSRLEELAIVLQPFGKNKVSPRETAIWLAKSLKGMMIEDINNNNSSGSSRNCS

SEQ ID NO: 44904 - protein, 937 aa, Arabidopsis thaliana
  peptide (1)..(937): Ceres Seq. ID no. 13575624
  misc_feature (4)..(243): Pfam Name: Protein kinase domain Pfam Description: Protein kinase domain
  misc_feature (1)..(289): Homolog of NCBI NO: 15241745 NR Description: protein kinase, putative [Arabidopsis thaliana]
  misc_feature (827)..(917): Homolog of NCBI NO: 22331918 NR Description: protein kinase family [Arabidopsis thaliana]
  misc_feature (1)..(341): Homolog of NCBI NO: 22331918 NR Description: protein kinase family [Arabidopsis thaliana]
  misc_feature (802)..(917): Homolog of NCBI NO: 15637110 NR Description: LSTK-1-like kinase [Lycopersicon esculentum]
  misc_feature (1)..(426): Homolog of NCBI NO: 15637110 NR Description: LSTK-1-like kinase [Lycopersicon esculentum]
  misc_feature (796)..(918): Homolog of NCBI NO: 34393832 NR Description: putative NIMA-related protein kinase
  misc_feature (1)..(305): Homolog of NCBI NO: 34393832 NR Description: putative NIMA-related protein kinase
  misc_feature (829)..(917): Homolog of NCBI NO: 15221843 NR Description: protein kinase family [Arabidopsis thaliana]
  misc_feature (1)..(268): Homolog of NCBI NO: 15221843 NR Description: protein kinase family [Arabidopsis thaliana]
  misc_feature (1)..(928): Homolog of NCBI NO: 34908554 NR Description: putative kinase [Oryza sativa (japonica
MDQYELMEQIGRGAFGAAILVHHKAERKKYVLKKIRLARQTERCRRSAHQEMSLIARVQHPYIVEFKEAWVEKKAELMKKSNGVYFPEEKLCKWFTQLLLAVEYLHSNYVLHRDLKCSNIFLTKDQDVRLGDFGLAKTLKADDLTSSVVGTPNYMCPELLADIPYGFKSDIWSLGCCIYEMAAYRPAFKAFDMAGLISKVNRSSIGPLPPCYSPSLKALIKGMLRKNPEYRPNASEILKHPYLQPYVEQYRPTLSAASITPEKPLNSREGRRSMAESQNSNSSSEKDNFYVSDKNIRYVVPSNGNKVTETDSGFVDDEDILDHVQQSAENGNLQSVSATKPDGHGILKPVHSDQRPDVIQPRHPKTIRNIMMVLKEEKARENGSPMRSNRSRPSSVPTQKNNVETPSKIPKLGDIAHSSKTNASTPIPPSKLASDSARTPGSFPPKHHMPVIDSSPKLKPRNDRISPSPAAKHEAEEAMSVKRRQRTPPTLPRRTSLIAHQSRQLGADISNMAAKETAKLHPSVPSESETNSHQSRVHASPVSTTPEPKRTSVGSAKGMQSESSNSISSSLSMQAFELCDDASTPYIDMTEHTTPDDHRRSCHSEYSYSFPDISSEMMIRRDEHSTSMRLTEIPDSVSGVQNTIAHHQPEREQGSCPTVLKDDSPATLQSYEPNTSQHQHGDDKFTVKEFVSSVPGPAPLPLHVEPSHQVNSHSDNKTSVMSQNSALEKNNSHSHPHPVVDDVIHVIRHSSFRVGSDQPVMESVEVGVQNVDMGKLINVVRDEMEVRKGATPSESPTTRSIISEPDSRTEPRPKEPDPITNYSETKSFNSCSDSSPAETRTNSFVPEEETTPTPPVKETLDIKSFRQRAEALEGLLELSADLLEQSRLEELAIVLQPFGKNKVSPRETAIWLAKSLKGMMIEDINNNNSSGSSRNCS

SEQ ID NO: 44905 - protein, 931 aa, Arabidopsis thaliana
  peptide (1)..(931): Ceres Seq. ID no. 13575625
  misc_feature (1)..(237): Pfam Name: Protein kinase domain Pfam Description: Protein kinase domain
  misc_feature (1)..(283): Homolog of NCBI NO: 15241745 NR Description: protein kinase, putative [Arabidopsis thaliana]
  misc_feature (821)..(911): Homolog of NCBI NO: 22331918 NR Description: protein kinase family [Arabidopsis thaliana]
  misc_feature (1)..(335): Homolog of NCBI NO: 22331918 NR Description: protein kinase family [Arabidopsis thaliana]
  misc_feature (796)..(911): Homolog of NCBI NO: 15637110 NR Description: LSTK-1-like kinase [Lycopersicon esculentum]
  misc_feature (1)..(420): Homolog of NCBI NO: 15637110 NR Description: LSTK-1-like kinase [Lycopersicon esculentum]
  misc_feature (790)..(912): Homolog of NCBI NO: 34393832 NR Description: putative NIMA-related protein kinase
  misc_feature (1)..(299): Homolog of NCBI NO: 34393832 NR Description: putative NIMA-related protein kinase
  misc_feature (823)..(911): Homolog of NCBI NO: 15221843 NR Description: protein kinase family [Arabidopsis thaliana]
  misc_feature (1)..(262): Homolog of NCBI NO: 15221843 NR Description: protein kinase family [Arabidopsis thaliana]
  misc_feature (1)..(922): Homolog of NCBI NO: 34908554 NR Description: putative kinase [Oryza sativa (japonica
MEQIGRGAFGAAILVHHKAERKKYVLKKIRLARQTERCRRSAHQEMSLIARVQHPYIVEFKEAWVEKKAELMKKSNGVYFPEEKLCKWFTQLLLAVEYLHSNYVLHRDLKCSNIFLTKDQDVRLGDFGLAKTLKADDLTSSVVGTPNYMCPELLADIPYGFKSDIWSLGCCIYEMAAYRPAFKAFDMAGLISKVNRSSIGPLPPCYSPSLKALIKGMLRKNPEYRPNASEILKHPYLQPYVEQYRPTLSAASITPEKPLNSREGRRSMAESQNSNSSSEKDNFYVSDKNIRYVVPSNGNKVTETDSGFVDDEDILDHVQQSAENGNLQSVSATKPDGHGILKPVHSDQRPDVIQPRHPKTIRNIMMVLKEEKARENGSPMRSNRSRPSSVPTQKNNVETPSKIPKLGDIAHSSKTNASTPIPPSKLASDSARTPGSFPPKHHMPVIDSSPKLKPRNDRISPSPAAKHEAEEAMSVKRRQRTPPTLPRRTSLIAHQSRQLGADISNMAAKETAKLHPSVPSESETNSHQSRVHASPVSTTPEPKRTSVGSAKGMQSESSNSISSSLSMQAFELCDDASTPYIDMTEHTTPDDHRRSCHSEYSYSFPDISSEMMIRRDEHSTSMRLTEIPDSVSGVQNTIAHHQPEREQGSCPTVLKDDSPATLQSYEPNTSQHQHGDDKFTVKEFVSSVPGPAPLPLHVEPSHQVNSHSDNKTSVMSQNSALEKNNSHSHPHPVVDDVIHVIRHSSFRVGSDQPVMESVEVGVQNVDMGKLINVVRDEMEVRKGATPSESPTTRSIISEPDSRTEPRPKEPDPITNYSETKSFNSCSDSSPAETRTNSFVPEEETTPTPPVKETLDIKSFRQRAEALEGLLELSADLLEQSRLEELAIVLQPFGKNKVSPRETAIWLAKSLKGMMIEDINNNNSSGSSRNCS

SEQ ID NO: 44906 - DNA, 2478 bp, Arabidopsis thaliana
  misc_feature (1)..(2478): Ceres Seq. ID no. 12600031
  misc_feature: MA Experiment ID: 20000166 Result: Down-regulated in Transcription
  misc_feature: MA Experiment 20000166 PARAMETER Experiment Name: At_100uM_ABA_P Parameter: Age (day) Value: 14
  misc_feature: MA Experiment 20000166 PARAMETER Experiment Name: At_100uM_ABA_P Parameter: Organism Value: A. thaliana
  misc_feature: MA Experiment 20000166 PARAMETER Experiment Name: At_100uM_ABA_P Parameter: Plant Line Value: WS
  misc_feature: MA Experiment 20000166 PARAMETER Experiment Name: At_100uM_ABA_P Parameter: Timepoint (hr) Value: 1
  misc_feature: MA Experiment 20000166 PARAMETER Experiment Name: At_100uM_ABA_P Parameter: Tissue Value: Aerial
  misc_feature: MA Experiment 20000166 PARAMETER Experiment Name: At_100uM_ABA_P Parameter: Treatment Value: 100uM ABA vs. No Treatment
  misc_feature: MA Experiment ID: 20000173 Result: Up-regulated in Transcription
  misc_feature: MA Experiment 20000173 PARAMETER Experiment Name: At_42deg_Heat_P Parameter: Age (day) Value: 14
  misc_feature: MA Experiment 20000173 PARAMETER Experiment Name: At_42deg_Heat_P Parameter: Organism Value: A. thaliana
  misc_feature: MA Experiment 20000173 PARAMETER Experiment Name: At_42deg_Heat_P Parameter: Plant Line Value: WS
  misc_feature: MA Experiment 20000173 PARAMETER Experiment Name: At_42deg_Heat_P Parameter: Temperature (deg C) Value: 42 vs. 22
  misc_feature: MA Experiment 20000173 PARAMETER Experiment Name: At_42deg_Heat_P Parameter: Timepoint (hr) Value: 6
  misc_feature: MA Experiment 20000173 PARAMETER Experiment Name: At_42deg_Heat_P Parameter: Tissue Value: Aerial
  misc_feature: MA Experiment ID: 20000179 Result: Up-regulated in Transcription
  misc_feature: MA Experiment 20000179 PARAMETER Experiment Name: At_Germinating_Seeds_P Parameter: Age (hr) Value: 6 vs. 0
  misc_feature: MA Experiment 20000179 PARAMETER Experiment Name: At_Germinating_Seeds_P Parameter: Tissue Value: Germinating Seeds
  misc_feature: MA Experiment ID: 20000185 Result: Down-regulated in Transcription
  misc_feature: MA Experiment 20000185 PARAMETER Experiment Name: At_Roots__P Parameter: Age (day) Value: 7 vs. 21
  misc_feature: MA Experiment 20000185 PARAMETER Experiment Name: At_Roots__P Parameter: Organism Value: A. thaliana
  misc_feature: MA Experiment 20000185 PARAMETER Experiment Name: At_Roots__P Parameter: Tissue Value: Roots vs. Whole Plant
  misc_feature: MA Experiment ID: 20000214 Result: Down-regulated in Transcription
  misc_feature: MA Experiment 20000214 PARAMETER Experiment Name: At_4deg_Cold_P Parameter: Timepoint (hr) Value: 6
  misc_feature: MA Experiment ID: 20000264 Result: Down-regulated in Transcription
  misc_feature: MA Experiment 20000264 PARAMETER Experiment Name: At_Open_Flower_P Parameter: Age (day) Value: 21
  misc_feature: MA Experiment 20000264 PARAMETER Experiment Name: At_Open_Flower_P Parameter: Plant Line Value: WS
  misc_feature: MA Experiment 20000264 PARAMETER Experiment Name: At_Open_Flower_P Parameter: Tissue Value: Open Flower vs. Whole Plant
  misc_feature: MA Experiment ID: 20000265 Result: Down-regulated in Transcription
  misc_feature: MA Experiment 20000265 PARAMETER Experiment Name: At_Open_Flower_P Parameter: Age (day) Value: 21
  misc_feature: MA Experiment 20000265 PARAMETER Experiment Name: At_Open_Flower_P Parameter: Plant Line Value: WS
  misc_feature: MA Experiment 20000265 PARAMETER Experiment Name: At_Open_Flower_P Parameter: Tissue Value: Closed Flower vs. Whole Plant
  misc_feature: MA Experiment ID: 20000268 Result: Down-regulated in Transcription
  misc_feature: MA Experiment 20000268 PARAMETER Experiment Name: At_100mM_NaCl__P Parameter: Age (day) Value: 14
  misc_feature: MA Experiment 20000268 PARAMETER Experiment Name: At_100mM_NaCl__P Parameter: Organism Value: A. thaliana
  misc_feature: MA Experiment 20000268 PARAMETER Experiment Name: At_100mM_NaCl__P Parameter: Plant Line Value: WS
  misc_feature: MA Experiment 20000268 PARAMETER Experiment Name: At_100mM_NaCl__P Parameter: Timepoint (hr) Value: 6
  misc_feature: MA Experiment 20000268 PARAMETER Experiment Name: At_100mM_NaCl__P Parameter: Tissue Value: Whole Plant
  misc_feature: MA Experiment 20000268 PARAMETER Experiment Name: At_100mM_NaCl__P Parameter: Treatment Value: 100mM NaCl vs. No Treatment
  misc_feature: MA Experiment ID: 20000269 Result: Down-regulated in Transcription
  misc_feature: MA Experiment 20000269 PARAMETER Experiment Name: At_1mM_KNO3_L-vs-H_Roots_P Parameter: Age (day) Value: 7,10,12
  misc_feature: MA Experiment 20000269 PARAMETER Experiment Name: At_1mM_KNO3_L-vs-H_Roots_P Parameter: Organism Value: A. thaliana
  misc_feature: MA Experiment 20000269 PARAMETER Experiment Name: At_1mM_KNO3_L-vs-H_Roots_P Parameter: Plant Line Value: WS
  misc_feature: MA Experiment 20000269 PARAMETER Experiment Name: At_1mM_KNO3_L-vs-H_Roots_P Parameter: Timepoint (day) Value: 7,10,12
  misc_feature: MA Experiment 20000269 PARAMETER Experiment Name: At_1mM_KNO3_L-vs-H_Roots_P Parameter: Tissue Value: Roots
  misc_feature: MA Experiment 20000269 PARAMETER Experiment Name: At_1mM_KNO3_L-vs-H_Roots_P Parameter: Treatment Value: 1mM KNO3 vs. 50mM KNO3
  misc_feature: MA Experiment ID: 20000286 Result: Down-regulated in Transcription
  misc_feature: MA Experiment 20000286 PARAMETER Experiment Name: At_Open_Flower_P Parameter: Age (day) Value: 21
  misc_feature: MA Experiment 20000286 PARAMETER Experiment Name: At_Open_Flower_P Parameter: Plant Line Value: WS
  misc_feature: MA Experiment 20000286 PARAMETER Experiment Name: At_Open_Flower_P Parameter: Tissue Value: Half Open vs. Whole Plant
  misc_feature: MA Experiment ID: 20000308 Result: Down-regulated in Transcription
  misc_feature: MA Experiment 20000308 PARAMETER Experiment Name: At_100mM_NaCl__P Parameter: Age (day) Value: 17
  misc_feature: MA Experiment 20000308 PARAMETER Experiment Name: At_100mM_NaCl__P Parameter: Organism Value: A. thaliana
  misc_feature: MA Experiment 20000308 PARAMETER Experiment Name: At_100mM_NaCl__P Parameter: Plant Line Value: WS
  misc_feature: MA Experiment 20000308 PARAMETER Experiment Name: At_100mM_NaCl__P Parameter: Timepoint (hr) Value: 72
  misc_feature: MA Experiment 20000308 PARAMETER Experiment Name: At_100mM_NaCl__P Parameter: Tissue Value: Whole Plant
  misc_feature: MA Experiment 20000308 PARAMETER Experiment Name: At_100mM_NaCl__P Parameter: Treatment Value: 100mM NaCl vs. No Treatment
  misc_feature: MA Experiment ID: 20000438 Result: Down-regulated in Transcription
  misc_feature: MA Experiment 20000438 PARAMETER Experiment Name: At_Shoots__P Parameter: Age (day) Value: 14
  misc_feature: MA Experiment 20000438 PARAMETER Experiment Name: At_Shoots__P Parameter: Tissue Value: Shoots vs. Whole Plant
  misc_feature: MA Experiment ID: 20000439 Result: Down-regulated in Transcription
  misc_feature: MA Experiment 20000439 PARAMETER Experiment Name: At_Roots__P Parameter: Age (day) Value: 14 vs. 21
  misc_feature: MA Experiment 20000439 PARAMETER Experiment Name: At_Roots__P Parameter: Organism Value: A. thaliana
  misc_feature: MA Experiment 20000439 PARAMETER Experiment Name: At_Roots__P Parameter: Tissue Value: Roots vs. Whole Plant
  misc_feature: MA Experiment ID: 20000441 Result: Up-regulated in Transcription
  misc_feature: MA Experiment 20000441 PARAMETER Experiment Name: At_1uM_BR-BRZ__P Parameter: Tissue Value: Shoot Apices
  misc_feature: MA Experiment 20000441 PARAMETER Experiment Name: At_1uM_BR-BRZ__P Parameter: Treatment Value: 1uM BR vs. No Treatment
  misc_feature: MA Experiment ID: 20000443 Result: Up-regulated in Transcription
  misc_feature: MA Experiment 20000443 PARAMETER Experiment Name: At_1uM_BR-BRZ__P Parameter: Tissue Value: Shoot Apices
  misc_feature: MA Experiment 20000443 PARAMETER Experiment Name: At_1uM_BR-BRZ__P Parameter: Treatment Value: 1uM BRZ vs. No Treatment
  misc_feature: MA Experiment ID: 20000451 Result: Down-regulated in Transcription
  misc_feature: MA Experiment 20000451 PARAMETER Experiment Name: At_CS6879_Shoots-Roots_P Parameter: Age (day) Value: 14
  misc_feature: MA Experiment 20000451 PARAMETER Experiment Name: At_CS6879_Shoots-Roots_P Parameter: Organism Value: A. thaliana
  misc_feature: MA Experiment 20000451 PARAMETER Experiment Name: At_CS6879_Shoots-Roots_P Parameter: Plant Line Value: CS6879 vs. WS
  misc_feature: MA Experiment 20000451 PARAMETER Experiment Name: At_CS6879_Shoots-Roots_P Parameter: Tissue Value: Roots
  misc_feature: MA Experiment ID: 20000453 Result: Down-regulated in Transcription
  misc_feature: MA Experiment 20000453 PARAMETER Experiment Name: At_100uM_ABA_P Parameter: Age (day) Value: 15
  misc_feature: MA Experiment 20000453 PARAMETER Experiment Name: At_100uM_ABA_P Parameter: Organism Value: A. thaliana
  misc_feature: MA Experiment 20000453 PARAMETER Experiment Name: At_100uM_ABA_P Parameter: Plant Line Value: WS
  misc_feature: MA Experiment 20000453 PARAMETER Experiment Name: At_100uM_ABA_P Parameter: Timepoint (hr) Value: 24
  misc_feature: MA Experiment 20000453 PARAMETER Experiment Name: At_100uM_ABA_P Parameter: Tissue Value: Aerial
  misc_feature: MA Experiment 20000453 PARAMETER Experiment Name: At_100uM_ABA_P Parameter: Treatment Value: 100uM ABA vs. No Treatment
  misc_feature: MA Experiment ID: 20000455 Result: Down-regulated in Transcription
  misc_feature: MA Experiment 20000455 PARAMETER Experiment Name: At_100uM_ABA_P Parameter: Age (day) Value: 16
  misc_feature: MA Experiment 20000455 PARAMETER Experiment Name: At_100uM_ABA_P Parameter: Organism Value: A. thaliana
  misc_feature: MA Experiment 20000455 PARAMETER Experiment Name: At_100uM_ABA_P Parameter: Plant Line Value: WS
  misc_feature: MA Experiment 20000455 PARAMETER Experiment Name: At_100uM_ABA_P Parameter: Timepoint (hr) Value: 48
  misc_feature: MA Experiment 20000455 PARAMETER Experiment Name: At_100uM_ABA_P Parameter: Tissue Value: Aerial
  misc_feature: MA Experiment 20000455 PARAMETER Experiment Name: At_100uM_ABA_P Parameter: Treatment Value: 100uM ABA vs. No Treatment
  misc_feature: MA Experiment ID: 20000495 Result: Up-regulated in Transcription
  misc_feature: MA Experiment 20000495 PARAMETER Experiment Name: At_Guard_Cells_P Parameter: Harvest Date Value: 8/2/2002
  misc_feature: MA Experiment 20000495 PARAMETER Experiment Name: At_Guard_Cells_P Parameter: Organism Value: A. thaliana
  misc_feature: MA Experiment 20000495 PARAMETER Experiment Name: At_Guard_Cells_P Parameter: Tissue Value: Guard Cells vs. Leaves
  misc_feature: MA Experiment ID: 20000496 Result: Up-regulated in Transcription
  misc_feature: MA Experiment 20000496 PARAMETER Experiment Name: At_Guard_Cells_P Parameter: Harvest Date Value: 7/19/2002
  misc_feature: MA Experiment 20000496 PARAMETER Experiment Name: At_Guard_Cells_P Parameter: Organism Value: Canola
  misc_feature: MA Experiment 20000496 PARAMETER Experiment Name: At_Guard_Cells_P Parameter: Tissue Value: Guard Cells vs. Leaves
  misc_feature: MA Experiment ID: 20000794 Result: Down-regulated in Transcription
  misc_feature: MA Experiment 20000794 PARAMETER Experiment Name: At_Petals_P Parameter: Age (day) Value: 23-25 days
  misc_feature: MA Experiment 20000794 PARAMETER Experiment Name: At_Petals_P Parameter: Plant Line Value: WS
  misc_feature: MA Experiment 20000794 PARAMETER Experiment Name: At_Petals_P Parameter: Tissue Value: Petals vs. Whole plant
  misc_feature: MA Experiment ID: 20001248 Result: Up-regulated in Transcription
  misc_feature: MA Experiment 20001248 PARAMETER Experiment Name: At_Far-red-induction_P Parameter: Age (day) Value: 7
  misc_feature: MA Experiment 20001248 PARAMETER Experiment Name: At_Far-red-induction_P Parameter: Light Value: Far-red vs. White
  misc_feature: MA Experiment 20001248 PARAMETER Experiment Name: At_Far-red-induction_P Parameter: Organism Value: A. thaliana
  misc_feature: MA Experiment 20001248 PARAMETER Experiment Name: At_Far-red-induction_P Parameter: Plant Line Value: Columbia
  misc_feature: MA Experiment 20001248 PARAMETER Experiment Name: At_Far-red-induction_P Parameter: Timepoint (hr) Value: 4
  misc_feature: MA Experiment 20001248 PARAMETER Experiment Name: At_Far-red-induction_P Parameter: Tissue Value: Whole Plant
  misc_feature: MA Experiment ID: 20001450 Result: Up-regulated in Transcription
  misc_feature: MA Experiment 20001450 PARAMETER Experiment Name: At_Far-red-induction_P Parameter: Age (day) Value: 7
  misc_feature: MA Experiment 20001450 PARAMETER Experiment Name: At_Far-red-induction_P Parameter: Light Value: Far-red vs. White
  misc_feature: MA Experiment 20001450 PARAMETER Experiment Name: At_Far-red-induction_P Parameter: Organism Value: A. thaliana
  misc_feature: MA Experiment 20001450 PARAMETER Experiment Name: At_Far-red-induction_P Parameter: Plant Line Value: Columbia
  misc_feature: MA Experiment 20001450 PARAMETER Experiment Name: At_Far-red-induction_P Parameter: Timepoint (hr) Value: 8
  misc_feature: MA Experiment 20001450 PARAMETER Experiment Name: At_Far-red-induction_P Parameter: Tissue Value: Whole Plant
  misc_feature: MA Experiment ID: 20001451 Result: Up-regulated in Transcription
  misc_feature: MA Experiment 20001451 PARAMETER Experiment Name: At_Far-red-induction_P Parameter: Age (day) Value: 7
  misc_feature: MA Experiment 20001451 PARAMETER Experiment Name: At_Far-red-induction_P Parameter: Light Value: Far-red vs. White
  misc_feature: MA Experiment 20001451 PARAMETER Experiment Name: At_Far-red-induction_P Parameter: Organism Value: A. thaliana
  misc_feature: MA Experiment 20001451 PARAMETER Experiment Name: At_Far-red-induction_P Parameter: Plant Line Value: Columbia
  misc_feature: MA Experiment 20001451 PARAMETER Experiment Name: At_Far-red-induction_P Parameter: Timepoint (hr) Value: 24
  misc_feature: MA Experiment 20001451 PARAMETER Experiment Name: At_Far-red-induction_P Parameter: Tissue Value: Whole Plant
  misc_feature: MA Experiment ID: 20001555 Result: Down-regulated in Transcription
  misc_feature: MA Experiment 20001555 PARAMETER Experiment Name: At_Drought_Soil_Dry_P Parameter: Age (day) Value: 24
  misc_feature: MA Experiment 20001555 PARAMETER Experiment Name: At_Drought_Soil_Dry_P Parameter: Organism Value: A. thaliana
  misc_feature: MA Experiment 20001555 PARAMETER Experiment Name: At_Drought_Soil_Dry_P Parameter: Plant Line Value: WS
  misc_feature: MA Experiment 20001555 PARAMETER Experiment Name: At_Drought_Soil_Dry_P Parameter: Post Timepoint (hr) Value: None
  misc_feature: MA Experiment 20001555 PARAMETER Experiment Name: At_Drought_Soil_Dry_P Parameter: Post-Treatment Value: None
  misc_feature: MA Experiment 20001555 PARAMETER Experiment Name: At_Drought_Soil_Dry_P Parameter: Timepoint (day) Value: 10
  misc_feature: MA Experiment 20001555 PARAMETER Experiment Name: At_Drought_Soil_Dry_P Parameter: Treatment Value: Drought vs. No Drought
  misc_feature: MA Experiment ID: 20001556 Result: Down-regulated in Transcription
  misc_feature: MA Experiment 20001556 PARAMETER Experiment Name: At_Drought_Soil_Dry_P Parameter: Age (day) Value: 26
  misc_feature: MA Experiment 20001556 PARAMETER Experiment Name: At_Drought_Soil_Dry_P Parameter: Organism Value: A. thaliana
  misc_feature: MA Experiment 20001556 PARAMETER Experiment Name: At_Drought_Soil_Dry_P Parameter: Plant Line Value: WS
  misc_feature: MA Experiment 20001556 PARAMETER Experiment Name: At_Drought_Soil_Dry_P Parameter: Post Timepoint (hr) Value: None
  misc_feature: MA Experiment 20001556 PARAMETER Experiment Name: At_Drought_Soil_Dry_P Parameter: Post-Treatment Value: None
  misc_feature: MA Experiment 20001556 PARAMETER Experiment Name: At_Drought_Soil_Dry_P Parameter: Timepoint (day) Value: 12
  misc_feature: MA Experiment 20001556 PARAMETER Experiment Name: At_Drought_Soil_Dry_P Parameter: Treatment Value: Drought vs. No Drought
  misc_feature: MA Experiment ID: 20001559 Result: Down-regulated in Transcription
  misc_feature: MA Experiment 20001559 PARAMETER Experiment Name: At_Drought_Soil_Dry_P Parameter: Age (day) Value: 28
  misc_feature: MA Experiment 20001559 PARAMETER Experiment Name: At_Drought_Soil_Dry_P Parameter: Organism Value: A. thaliana
  misc_feature: MA Experiment 20001559 PARAMETER Experiment Name: At_Drought_Soil_Dry_P Parameter: Plant Line Value: WS
  misc_feature: MA Experiment 20001559 PARAMETER Experiment Name: At_Drought_Soil_Dry_P Parameter: Post Timepoint (hr) Value: 29
  misc_feature: MA Experiment 20001559 PARAMETER Experiment Name: At_Drought_Soil_Dry_P Parameter: Post-Treatment Value: Re-Water vs. No Drought
  misc_feature: MA Experiment 20001559 PARAMETER Experiment Name: At_Drought_Soil_Dry_P Parameter: Timepoint (day) Value: 14
  misc_feature: MA Experiment 20001559 PARAMETER Experiment Name: At_Drought_Soil_Dry_P Parameter: Treatment Value: Drought vs. No Drought
  misc_feature: MA Experiment ID: 20001773 Result: Up-regulated in Transcription
  misc_feature: MA Experiment 20001773 PARAMETER Experiment Name: At_Far-red-enriched-adult_P Parameter: Age (day) Value: 30
  misc_feature: MA Experiment 20001773 PARAMETER Experiment Name: At_Far-red-enriched-adult_P Parameter: Light Value: Far-red enriched vs. White
  misc_feature: MA Experiment 20001773 PARAMETER Experiment Name: At_Far-red-enriched-adult_P Parameter: Organism Value: A. thaliana
  misc_feature: MA Experiment 20001773 PARAMETER Experiment Name: At_Far-red-enriched-adult_P Parameter: Plant Line Value: Columbia
  misc_feature: MA Experiment 20001773 PARAMETER Experiment Name: At_Far-red-enriched-adult_P Parameter: Timepoint (hr) Value: 48
  misc_feature: MA Experiment 20001773 PARAMETER Experiment Name: At_Far-red-enriched-adult_P Parameter: Tissue Value: Aerial
  misc_feature: MA Experiment ID: 20001906 Result: Down-regulated in Transcription
  misc_feature: MA Experiment 20001906 PARAMETER Experiment Name: At_Drought_Reproduction_P Parameter: Age (day) Value: 35
  misc_feature: MA Experiment 20001906 PARAMETER Experiment Name: At_Drought_Reproduction_P Parameter: Organism Value: A. thaliana
  misc_feature: MA Experiment 20001906 PARAMETER Experiment Name: At_Drought_Reproduction_P Parameter: Plant Line Value: WS
  misc_feature: MA Experiment 20001906 PARAMETER Experiment Name: At_Drought_Reproduction_P Parameter: Timepoint (day) Value: 5
  misc_feature: MA Experiment 20001906 PARAMETER Experiment Name: At_Drought_Reproduction_P Parameter: Tissue Value: Siliques
  misc_feature: MA Experiment 20001906 PARAMETER Experiment Name: At_Drought_Reproduction_P Parameter: Treatment Value: Drought vs. No Drought
  misc_feature: MA Experiment ID: 20001908 Result: Down-regulated in Transcription
  misc_feature: MA Experiment 20001908 PARAMETER Experiment Name: At_Drought_Reproduction_P Parameter: Age (day) Value: 40
  misc_feature: MA Experiment 20001908 PARAMETER Experiment Name: At_Drought_Reproduction_P Parameter: Organism Value: A. thaliana
  misc_feature: MA Experiment 20001908 PARAMETER Experiment Name: At_Drought_Reproduction_P Parameter: Plant Line Value: WS
  misc_feature: MA Experiment 20001908 PARAMETER Experiment Name: At_Drought_Reproduction_P Parameter: Timepoint (day) Value: 10
  misc_feature: MA Experiment 20001908 PARAMETER Experiment Name: At_Drought_Reproduction_P Parameter: Tissue Value: Siliques
  misc_feature: MA Experiment 20001908 PARAMETER Experiment Name: At_Drought_Reproduction_P Parameter: Treatment Value: Drought vs. No Drought
aagtctttcatcacatttccatttttctctcttccataaaacccaaaagaaactaggaagaggagtaaataatatttgttttaaagaaatgattctccacaaaatggcgttcttggccgttattctcttcttcttgataagcagcagcagcgtttgcgttcatagccgtgaaacgtttgcttgcgatacaaaggacgcagcaacagctacactgagattctgccagctttcagttcctataccggagagagtcagagatttgatcggacggttgacattggccgagaaagtgagcttgttagggaacactgcggcggcgataccacgtctaggaatcaaagggtacgagtggtggtcggaggctttacacggcgtttcaaatgtgggacccggtactaagttcggtggggtttaccctgcagccaccagtttccctcaagtcatcaccaccgttgcttctttcaatgcctccttgtgggaatccatcggacgggttgtgtcaaatgaggccagggccatgtacaacggtggagttggtgggcttacgtattggagcccaaacgttaacatattgagggacccacgttggggacgtggacaggaaactcccggtgaagatccagtagtagccggtaaatacgcagcgagctacgtcagagggttacagggaaacgaccgtagccggttaaaagtagctgcttgttgcaaacatttcacagcttacgatctcgataactggaacggcgtcgacagattccatttcaacgctaaggtaagcaagcaagacatagaagacacgttcgacgtaccgttccgtatgtgtgttaaagaaggtaacgttgcgagcattatgtgttcgtacaatcaagttaatggtgttcctacatgtgctgatcctaatctcctcaagaagaccatacgcaatcaatggggtctcaacgggtatatcgtgtctgattgtgactctgtcggtgttttgtacgatacccaacattacactggtactcctgaagaagctgccgctgattccatcaaagctggcttggatttagattgtgggccatttctaggagcccatacaatcgatgcggtgaagaaaaacttgttgcgtgagtccgatgttgataatgccttaatcaacacgctaacagtccaaatgagactaggaatgtttgatggcgatatagcggctcaaccgtacggacaccttggaccggcacacgtgtgtacaccggttcacaaaggactagctctcgaagcagctcaacaaggaatcgtcctactcaaaaatcacggctcgtctctacctctctcaagccaacgtcaccgaactgtcgccgtaattggacctaattcagacgctacggtcacaatgattggtaattatgcaggggttgcttgtggatataccagtccggttcaaggtattaccggttatgctcgaaccattcatcaaaagggttgcgtggacgtacactgcatggatgatagattgttcgatgccgcggttgaagcggctcgtggagctgatgcgacggttcttgtgatgggtttggatcagtctattgaagcggagttcaaggacagaaacagtttgcttttgcctgggaaacaacaagagcttgtctctagagttgctaaggccgctaaaggcccagttatcttagtattgatgtctggtgggcctatcgatatatcttttgctgagaaggatcggaaaattccagcgattgtttgggccgggtatccgggtcaagaaggtggtaccgcaatcgccgatatcttattcggcagtgctaatcccggaggaaagcttccgatgacttggtatccgcaagattatttaaccaatttaccaatgacagaaatgtcgatgcggccggtccattcgaagcggatcccgggtcggacttaccggttctacgacggtccagttgtttacccgttcgggcatggtttgagttacacgcgctttactcacaacatagccgacgcgccaaaagtgattcctatagctgttcgtggaagaaacggcaccgtttcagggaaatcaatccgtgtgacgcacgctaggtgtgatcgtctctctctcggagtccacgtggaagttactaacgttggctcgagagatgggacgcacacaatgcttgtgttctcggctccgccgggtggagaatgggctccgaagaaacagctggttgcttttgagagagtacacgtggcggttggggagaagaagcgtgtgcaggtgaatatacacgtgtgtaagtatttaagtgtagtggaccgagccgggaaccgaaggattccgatcggtgatcatgggattcatattggagatgagagtcatacggtgtcgcttcaagcttctactcttggagtcatcaagtcttgactctgtttttttcttttcacttttcttgttgttcccaaaatatttttaagagattttaatgtttctaacgaaacgaatttgaa

SEQ ID NO: 44907 - protein, 797 aa, Arabidopsis thaliana
  peptide (1)..(797): Ceres Seq. ID no. 12600032
  misc_feature (425)..(657): Pfam Name: Glycosyl hydrolase family 3 C terminal domain Pfam Description: Glycosyl hydrolase family 3 C terminal domain
  misc_feature (425)..(657): Pfam Name: Glycosyl hydrolase family 3 C terminal domain Pfam Description: Glycosyl hydrolase family 3 C terminal domain
  misc_feature (74)..(793): Homolog of NCBI NO: 2791278 NR Description: beta-xylosidase [Hypocrea jecorina]
  misc_feature (341)..(796): Homolog of NCBI NO: 30316196 NR Description: Putative beta-D-xylosidase (PpAz152)
  misc_feature (36)..(789): Homolog of NCBI NO: 18025342 NR Description: beta-D-xylosidase [Hordeum vulgare]
  misc_feature (38)..(780): Homolog of NCBI NO: 15218202 NR Description: glycosyl hydrolase family 3
  misc_feature (30)..(782): Homolog of NCBI NO: 25453520 NR Description: beta-1,4-xylosidase [imported] - Arabidopsis
  misc_feature (74)..(793): Homolog of NCBI NO: 2791278 NR Description: beta-xylosidase [Hypocrea jecorina]
  misc_feature (36)..(789): Homolog of NCBI NO: 18025342 NR Description: beta-D-xylosidase [Hordeum vulgare]
  misc_feature (30)..(782): Homolog of NCBI NO: 25453520 NR Description: beta-1,4-xylosidase [imported] - Arabidopsis
  misc_feature (26)..(788): Homolog of NCBI NO: 15239867 NR Description: glycosyl hydrolase family 3; protein id:
  misc_feature (35)..(788): Homolog of NCBI NO: 15237736 NR Description: glycosyl hydrolase family 3; protein id:
  misc_feature (41)..(787): Homolog of NCBI NO: 15242492 NR Description: glycosyl hydrolase family 3
  misc_feature (59)..(788): Homolog of NCBI NO: 18025340 NR Description: alpha-L-arabinofuranosidase/beta-D-xylosidase
  misc_feature (30)..(782): Homolog of NCBI NO: 15230897 NR Description: glycosyl hydrolase family 3; protein id:
  misc_feature (38)..(780): Homolog of NCBI NO: 15218202 NR Description: glycosyl hydrolase family 3
  misc_feature (341)..(796): Homolog of NCBI NO: 30316196 NR Description: Putative beta-D-xylosidase (PpAz152)
  misc_feature (30)..(782): Homolog of NCBI NO: 15230897 NR Description: glycosyl hydrolase family 3; protein id:
  misc_feature (59)..(788): Homolog of NCBI NO: 18025340 NR Description: alpha-L-arabinofuranosidase/beta-D-xylosidase
  misc_feature (41)..(787): Homolog of NCBI NO: 15242492 NR Description: glycosyl hydrolase family 3
  misc_feature (35)..(788): Homolog of NCBI NO: 15237736 NR Description: glycosyl hydrolase family 3; protein id:
  misc_feature (26)..(788): Homolog of NCBI NO: 15239867 NR Description: glycosyl hydrolase family 3; protein id:
SLSSHFHFSLFHKTQKKLGRGVNNICFKEMILHKMAFLAVILFFLISSSSVCVHSRETFACDTKDAATATLRFCQLSVPIPERVRDLIGRLTLAEKVSLLGNTAAAIPRLGIKGYEWWSEALHGVSNVGPGTKFGGVYPAATSFPQVITTVASFNASLWESIGRVVSNEARAMYNGGVGGLTYWSPNVNILRDPRWGRGQETPGEDPVVAGKYAASYVRGLQGNDRSRLKVAACCKHFTAYDLDNWNGVDRFHFNAKVSKQDIEDTFDVPFRMCVKEGNVASIMCSYNQVNGVPTCADPNLLKKTIRNQWGLNGYIVSDCDSVGVLYDTQHYTGTPEEAAADSIKAGLDLDCGPFLGAHTIDAVKKNLLRESDVDNALINTLTVQMRLGMFDGDIAAQPYGHLGPAHVCTPVHKGLALEAAQQGIVLLKNHGSSLPLSSQRHRTVAVIGPNSDATVTMIGNYAGVACGYTSPVQGITGYARTIHQKGCVDVHCMDDRLFDAAVEAARGADATVLVMGLDQSIEAEFKDRNSLLLPGKQQELVSRVAKAAKGPVILVLMSGGPIDISFAEKDRKIPAIVWAGYPGQEGGTAIADILFGSANPGGKLPMTWYPQDYLTNLPMTEMSMRPVHSKRIPGRTYRFYDGPVVYPFGHGLSYTRFTHNIADAPKVIPIAVRGRNGTVSGKSIRVTHARCDRLSLGVHVEVTNVGSRDGTHTMLVFSAPPGGEWAPKKQLVAFERVHVAVGEKKRVQVNIHVCKYLSVVDRAGNRRIPIGDHGIHIGDESHTVSLQASTLGVIKS

SEQ ID NO: 44908 - protein, 768 aa, Arabidopsis thaliana
  peptide (1)..(768): Ceres Seq. ID no. 12600033
  misc_feature (396)..(628): Pfam Name: Glycosyl hydrolase family 3 C terminal domain Pfam Description: Glycosyl hydrolase family 3 C terminal domain
  misc_feature (396)..(628): Pfam Name: Glycosyl hydrolase family 3 C terminal domain Pfam Description: Glycosyl hydrolase family 3 C terminal domain
  misc_feature (45)..(764): Homolog of NCBI NO: 2791278 NR Description: beta-xylosidase [Hypocrea jecorina]
  misc_feature (312)..(767): Homolog of NCBI NO: 30316196 NR Description: Putative beta-D-xylosidase (PpAz152)
  misc_feature (7)..(760): Homolog of NCBI NO: 18025342 NR Description: beta-D-xylosidase [Hordeum vulgare]
  misc_feature (9)..(751): Homolog of NCBI NO: 15218202 NR Description: glycosyl hydrolase family 3
  misc_feature (1)..(753): Homolog of NCBI NO: 25453520 NR Description: beta-1,4-xylosidase [imported] - Arabidopsis
  misc_feature (45)..(764): Homolog of NCBI NO: 2791278 NR Description: beta-xylosidase [Hypocrea jecorina]
  misc_feature (7)..(760): Homolog of NCBI NO: 18025342 NR Description: beta-D-xylosidase [Hordeum vulgare]
  misc_feature (1)..(753): Homolog of NCBI NO: 25453520 NR Description: beta-1,4-xylosidase [imported] - Arabidopsis
  misc_feature (1)..(759): Homolog of NCBI NO: 15239867 NR Description: glycosyl hydrolase family 3; protein id:
  misc_feature (6)..(759): Homolog of NCBI NO: 15237736 NR Description: glycosyl hydrolase family 3; protein id:
  misc_feature (12)..(758): Homolog of NCBI NO: 15242492 NR Description: glycosyl hydrolase family 3
  misc_feature (30)..(759): Homolog of NCBI NO: 18025340 NR Description: alpha-L-arabinofuranosidase/beta-D-xylosidase
  misc_feature (1)..(753): Homolog of NCBI NO: 15230897 NR Description: glycosyl hydrolase family 3; protein id:
  misc_feature (9)..(751): Homolog of NCBI NO: 15218202 NR Description: glycosyl hydrolase family 3
  misc_feature (312)..(767): Homolog of NCBI NO: 30316196 NR Description: Putative beta-D-xylosidase (PpAz152)
  misc_feature (1)..(753): Homolog of NCBI NO: 15230897 NR Description: glycosyl hydrolase family 3; protein id:
  misc_feature (30)..(759): Homolog of NCBI NO: 18025340 NR Description: alpha-L-arabinofuranosidase/beta-D-xylosidase
  misc_feature (12)..(758): Homolog of NCBI NO: 15242492 NR Description: glycosyl hydrolase family 3
  misc_feature (6)..(759): Homolog of NCBI NO: 15237736 NR Description: glycosyl hydrolase family 3; protein id:
  misc_feature (1)..(759): Homolog of NCBI NO: 15239867 NR Description: glycosyl hydrolase family 3; protein id:
MILHKMAFLAVILFFLISSSSVCVHSRETFACDTKDAATATLRFCQLSVPIPERVRDLIGRLTLAEKVSLLGNTAAAIPRLGIKGYEWWSEALHGVSNVGPGTKFGGVYPAATSFPQVITTVASFNASLWESIGRVVSNEARAMYNGGVGGLTYWSPNVNILRDPRWGRGQETPGEDPVVAGKYAASYVRGLQGNDRSRLKVAACCKHFTAYDLDNWNGVDRFHFNAKVSKQDIEDTFDVPFRMCVKEGNVASIMCSYNQVNGVPTCADPNLLKKTIRNQWGLNGYIVSDCDSVGVLYDTQHYTGTPEEAAADSIKAGLDLDCGPFLGAHTIDAVKKNLLRESDVDNALINTLTVQMRLGMFDGDIAAQPYGHLGPAHVCTPVHKGLALEAAQQGIVLLKNHGSSLPLSSQRHRTVAVIGPNSDATVTMIGNYAGVACGYTSPVQGITGYARTIHQKGCVDVHCMDDRLFDAAVEAARGADATVLVMGLDQSIEAEFKDRNSLLLPGKQQELVSRVAKAAKGPVILVLMSGGPIDISFAEKDRKIPAIVWAGYPGQEGGTAIADILFGSANPGGKLPMTWYPQDYLTNLPMTEMSMRPVHSKRIPGRTYRFYDGPVVYPFGHGLSYTRFTHNIADAPKVIPIAVRGRNGTVSGKSIRVTHARCDRLSLGVHVEVTNVGSRDGTHTMLVFSAPPGGEWAPKKQLVAFERVHVAVGEKKRVQVNIHVCKYLSVVDRAGNRRIPIGDHGIHIGDESHTVSLQASTLGVIKS

SEQ ID NO: 44909 - protein, 763 aa, Arabidopsis thaliana
  peptide (1)..(763): Ceres Seq. ID no. 12600034
  misc_feature (391)..(623): Pfam Name: Glycosyl hydrolase family 3 C terminal domain Pfam Description: Glycosyl hydrolase family 3 C terminal domain
  misc_feature (391)..(623): Pfam Name: Glycosyl hydrolase family 3 C terminal domain Pfam Description: Glycosyl hydrolase family 3 C terminal domain
  misc_feature (40)..(759): Homolog of NCBI NO: 2791278 NR Description: beta-xylosidase [Hypocrea jecorina]
  misc_feature (307)..(762): Homolog of NCBI NO: 30316196 NR Description: Putative beta-D-xylosidase (PpAz152)
  misc_feature (2)..(755): Homolog of NCBI NO: 18025342 NR Description: beta-D-xylosidase [Hordeum vulgare]
  misc_feature (4)..(746): Homolog of NCBI NO: 15218202 NR Description: glycosyl hydrolase family 3
  misc_feature (1)..(748): Homolog of NCBI NO: 25453520 NR Description: beta-1,4-xylosidase [imported] - Arabidopsis
  misc_feature (40)..(759): Homolog of NCBI NO: 2791278 NR Description: beta-xylosidase [Hypocrea jecorina]
  misc_feature (2)..(755): Homolog of NCBI NO: 18025342 NR Description: beta-D-xylosidase [Hordeum vulgare]
  misc_feature (1)..(748): Homolog of NCBI NO: 25453520 NR Description: beta-1,4-xylosidase [imported] - Arabidopsis
  misc_feature (1)..(754): Homolog of NCBI NO: 15239867 NR Description: glycosyl hydrolase family 3; protein id:
  misc_feature (1)..(754): Homolog of NCBI NO: 15237736 NR Description: glycosyl hydrolase family 3; protein id:
  misc_feature (7)..(753): Homolog of NCBI NO: 15242492 NR Description: glycosyl hydrolase family 3
  misc_feature (25)..(754): Homolog of NCBI NO: 18025340 NR Description: alpha-L-arabinofuranosidase/beta-D-xylosidase
  misc_feature (1)..(748): Homolog of NCBI NO: 15230897 NR Description: glycosyl hydrolase family 3; protein id:
  misc_feature (4)..(746): Homolog of NCBI NO: 15218202 NR Description: glycosyl hydrolase family 3
  misc_feature (307)..(762): Homolog of NCBI NO: 30316196 NR Description: Putative beta-D-xylosidase (PpAz152)
  misc_feature (1)..(748): Homolog of NCBI NO: 15230897 NR Description: glycosyl hydrolase family 3; protein id:
  misc_feature (25)..(754): Homolog of NCBI NO: 18025340 NR Description: alpha-L-arabinofuranosidase/beta-D-xylosidase
  misc_feature (7)..(753): Homolog of NCBI NO: 15242492 NR Description: glycosyl hydrolase family 3
  misc_feature (1)..(754): Homolog of NCBI NO: 15237736 NR Description: glycosyl hydrolase family 3; protein id:
  misc_feature (1)..(754): Homolog of NCBI NO: 15239867 NR Description: glycosyl hydrolase family 3; protein id:
MAFLAVILFFLISSSSVCVHSRETFACDTKDAATATLRFCQLSVPIPERVRDLIGRLTLAEKVSLLGNTAAAIPRLGIKGYEWWSEALHGVSNVGPGTKFGGVYPAATSFPQVITTVASFNASLWESIGRVVSNEARAMYNGGVGGLTYWSPNVNILRDPRWGRGQETPGEDPVVAGKYAASYVRGLQGNDRSRLKVAACCKHFTAYDLDNWNGVDRFHFNAKVSKQDIEDTFDVPFRMCVKEGNVASIMCSYNQVNGVPTCADPNLLKKTIRNQWGLNGYIVSDCDSVGVLYDTQHYTGTPEEAAADSIKAGLDLDCGPFLGAHTIDAVKKNLLRESDVDNALINTLTVQMRLGMFDGDIAAQPYGHLGPAHVCTPVHKGLALEAAQQGIVLLKNHGSSLPLSSQRHRTVAVIGPNSDATVTMIGNYAGVACGYTSPVQGITGYARTIHQKGCVDVHCMDDRLFDAAVEAARGADATVLVMGLDQSIEAEFKDRNSLLLPGKQQELVSRVAKAAKGPVILVLMSGGPIDISFAEKDRKIPAIVWAGYPGQEGGTAIADILFGSANPGGKLPMTWYPQDYLTNLPMTEMSMRPVHSKRIPGRTYRFYDGPVVYPFGHGLSYTRFTHNIADAPKVIPIAVRGRNGTVSGKSIRVTHARCDRLSLGVHVEVTNVGSRDGTHTMLVFSAPPGGEWAPKKQLVAFERVHVAVGEKKRVQVNIHVCKYLSVVDRAGNRRIPIGDHGIHIGDESHTVSLQASTLGVIKS

SEQ ID NO: 44910 - DNA, 2693 bp, Arabidopsis thaliana
  misc_feature (1)..(2693): Ceres Seq. ID no. 12559646
  misc_feature: MA Experiment ID: 20000180 Result: Down-regulated in Transcription
  misc_feature: MA Experiment 20000180 PARAMETER Experiment Name: At_Germinating_Seeds_P Parameter: Age (hr) Value: 24 vs. 0
  misc_feature: MA Experiment 20000180 PARAMETER Experiment Name: At_Germinating_Seeds_P Parameter: Tissue Value: Germinating Seeds
  misc_feature: MA Experiment ID: 20000184 Result: Down-regulated in Transcription
  misc_feature: MA Experiment 20000184 PARAMETER Experiment Name: At_Shoots__P Parameter: Age (day) Value: 7
  misc_feature: MA Experiment 20000184 PARAMETER Experiment Name: At_Shoots__P Parameter: Tissue Value: Shoots vs. Whole Plant
  misc_feature: MA Experiment ID: 20000794 Result: Up-regulated in Transcription
  misc_feature: MA Experiment 20000794 PARAMETER Experiment Name: At_Petals_P Parameter: Age (day) Value: 23-25 days
  misc_feature: MA Experiment 20000794 PARAMETER Experiment Name: At_Petals_P Parameter: Plant Line Value: WS
  misc_feature: MA Experiment 20000794 PARAMETER Experiment Name: At_Petals_P Parameter: Tissue Value: Petals vs. Whole plant
  misc_feature: MA Experiment ID: 20001757 Result: Down-regulated in Transcription
  misc_feature: MA Experiment 20001757 PARAMETER Experiment Name: At_50mM_NH4NO3_L-to-H_P Parameter: Timepoint (hr) Value: 6
  misc_feature: MA Experiment 20001757 PARAMETER Experiment Name: At_50mM_NH4NO3_L-to-H_P Parameter: Tissue Value: Leaf
  misc_feature: MA Experiment 20001757 PARAMETER Experiment Name: At_50mM_NH4NO3_L-to-H_P Parameter: Treatment Value: 50mM NH4NO3 vs 100mM Mannitol
atggttgaaagtgctgcgttcccaggagggtattatcggaatacttttgaagcgcctgaggaatcagagggctctgggagctctgcacagattgatactgaggtcactgcgtctgagaattcaagtactcctgcacggaagtgtattatgttgaattcgaatgatgaagatccttatggtgttcagagacaagtcatttccttgtataacatgtcacaatctgagaggaaggatttgatttatcggcttaagctggagttggagcagacaaagatagttcttaaaaatgctgagttgcagagaatgaaccctgctgctgtgtcgtctactagtgatagggtgggttttagcactggtcaaaagatatcatctcgagtcagcaattcgaagaaaccatctgattttgctgtgggttcggggaagaaagttcggcatcagaatgggacttctcgtggatggaatcgtggtacctcagggaagtttgagtcttcgaaagagactatgactagcactcctaacattacactgatgaagcaatgtgacacgctactgagaaaactgtggtctcatccgcattcttgggtgtttcaggcgccagttgatgtagtgaaactgaacatacctgactatctcactactatcaagcatcccatggacttagggacagtaaagaagaacttagcgtctggtgtatactcaagcccacatgagtttgctgctgatgtgaggcttacatttaccaatgcgatgacatataaccctccaggacatgatgttcacattatgggggatatccttagtaaattatttgaagcgcggtggaaaactatcaaaaagaaattaccaccttgtagcatgcaaacgttgcctgcagtaacattggagcccaatgatgaaaggaaagctgctatatctgtacctccggcgaagaagagaaagatggcttcacccgttagagagagtgttccagaaccggtgaagccacttatgacagaagtggagaggcatagattgggcagacaactcgaatcactactcgacgaacttcctgcacatatcattgacttcttgaagaaacacaattcaaatggcggagaaattgcagaagacgaaattgagatagacattgatgttctcagtgatgaagtactggtcactcttcgaaaccttctagatgaatatatacaaaacaaagaagcaaagcagacgaatgttgaaccatgtgaaatagagcttattaatggatcacgaccgagcaattcgtcgctgcaaagaggaaatgaaatggctgatgagtatgtcgatgggaatgaaccgcctatctcaaggagctccagtgattcggattctggtagctcggaagatcaatctgatgacgctaaacccatggttcaaggggattcttccaagatgcctgaaactgcaaactctgaggcgcaaagagatgaaaatacaagaattgatgatctttttgttgggagtcaatctactggtgcgcttgagcagatggatatttgttctcagcaaaagcttagttctgatgaatcagatggccaacatgagggaaatatattagagactccagcttcatctgagaagcgctatagagctgcgctgttgaagaaccggtttgcagatatcattctaaaagcacgagagaaaccacttccacagaatggtattaagggcgatccagaaaggctgcgtaaagaaagagaagaactcgtactgcagaagaagaaagagaaagcgcgtctacaagctgaagcagaggctgctgaagatgctcgtcgccaagctgaagcagaagccgctgcagaagctgctgctgaggctaagcggaagagagaactcgaaagagaagccgctcgccaagctttattgaagatggagaaaactgtagagattaatgagaactcacggtttctcgaggacctagagatgctgagttcgagtgcacctgagcaattaccaagctcagccgaagaaaccagccccgagagacctttagacgcacttggaagtttcaacctcagaggaagcaacccacttgagcaactcggactgtacatgaaacaagatgatgatgaagaagagcccgaagctcctgctgttccaaaacctgatgaaaccagcaccgagagacctttagacgcacttggaagtttcaaactcggagaatgtaatccgctggagcaacttggactgtacatgaaacaagacgacggtgaagaagaagaacccgaggctcctgtggttccaaaacccaatgaaaccagcctcgagagacctgtagacgcatttggaagtttcaacctcaaaggaagtaaccctcttgagcaactcggactgtacatgaaacaagacgatgatgaagaagaacccgaggctcccgctgttccaaacctagccaacgacgtggaagaaggtgaaatcgattgaacaaaagaagtgtataaaatatatacatgtattatatataaaacaatagccagggcaggtacaaacagacgcaagaaatgaaggtcttagcccttcttaagagaagatccaatatgtggctcattgtttaatgagttttggaatggatctctcttaagccagtgtggtgtttaattatgtaaaacacaaagcaaacgcttagaagctttttgccacgagacttcatgaagagtcccttagtgtatgattat

SEQ ID NO: 44911 - protein, 813 aa, Arabidopsis thaliana
  peptide (1)..(813): Ceres Seq. ID no. 12559647
  misc_feature (176)..(265): Pfam Name: Bromodomain Pfam Description: Bromodomain
  misc_feature (51)..(701): Homolog of NCBI NO: 29569106 NR Description: global transcription factor group E [Zea mays]
  misc_feature (752)..(813): Homolog of NCBI NO: 13699186 NR Description: kinase-like protein [Oryza sativa]
  misc_feature (24)..(706): Homolog of NCBI NO: 13699186 NR Description: kinase-like protein [Oryza sativa]
  misc_feature (770)..(813): Homolog of NCBI NO: 11358472 NR Description: kinase-like protein - Arabidopsis thaliana
  misc_feature (1)..(133): Homolog of NCBI NO: 11358472 NR Description: kinase-like protein - Arabidopsis thaliana
  misc_feature (163)..(648): Homolog of NCBI NO: 11358472 NR Description: kinase-like protein - Arabidopsis thaliana
  misc_feature (770)..(813): Homolog of NCBI NO: 18417335 NR Description: kinase - like protein
  misc_feature (1)..(133): Homolog of NCBI NO: 18417335 NR Description: kinase - like protein
  misc_feature (163)..(718): Homolog of NCBI NO: 18417335 NR Description: kinase - like protein
  misc_feature (1)..(494): Homolog of NCBI NO: 17064912 NR Description: Unknown protein [Arabidopsis thaliana]
MVESAAFPGGYYRNTFEAPEESEGSGSSAQIDTEVTASENSSTPARKCIMLNSNDEDPYGVQRQVISLYNMSQSERKDLIYRLKLELEQTKIVLKNAELQRMNPAAVSSTSDRVGFSTGQKISSRVSNSKKPSDFAVGSGKKVRHQNGTSRGWNRGTSGKFESSKETMTSTPNITLMKQCDTLLRKLWSHPHSWVFQAPVDVVKLNIPDYLTTIKHPMDLGTVKKNLASGVYSSPHEFAADVRLTFTNAMTYNPPGHDVHIMGDILSKLFEARWKTIKKKLPPCSMQTLPAVTLEPNDERKAAISVPPAKKRKMASPVRESVPEPVKPLMTEVERHRLGRQLESLLDELPAHIIDFLKKHNSNGGEIAEDEIEIDIDVLSDEVLVTLRNLLDEYIQNKEAKQTNVEPCEIELINGSRPSNSSLQRGNEMADEYVDGNEPPISRSSSDSDSGSSEDQSDDAKPMVQGDSSKMPETANSEAQRDENTRIDDLFVGSQSTGALEQMDICSQQKLSSDESDGQHEGNILETPASSEKRYRAALLKNRFADIILKAREKPLPQNGIKGDPERLRKEREELVLQKKKEKARLQAEAEAAEDARRQAEAEAAAEAAAEAKRKRELEREAARQALLKMEKTVEINENSRFLEDLEMLSSSAPEQLPSSAEETSPERPLDALGSFNLRGSNPLEQLGLYMKQDDDEEEPEAPAVPKPDETSTERPLDALGSFKLGECNPLEQLGLYMKQDDGEEEEPEAPVVPKPNETSLERPVDAFGSFNLKGSNPLEQLGLYMKQDDDEEEPEAPAVPNLANDVEEGEID

SEQ ID NO: 44912 - protein, 764 aa, Arabidopsis thaliana
  peptide (1)..(764): Ceres Seq. ID no. 12559648
  misc_feature (127)..(216): Pfam Name: Bromodomain Pfam Description: Bromodomain
  misc_feature (2)..(652): Homolog of NCBI NO: 29569106 NR Description: global transcription factor group E [Zea mays]
  misc_feature (703)..(764): Homolog of NCBI NO: 13699186 NR Description: kinase-like protein [Oryza sativa]
  misc_feature (1)..(657): Homolog of NCBI NO: 13699186 NR Description: kinase-like protein [Oryza sativa]
  misc_feature (721)..(764): Homolog of NCBI NO: 11358472 NR Description: kinase-like protein - Arabidopsis thaliana
  misc_feature (1)..(84): Homolog of NCBI NO: 11358472 NR Description: kinase-like protein - Arabidopsis thaliana
  misc_feature (114)..(599): Homolog of NCBI NO: 11358472 NR Description: kinase-like protein - Arabidopsis thaliana
  misc_feature (721)..(764): Homolog of NCBI NO: 18417335 NR Description: kinase - like protein
  misc_feature (1)..(84): Homolog of NCBI NO: 18417335 NR Description: kinase - like protein
  misc_feature (114)..(669): Homolog of NCBI NO: 18417335 NR Description: kinase - like protein
  misc_feature (1)..(445): Homolog of NCBI NO: 17064912 NR Description: Unknown protein [Arabidopsis thaliana]
MLNSNDEDPYGVQRQVISLYNMSQSERKDLIYRLKLELEQTKIVLKNAELQRMNPAAVSSTSDRVGFSTGQKISSRVSNSKKPSDFAVGSGKKVRHQNGTSRGWNRGTSGKFESSKETMTSTPNITLMKQCDTLLRKLWSHPHSWVFQAPVDVVKLNIPDYLTTIKHPMDLGTVKKNLASGVYSSPHEFAADVRLTFTNAMTYNPPGHDVHIMGDILSKLFEARWKTIKKKLPPCSMQTLPAVTLEPNDERKAAISVPPAKKRKMASPVRESVPEPVKPLMTEVERHRLGRQLESLLDELPAHIIDFLKKHNSNGGEIAEDEIEIDIDVLSDEVLVTLRNLLDEYIQNKEAKQTNVEPCEIELINGSRPSNSSLQRGNEMADEYVDGNEPPISRSSSDSDSGSSEDQSDDAKPMVQGDSSKMPETANSEAQRDENTRIDDLFVGSQSTGALEQMDICSQQKLSSDESDGQHEGNILETPASSEKRYRAALLKNRFADIILKAREKPLPQNGIKGDPERLRKEREELVLQKKKEKARLQAEAEAAEDARRQAEAEAAAEAAAEAKRKRELEREAARQALLKMEKTVEINENSRFLEDLEMLSSSAPEQLPSSAEETSPERPLDALGSFNLRGSNPLEQLGLYMKQDDDEEEPEAPAVPKPDETSTERPLDALGSFKLGECNPLEQLGLYMKQDDGEEEEPEAPVVPKPNETSLERPVDAFGSFNLKGSNPLEQLGLYMKQDDDEEEPEAPAVPNLANDVEEGEID

SEQ ID NO: 44913 - protein, 743 aa, Arabidopsis thaliana
  peptide (1)..(743): Ceres Seq. ID no. 12559649
  misc_feature (106)..(195): Pfam Name: Bromodomain Pfam Description: Bromodomain
  misc_feature (1)..(631): Homolog of NCBI NO: 29569106 NR Description: global transcription factor group E [Zea mays]
  misc_feature (682)..(743): Homolog of NCBI NO: 13699186 NR Description: kinase-like protein [Oryza sativa]
  misc_feature (1)..(636): Homolog of NCBI NO: 13699186 NR Description: kinase-like protein [Oryza sativa]
  misc_feature (700)..(743): Homolog of NCBI NO: 11358472 NR Description: kinase-like protein - Arabidopsis thaliana
  misc_feature (1)..(63): Homolog of NCBI NO: 11358472 NR Description: kinase-like protein - Arabidopsis thaliana
  misc_feature (93)..(578): Homolog of NCBI NO: 11358472 NR Description: kinase-like protein - Arabidopsis thaliana
  misc_feature (700)..(743): Homolog of NCBI NO: 18417335 NR Description: kinase - like protein
  misc_feature (1)..(63): Homolog of NCBI NO: 18417335 NR Description: kinase - like protein
  misc_feature (93)..(648): Homolog of NCBI NO: 18417335 NR Description: kinase - like protein
  misc_feature (1)..(424): Homolog of NCBI NO: 17064912 NR Description: Unknown protein [Arabidopsis thaliana]
MSQSERKDLIYRLKLELEQTKIVLKNAELQRMNPAAVSSTSDRVGFSTGQKISSRVSNSKKPSDFAVGSGKKVRHQNGTSRGWNRGTSGKFESSKETMTSTPNITLMKQCDTLLRKLWSHPHSWVFQAPVDVVKLNIPDYLTTIKHPMDLGTVKKNLASGVYSSPHEFAADVRLTFTNAMTYNPPGHDVHIMGDILSKLFEARWKTIKKKLPPCSMQTLPAVTLEPNDERKAAISVPPAKKRKMASPVRESVPEPVKPLMTEVERHRLGRQLESLLDELPAHIIDFLKKHNSNGGEIAEDEIEIDIDVLSDEVLVTLRNLLDEYIQNKEAKQTNVEPCEIELINGSRPSNSSLQRGNEMADEYVDGNEPPISRSSSDSDSGSSEDQSDDAKPMVQGDSSKMPETANSEAQRDENTRIDDLFVGSQSTGALEQMDICSQQKLSSDESDGQHEGNILETPASSEKRYRAALLKNRFADIILKAREKPLPQNGIKGDPERLRKEREELVLQKKKEKARLQAEAEAAEDARRQAEAEAAAEAAAEAKRKRELEREAARQALLKMEKTVEINENSRFLEDLEMLSSSAPEQLPSSAEETSPERPLDALGSFNLRGSNPLEQLGLYMKQDDDEEEPEAPAVPKPDETSTERPLDALGSFKLGECNPLEQLGLYMKQDDGEEEEPEAPVVPKPNETSLERPVDAFGSFNLKGSNPLEQLGLYMKQDDDEEEPEAPAVPNLANDVEEGEID

SEQ ID NO: 44914 - DNA, 1040 bp, Arabidopsis thaliana
  misc_feature (1)..(1040): Ceres Seq. ID no. 12559650
  misc_feature: MA Experiment ID: 20000439 Result: Down-regulated in Transcription
  misc_feature: MA Experiment 20000439 PARAMETER Experiment Name: At_Roots__P Parameter: Age (day) Value: 14 vs. 21
  misc_feature: MA Experiment 20000439 PARAMETER Experiment Name: At_Roots__P Parameter: Organism Value: A. thaliana
  misc_feature: MA Experiment 20000439 PARAMETER Experiment Name: At_Roots__P Parameter: Tissue Value: Roots vs. Whole Plant
  misc_feature: MA Experiment ID: 20001911 Result: Up-regulated in Transcription
  misc_feature: MA Experiment 20001911 PARAMETER Experiment Name: At_Drought_Reproduction_P Parameter: Age (day) Value: 40
  misc_feature: MA Experiment 20001911 PARAMETER Experiment Name: At_Drought_Reproduction_P Parameter: Organism Value: A. thaliana
  misc_feature: MA Experiment 20001911 PARAMETER Experiment Name: At_Drought_Reproduction_P Parameter: Plant Line Value: WS
  misc_feature: MA Experiment 20001911 PARAMETER Experiment Name: At_Drought_Reproduction_P Parameter: Timepoint (day) Value: 10
  misc_feature: MA Experiment 20001911 PARAMETER Experiment Name: At_Drought_Reproduction_P Parameter: Tissue Value: Flowers
  misc_feature: MA Experiment 20001911 PARAMETER Experiment Name: At_Drought_Reproduction_P Parameter: Treatment Value: Drought vs. No Drought
acacagagcattccgtggaaaaaccccaataaaatctcaggcaaatctccggcgtaatcgatggcggaggagaatcaagaagaaaccctagaactcaaaccaagtagaaaaccaccacactttgtgctaatacatggcatgagcttaggatcatggtgctggtacaagatcaaatgtctcatggaagtctctggcttcaccgtcacttgcatcgacctcaaatcctccggcatcgattcttcatccgtggattcactcactaccttcgaccaatacaaccaaccactcatcgacttcctctcctctttccccgaacaagaacaggtgatacttgtgggtcacagtgcaggagggcttagcctaacgagtgcgatacagagattccctaagaagatctgtctcgctgtttttattggagcttcgatgctcaaaaacgggcttcagacagatgaagatatgaaagatggagtgcctgatctatcagaacatggtgatgtctacgagcttggttttggtctaggaccggagaatcctcccaccagtgctattatcaaacctgaataccgacgaaaactactttaccacatgagtcctcaacaggaatgttccttggctgcattaatgatgagaccagcaccaattttggcgttaacgacagcaaaactggaagaagaggaaaaagaaaaaggacaagaggagcaagtgccgcgcgtgtacatcaagacgttactcgaccgggtcatgaaaccggagcagcaagacgcgatgataagacggtggccacctagccaagtttacgaattggagagcgaccattctcctttcttctctaacccttttgttctctttggtttactcatcaaagctgccgtttccgtcggttctatctaaaactatttaaagaactaaaggattgccttttgttggttttaaaaccggttaagtgatcagtattgtcgagggagtgtttatttatttttgatttttgtgacattttggtattttatattaatcgttttgaaataaattatgttttgctt

SEQ ID NO: 44915 - protein, 276 aa, Arabidopsis thaliana
  peptide (1)..(276): Ceres Seq. ID no. 12559651
  misc_feature (46)..(268): Pfam Name: alpha/beta hydrolase fold Pfam Description: alpha/beta hydrolase fold
  misc_feature (21)..(270): Homolog of NCBI NO: 25518661 NR Description: hypothetical protein F12G12.19 - Arabidopsis
  misc_feature (21)..(270): Homolog of NCBI NO: 21595837 NR Description: polyneuridine aldehyde esterase, putative
  misc_feature (21)..(270): Homolog of NCBI NO: 15218463 NR Description: polyneuridine aldehyde esterase, putative
  misc_feature (1)..(268): Homolog of NCBI NO: 15222256 NR Description: polyneuridine aldehyde esterase, putative
  misc_feature (1)..(275): Homolog of NCBI NO: 15222699 NR Description: hypothetical protein; protein id: At1g26360.1
  misc_feature (20)..(270): Homolog of NCBI NO: 15230077 NR Description: alpha/beta hydrolase, putative; protein id:
  misc_feature (20)..(269): Homolog of NCBI NO: 15235844 NR Description: cyanohydrin lyase like protein
  misc_feature (20)..(273): Homolog of NCBI NO: 15237165 NR Description: polyneuridine aldehyde esterase-like
  misc_feature (20)..(269): Homolog of NCBI NO: 15866583 NR Description: hypothetical protein [Capsella rubella]
  misc_feature (1)..(276): Homolog of NCBI NO: 15228391 NR Description: putative alpha-hydroxynitrile lyase
MAEENQEETLELKPSRKPPHFVLIHGMSLGSWCWYKIKCLMEVSGFTVTCIDLKSSGIDSSSVDSLTTFDQYNQPLIDFLSSFPEQEQVILVGHSAGGLSLTSAIQRFPKKICLAVFIGASMLKNGLQTDEDMKDGVPDLSEHGDVYELGFGLGPENPPTSAIIKPEYRRKLLYHMSPQQECSLAALMMRPAPILALTTAKLEEEEKEKGQEEQVPRVYIKTLLDRVMKPEQQDAMIRRWPPSQVYELESDHSPFFSNPFVLFGLLIKAAVSVGSI

SEQ ID NO: 44916 - protein, 250 aa, Arabidopsis thaliana
  peptide (1)..(250): Ceres Seq. ID no. 12559652
  misc_feature (20)..(242): Pfam Name: alpha/beta hydrolase fold Pfam Description: alpha/beta hydrolase fold
  misc_feature (1)..(244): Homolog of NCBI NO: 21595837 NR Description: polyneuridine aldehyde esterase, putative
  misc_feature (1)..(244): Homolog of NCBI NO: 25518661 NR Description: hypothetical protein F12G12.19 - Arabidopsis
  misc_feature (1)..(244): Homolog of NCBI NO: 15218463 NR Description: polyneuridine aldehyde esterase, putative
  misc_feature (1)..(242): Homolog of NCBI NO: 15222256 NR Description: polyneuridine aldehyde esterase, putative
  misc_feature (1)..(249): Homolog of NCBI NO: 15222699 NR Description: hypothetical protein; protein id: At1g26360.1
  misc_feature (1)..(244): Homolog of NCBI NO: 15230077 NR Description: alpha/beta hydrolase, putative; protein id:
  misc_feature (1)..(243): Homolog of NCBI NO: 15235844 NR Description: cyanohydrin lyase like protein
  misc_feature (1)..(247): Homolog of NCBI NO: 15237165 NR Description: polyneuridine aldehyde esterase-like
  misc_feature (1)..(243): Homolog of NCBI NO: 15866583 NR Description: hypothetical protein [Capsella rubella]
  misc_feature (1)..(250): Homolog of NCBI NO: 15228391 NR Description: putative alpha-hydroxynitrile lyase
MSLGSWCWYKIKCLMEVSGFTVTCIDLKSSGIDSSSVDSLTTFDQYNQPLIDFLSSFPEQEQVILVGHSAGGLSLTSAIQRFPKKICLAVFIGASMLKNGLQTDEDMKDGVPDLSEHGDVYELGFGLGPENPPTSAIIKPEYRRKLLYHMSPQQECSLAALMMRPAPILALTTAKLEEEEKEKGQEEQVPRVYIKTLLDRVMKPEQQDAMIRRWPPSQVYELESDHSPFFSNPFVLFGLLIKAAVSVGSI

SEQ ID NO: 44917 - protein, 236 aa, Arabidopsis thaliana
  peptide (1)..(236): Ceres Seq. ID no. 12559653
  misc_feature (6)..(228): Pfam Name: alpha/beta hydrolase fold Pfam Description: alpha/beta hydrolase fold
  misc_feature (1)..(230): Homolog of NCBI NO: 25518661 NR Description: hypothetical protein F12G12.19 - Arabidopsis
  misc_feature (1)..(230): Homolog of NCBI NO: 21595837 NR Description: polyneuridine aldehyde esterase, putative
  misc_feature (1)..(230): Homolog of NCBI NO: 15218463 NR Description: polyneuridine aldehyde esterase, putative
  misc_feature (1)..(228): Homolog of NCBI NO: 15222256 NR Description: polyneuridine aldehyde esterase, putative
  misc_feature (1)..(235): Homolog of NCBI NO: 15222699 NR Description: hypothetical protein; protein id: At1g26360.1
  misc_feature (1)..(230): Homolog of NCBI NO: 15230077 NR Description: alpha/beta hydrolase, putative; protein id:
  misc_feature (1)..(229): Homolog of NCBI NO: 15235844 NR Description: cyanohydrin lyase like protein
  misc_feature (1)..(233): Homolog of NCBI NO: 15237165 NR Description: polyneuridine aldehyde esterase-like
  misc_feature (1)..(229): Homolog of NCBI NO: 15866583 NR Description: hypothetical protein [Capsella rubella]
  misc_feature (1)..(236): Homolog of NCBI NO: 15228391 NR Description: putative alpha-hydroxynitrile lyase
MEVSGFTVTCIDLKSSGIDSSSVDSLTTFDQYNQPLIDFLSSFPEQEQVILVGHSAGGLSLTSAIQRFPKKICLAVFIGASMLKNGLQTDEDMKDGVPDLSEHGDVYELGFGLGPENPPTSAIIKPEYRRKLLYHMSPQQECSLAALMMRPAPILALTTAKLEEEEKEKGQEEQVPRVYIKTLLDRVMKPEQQDAMIRRWPPSQVYELESDHSPFFSNPFVLFGLLIKAAVSVGSI

SEQ ID NO: 44918 - DNA, 1227 bp, Arabidopsis thaliana
  misc_feature (1)..(1227): Ceres Seq. ID no. 12559662
  misc_feature: MA Experiment ID: 20001248 Result: Up-regulated in Transcription
  misc_feature: MA Experiment 20001248 PARAMETER Experiment Name: At_Far-red-induction_P Parameter: Age (day) Value: 7
  misc_feature: MA Experiment 20001248 PARAMETER Experiment Name: At_Far-red-induction_P Parameter: Light Value: Far-red vs. White
  misc_feature: MA Experiment 20001248 PARAMETER Experiment Name: At_Far-red-induction_P Parameter: Organism Value: A. thaliana
  misc_feature: MA Experiment 20001248 PARAMETER Experiment Name: At_Far-red-induction_P Parameter: Plant Line Value: Columbia
  misc_feature: MA Experiment 20001248 PARAMETER Experiment Name: At_Far-red-induction_P Parameter: Timepoint (hr) Value: 4
  misc_feature: MA Experiment 20001248 PARAMETER Experiment Name: At_Far-red-induction_P Parameter: Tissue Value: Whole Plant
aaagaagaagaatcaatggcgagaacgagaattataacgaaccgatttgaatctcgctttttgattcgtttccttgaatctccgactctattcgcctcttgtttcacgagttccagatctcttcaaaccctagcctacgaagaagtccgaacctccggtgatcgggagtctgaatctacagctctcatccttcatggcctcctcggttccggtcgcaactggagatcgttttctcgctcccttgcatcatctctctccgtctcctctgcttctgattggaagatgatattggttgatctgaggaaccatgggagatctgcggaagtggaagggcttaatccgcctcatgatcttgtgaattcagctaaggatttagctgatttggttaaagcaagtggctggaattggcctgatgtggtcattggtcactctttgggaggtaaagtggcgttgcagttcatggagagttgtgctcgtggtgattttggtgaatctgcttctcctcctaaacagctatgggtactagactctgtccctggggaagtcaaggcagaaaaaagtgatggtgaagtagagaaagttctgaagactttgcagagtttaccttcatcaatcccttctcgcaagtggcttgttgatcgtatggtcgaacttgggttttcaagatcattatccgagtggattggcagcaatctcaagagatctggagactcagagacatggacctttaaccttgacggagctgtccaaatgttcaactcttacagagagacttcttactggtctttgctagagaacccgccaaaagagacagagataaattttgtgattgcagaaaagagtgaccgatgggacaacgatacaaccaagcggcttgaaacaatagctaaccagagacagaatgtagccgaagggaaggttgcgactcatcttcttcgtaactctggccattgggtacacacagacaatccaaagggactcctagagattgtgagtcccaacttcttctccccacacgagtagacgatgcgctacgaaaatggcattagtctttgcttacaatttcactcctgttcagtatctatatgcagaaatagcaaatccaatcgcaactattttgacgatgcgcggtttttcccgtttgtgtttcctaattttgcattagcatatcctttcaacaatgtacaaacgtttaggaggatctaataacatcaataaacttatcac

SEQ ID NO: 44919 - protein, 340 aa, Arabidopsis thaliana
  peptide (1)..(340): Ceres Seq. ID no. 12559663
  misc_feature (93)..(332): Pfam Name: alpha/beta hydrolase fold Pfam Description: alpha/beta hydrolase fold
  misc_feature (170)..(335): Homolog of NCBI NO: 20161236 NR Description: P0408G07.9 [Oryza sativa (japonica
  misc_feature (60)..(335): Homolog of NCBI NO: 15234891 NR Description: putative protein
  misc_feature (37)..(172): Homolog of NCBI NO: 34908512 NR Description: P0679C12.26 [Oryza sativa (japonica
  misc_feature (172)..(337): Homolog of NCBI NO: 34908512 NR Description: P0679C12.26 [Oryza sativa (japonica
  misc_feature (6)..(340): Homolog of NCBI NO: 7486010 NR Description: hypothetical protein F22O6.50 - Arabidopsis
  misc_feature (6)..(340): Homolog of NCBI NO: 22331752 NR Description: putative protein
KEEESMARTRIITNRFESRFLIRFLESPTLFASCFTSSRSLQTLAYEEVRTSGDRESESTALILHGLLGSGRNWRSFSRSLASSLSVSSASDWKMILVDLRNHGRSAEVEGLNPPHDLVNSAKDLADLVKASGWNWPDVVIGHSLGGKVALQFMESCARGDFGESASPPKQLWVLDSVPGEVKAEKSDGEVEKVLKTLQSLPSSIPSRKWLVDRMVELGFSRSLSEWIGSNLKRSGDSETWTFNLDGAVQMFNSYRETSYWSLLENPPKETEINFVIAEKSDRWDNDTTKRLETIANQRQNVAEGKVATHLLRNSGHWVHTDNPKGLLEIVSPNFFSPHE

SEQ ID NO: 44920 - protein, 335 aa, Arabidopsis thaliana
  peptide (1)..(335): Ceres Seq. ID no. 12559664
  misc_feature (88)..(327): Pfam Name: alpha/beta hydrolase fold Pfam Description: alpha/beta hydrolase fold
  misc_feature (165)..(330): Homolog of NCBI NO: 20161236 NR Description: P0408G07.9 [Oryza sativa (japonica
  misc_feature (55)..(330): Homolog of NCBI NO: 15234891 NR Description: putative protein
  misc_feature (32)..(167): Homolog of NCBI NO: 34908512 NR Description: P0679C12.26 [Oryza sativa (japonica
  misc_feature (167)..(332): Homolog of NCBI NO: 34908512 NR Description: P0679C12.26 [Oryza sativa (japonica
  misc_feature (1)..(335): Homolog of NCBI NO: 7486010 NR Description: hypothetical protein F22O6.50 - Arabidopsis
  misc_feature (1)..(335): Homolog of NCBI NO: 22331752 NR Description: putative protein
MARTRIITNRFESRFLIRFLESPTLFASCFTSSRSLQTLAYEEVRTSGDRESESTALILHGLLGSGRNWRSFSRSLASSLSVSSASDWKMILVDLRNHGRSAEVEGLNPPHDLVNSAKDLADLVKASGWNWPDVVIGHSLGGKVALQFMESCARGDFGESASPPKQLWVLDSVPGEVKAEKSDGEVEKVLKTLQSLPSSIPSRKWLVDRMVELGFSRSLSEWIGSNLKRSGDSETWTFNLDGAVQMFNSYRETSYWSLLENPPKETEINFVIAEKSDRWDNDTTKRLETIANQRQNVAEGKVATHLLRNSGHWVHTDNPKGLLEIVSPNFFSPHE

SEQ ID NO: 44921 - protein, 246 aa, Arabidopsis thaliana
  peptide (1)..(246): Ceres Seq. ID no. 12559665
  misc_feature (1)..(238): Pfam Name: alpha/beta hydrolase fold Pfam Description: alpha/beta hydrolase fold
  misc_feature (76)..(241): Homolog of NCBI NO: 20161236 NR Description: P0408G07.9 [Oryza sativa (japonica
  misc_feature (1)..(241): Homolog of NCBI NO: 15234891 NR Description: putative protein
  misc_feature (1)..(78): Homolog of NCBI NO: 34908512 NR Description: P0679C12.26 [Oryza sativa (japonica
  misc_feature (78)..(243): Homolog of NCBI NO: 34908512 NR Description: P0679C12.26 [Oryza sativa (japonica
  misc_feature (1)..(246): Homolog of NCBI NO: 7486010 NR Description: hypothetical protein F22O6.50 - Arabidopsis
  misc_feature (1)..(246): Homolog of NCBI NO: 22331752 NR Description: putative protein
MILVDLRNHGRSAEVEGLNPPHDLVNSAKDLADLVKASGWNWPDVVIGHSLGGKVALQFMESCARGDFGESASPPKQLWVLDSVPGEVKAEKSDGEVEKVLKTLQSLPSSIPSRKWLVDRMVELGFSRSLSEWIGSNLKRSGDSETWTFNLDGAVQMFNSYRETSYWSLLENPPKETEINFVIAEKSDRWDNDTTKRLETIANQRQNVAEGKVATHLLRNSGHWVHTDNPKGLLEIVSPNFFSPHE

SEQ ID NO: 44922 - DNA, 2136 bp, Arabidopsis thaliana
  misc_feature (1)..(2136): Ceres Seq. ID no. 13575629
  misc_feature: MA Experiment ID: 20000180 Result: Up-regulated in Transcription
  misc_feature: MA Experiment 20000180 PARAMETER Experiment Name: At_Germinating_Seeds_P Parameter: Age (hr) Value: 24 vs. 0
  misc_feature: MA Experiment 20000180 PARAMETER Experiment Name: At_Germinating_Seeds_P Parameter: Tissue Value: Germinating Seeds
attcttttttggaatcatctcagttattacacctcagttactgtacggacgaatgtggttgcttctaaagctcagattctacttgatctagtacatcgtcttctactctagatttttcctataagctcgcttcagaaattgagggacaagatggttggtgtatttaatatcatctgattaagaaggagaaacttgtttttttggcgataaagatagaaaagaacttggcttttgttcttctctctggttcaacaaaagaattcaaaagagaagaaaggatgatgctgatgagaagaaggttggcttgctgtagcagggagagggagattagtatcgatttcgatgaacatgaacaagataaaatgattacatattatggcttggaaacttgtattatcaataatcaatcatatgaagaagagagtggaacaagtcgaggagatggatgtcttacagattcgttagatgatgatgcattttcaagctgttcatcaagcaaagatgcctctagctctttttcttcgaaatggttaccgatgaagaatgatgaacacagttgcgatggtttgaacttatctggaaggtctcaacattttgatgctaaggagaagaagaaacaaggctatggcagtagccaacattttgatgctaaggagaaaccagggtatgtgtactgtcatttggatgtggaagctatgaaggagaaattttctaagttattgctcggcgaagatgtcactgggggatgtaagggtgtccaagtagctttggctttgtcaaatgctgtaacacatcttgctacgtcgatttttggcgagctctggaaattggaacctttgtgtgaagagaagaaacagaaatggagaagggaaatggattggctactttctccaactaactacatgattgagttagtcccttctaagcaaaatgatgccaatggaagatcacttgagataatgactccgaaagcccgcgcagacattcatatgaatctcccagctcttcagaagttggactcaatgctaattgagacactggattctatggtgaacacagagttttggtattctgagattggtagtagagctgaagggaagaacaagagtacaagtgagagcaaacgatggtggcttccatcgccacaagtgcctaaacctggactctctaactcaggaaggaagaaattgcttgacaaaggaaaagttgtttatcaagtcttcaaagctacaaaagccataaacgaaaacattcttcttgaaatgccagttcccattgttatcaaggaagcaatacctaaatctggaaagaacagcctcggtgatgaactgtacaagatgttggctgtggaatctgcaacagtagatgaaatctttatatcgctcaatctgggaaccgaacatgcagcactcgagacagttaacaagttagaatctgctatgtttgcttggaaagaaaggattacagaacaaggcagcaatggtaaatcccctgtaagagcatcgtggtcattcgctaaagatccgttgtctgaaattggtcgcaatgagtcactcttgaaccgagcagaagcgcttagaactcagatcaaatccaaacaccctaatctccctcactcgtttcttgatgctacaaagatccaatatgacaaggacataggtcatgcggttctcgaagcatattcccgaacacttgcgaatctagctttccggattctttcaagaatgggagaaatcttgaaagaagattctttaagcaaccctaactctcctgcaccaccgagttgcttccctagctcccgtgacccttataggacacctgagagacctctgctttcgtcccgtgtaaggcattctttaaccgatgacatgaacaaagccgatgggacagagactggtttagattttttgtttgcagatgctaaggcaagtaattcagtgaatacaactccaagtagaagcagtagactgtggtgtttgagtaaagtgccttctgatacttctccttgatttagagggtcttcctagttcgatgcgtgccacctgaagcttctcctttactttgaaggttttaaattatgaagcctgagatgttgtaaatgtattaacatattgcagttaaagtacgaattcatac

SEQ ID NO: 44923 - protein, 576 aa, Arabidopsis thaliana
  peptide (1)..(576): Ceres Seq. ID no. 13575630
  misc_feature (29)..(497): Pfam Name: Domain of unknown function (DUF315) Pfam Description: Domain of unknown function (DUF315)
  misc_feature (136)..(576): Homolog of NCBI NO: 15230137 NR Description: hypothetical protein [Arabidopsis thaliana]
  misc_feature (135)..(493): Homolog of NCBI NO: 15239292 NR Description: hypothetical protein [Arabidopsis thaliana]
  misc_feature (136)..(564): Homolog of NCBI NO: 15235630 NR Description: hypothetical protein [Arabidopsis thaliana]
  misc_feature (72)..(490): Homolog of NCBI NO: 15810309 NR Description: unknown protein [Arabidopsis thaliana]
  misc_feature (72)..(490): Homolog of NCBI NO: 15233845 NR Description: expressed protein [Arabidopsis thaliana]
  misc_feature (136)..(493): Homolog of NCBI NO: 34908302 NR Description: P0005H10.23 [Oryza sativa (japonica
  misc_feature (136)..(502): Homolog of NCBI NO: 15241663 NR Description: hypothetical protein [Arabidopsis thaliana]
  misc_feature (29)..(576): Homolog of NCBI NO: 12597851 NR Description: hypothetical protein [Arabidopsis thaliana]
  misc_feature (1)..(576): Homolog of NCBI NO: 26452131 NR Description: unknown protein [Arabidopsis thaliana]
  misc_feature (1)..(576): Homolog of NCBI NO: 30692580 NR Description: expressed protein [Arabidopsis thaliana]
MMLMRRRLACCSREREISIDFDEHEQDKMITYYGLETCIINNQSYEEESGTSRGDGCLTDSLDDDAFSSCSSSKDASSSFSSKWLPMKNDEHSCDGLNLSGRSQHFDAKEKKKQGYGSSQHFDAKEKPGYVYCHLDVEAMKEKFSKLLLGEDVTGGCKGVQVALALSNAVTHLATSIFGELWKLEPLCEEKKQKWRREMDWLLSPTNYMIELVPSKQNDANGRSLEIMTPKARADIHMNLPALQKLDSMLIETLDSMVNTEFWYSEIGSRAEGKNKSTSESKRWWLPSPQVPKPGLSNSGRKKLLDKGKVVYQVFKATKAINENILLEMPVPIVIKEAIPKSGKNSLGDELYKMLAVESATVDEIFISLNLGTEHAALETVNKLESAMFAWKERITEQGSNGKSPVRASWSFAKDPLSEIGRNESLLNRAEALRTQIKSKHPNLPHSFLDATKIQYDKDIGHAVLEAYSRTLANLAFRILSRMGEILKEDSLSNPNSPAPPSCFPSSRDPYRTPERPLLSSRVRHSLTDDMNKADGTETGLDFLFADAKASNSVNTTPSRSSRLWCLSKVPSDTSP

SEQ ID NO: 44924 - protein, 575 aa, Arabidopsis thaliana
  peptide (1)..(575): Ceres Seq. ID no. 13575631
  misc_feature (28)..(496): Pfam Name: Domain of unknown function (DUF315) Pfam Description: Domain of unknown function (DUF315)
  misc_feature (135)..(575): Homolog of NCBI NO: 15230137 NR Description: hypothetical protein [Arabidopsis thaliana]
  misc_feature (134)..(492): Homolog of NCBI NO: 15239292 NR Description: hypothetical protein [Arabidopsis thaliana]
  misc_feature (135)..(563): Homolog of NCBI NO: 15235630 NR Description: hypothetical protein [Arabidopsis thaliana]
  misc_feature (71)..(489): Homolog of NCBI NO: 15810309 NR Description: unknown protein [Arabidopsis thaliana]
  misc_feature (71)..(489): Homolog of NCBI NO: 15233845 NR Description: expressed protein [Arabidopsis thaliana]
  misc_feature (135)..(492): Homolog of NCBI NO: 34908302 NR Description: P0005H10.23 [Oryza sativa (japonica
  misc_feature (135)..(501): Homolog of NCBI NO: 15241663 NR Description: hypothetical protein [Arabidopsis thaliana]
  misc_feature (28)..(575): Homolog of NCBI NO: 12597851 NR Description: hypothetical protein [Arabidopsis thaliana]
  misc_feature (1)..(575): Homolog of NCBI NO: 26452131 NR Description: unknown protein [Arabidopsis thaliana]
  misc_feature (1)..(575): Homolog of NCBI NO: 30692580 NR Description: expressed protein [Arabidopsis thaliana]
MLMRRRLACCSREREISIDFDEHEQDKMITYYGLETCIINNQSYEEESGTSRGDGCLTDSLDDDAFSSCSSSKDASSSFSSKWLPMKNDEHSCDGLNLSGRSQHFDAKEKKKQGYGSSQHFDAKEKPGYVYCHLDVEAMKEKFSKLLLGEDVTGGCKGVQVALALSNAVTHLATSIFGELWKLEPLCEEKKQKWRREMDWLLSPTNYMIELVPSKQNDANGRSLEIMTPKARADIHMNLPALQKLDSMLIETLDSMVNTEFWYSEIGSRAEGKNKSTSESKRWWLPSPQVPKPGLSNSGRKKLLDKGKVVYQVFKATKAINENILLEMPVPIVIKEAIPKSGKNSLGDELYKMLAVESATVDEIFISLNLGTEHAALETVNKLESAMFAWKERITEQGSNGKSPVRASWSFAKDPLSEIGRNESLLNRAEALRTQIKSKHPNLPHSFLDATKIQYDKDIGHAVLEAYSRTLANLAFRILSRMGEILKEDSLSNPNSPAPPSCFPSSRDPYRTPERPLLSSRVRHSLTDDMNKADGTETGLDFLFADAKASNSVNTTPSRSSRLWCLSKVPSDTSP

SEQ ID NO: 44925 - protein, 573 aa, Arabidopsis thaliana
  peptide (1)..(573): Ceres Seq. ID no. 13575632
  misc_feature (26)..(494): Pfam Name: Domain of unknown function (DUF315) Pfam Description: Domain of unknown function (DUF315)
  misc_feature (133)..(573): Homolog of NCBI NO: 15230137 NR Description: hypothetical protein [Arabidopsis thaliana]
  misc_feature (132)..(490): Homolog of NCBI NO: 15239292 NR Description: hypothetical protein [Arabidopsis thaliana]
  misc_feature (133)..(561): Homolog of NCBI NO: 15235630 NR Description: hypothetical protein [Arabidopsis thaliana]
  misc_feature (69)..(487): Homolog of NCBI NO: 15810309 NR Description: unknown protein [Arabidopsis thaliana]
  misc_feature (69)..(487): Homolog of NCBI NO: 15233845 NR Description: expressed protein [Arabidopsis thaliana]
  misc_feature (133)..(490): Homolog of NCBI NO: 34908302 NR Description: P0005H10.23 [Oryza sativa (japonica
  misc_feature (133)..(499): Homolog of NCBI NO: 15241663 NR Description: hypothetical protein [Arabidopsis thaliana]
  misc_feature (26)..(573): Homolog of NCBI NO: 12597851 NR Description: hypothetical protein [Arabidopsis thaliana]
  misc_feature (1)..(573): Homolog of NCBI NO: 26452131 NR Description: unknown protein [Arabidopsis thaliana]
  misc_feature (1)..(573): Homolog of NCBI NO: 30692580 NR Description: expressed protein [Arabidopsis thaliana]
MRRRLACCSREREISIDFDEHEQDKMITYYGLETCIINNQSYEEESGTSRGDGCLTDSLDDDAFSSCSSSKDASSSFSSKWLPMKNDEHSCDGLNLSGRSQHFDAKEKKKQGYGSSQHFDAKEKPGYVYCHLDVEAMKEKFSKLLLGEDVTGGCKGVQVALALSNAVTHLATSIFGELWKLEPLCEEKKQKWRREMDWLLSPTNYMIELVPSKQNDANGRSLEIMTPKARADIHMNLPALQKLDSMLIETLDSMVNTEFWYSEIGSRAEGKNKSTSESKRWWLPSPQVPKPGLSNSGRKKLLDKGKVVYQVFKATKAINENILLEMPVPIVIKEAIPKSGKNSLGDELYKMLAVESATVDEIFISLNLGTEHAALETVNKLESAMFAWKERITEQGSNGKSPVRASWSFAKDPLSEIGRNESLLNRAEALRTQIKSKHPNLPHSFLDATKIQYDKDIGHAVLEAYSRTLANLAFRILSRMGEILKEDSLSNPNSPAPPSCFPSSRDPYRTPERPLLSSRVRHSLTDDMNKADGTETGLDFLFADAKASNSVNTTPSRSSRLWCLSKVPSDTSP

SEQ ID NO: 44926 - DNA, 1809 bp, Arabidopsis thaliana
  misc_feature (1)..(1809): Ceres Seq. ID no. 12559702
  misc_feature: MA Experiment ID: 20000355 Result: Down-regulated in Transcription
  misc_feature: MA Experiment 20000355 PARAMETER Experiment Name: At_Siliques_Sub_P Parameter: Age (day) Value: 21
  misc_feature: MA Experiment 20000355 PARAMETER Experiment Name: At_Siliques_Sub_P Parameter: Organism Value: A. thaliana
  misc_feature: MA Experiment 20000355 PARAMETER Experiment Name: At_Siliques_Sub_P Parameter: Plant Line Value: WS
  misc_feature: MA Experiment 20000355 PARAMETER Experiment Name: At_Siliques_Sub_P Parameter: Tissue Value: Less Than 5mm Siliques vs. Whole Plant
gagagattatttttctgttaatttcccttaatcatcatcatcgtcttcatcatcatctctctctcttctcttcgttcctctttctttacacgcttgaaaccctagcaatttcaatttcgtttcctctaatagaatcttcatctttttatggcgtaacgttacacgaatttcaacgatttaggttttttttttttttttttgaagaatcaaacacaaagatagaaacaatgtcaacggagactaccacgggaaattcctcgttaattccagcatcatcatcatcgtcatcctccgacgcaatcgatccagctccgttgctttttaacggcgacgataatgaaggaaacaacggaggaggaggtggggaacggagatctgtcaggagacaagggttgagagaagctgcgaggtttcttagtcgtgctagtagcggacgcgtgatgcgtgagccatctatgcttgtgagagaagccgcggcggagcagctcgaggagaggcagagcgattgggcttattcgaagcctgtggtggtgcttgatatcgtttggaatctggcttttgtttctgttgctacggctattttggtgatgagcaggaaagaacatccgattatgccgcttagagtttggcttttggggtatgctttgcaatgcgtgttgcatatggtttgtgtctgtgttgagtatcggaggaggaacaggaggagaaccaataggacgacgacgacgactcctccacggtcacgttcttcttcttcctcttcatcttcttcttccttggaggaagaagctttgggttccaggaggaattcaggtgtgcaggacttgtcgcttggccacttggataccgaaagcagcagtgttgctaagcatctggaatctgccaatacgatgttttcttttatatggtggatcattggattctactgggtatctgctggtggccaagagttggcacaagaatcccctcggatttactggctgtctattgtctttcttggtttcgatgtgttctttgttgtcttctgtgttgcgttggcctgcgttattggaattgcggtttgctgttgcctgccatgcatcattgcagttttgtacgctgttgctgatcaggaaggggcttcaaaagaagacattgagcagctcaccaaattcaagtttcgcaaactaggtgatgccaacaaacacactaatgatgaagcccaaggaactaccgagggaataatgactgagtgtggtacagattcacccattgaacatactcttttgcaagaagatgcagaatgttgcatctgtctctctgcatatgaagacggaacagagctaagggaactaccttgtggacaccatttccactgttcatgcgtagacaaatggctatacatcaacgcgacttgcccactctgcaaatacaacatcctcaagagtagcaacttggatcgagaggaagtctagaggaaacaactttacgtgttcatgacccacgacatttgatcaggagactttgggttaaggtaaaaaacaagactggtttgtttttttagatacgatgcattgtttgtgaaatgataatgatatctatacgaaattattacacttttgtttgtttttgatttttggtttggaaactaatcaggtctgtacatctatctgtatctatcttcttttacttgaaaccaatgttttgtagtttgtattacctctttctttctcagtcgacctcgaattgttagagatttccatcatcgtagatctttagtcatgtctcaatgacgattttgattgttactttaaagtttttccaatttgt

SEQ ID NO: 44927 - protein, 483 aa, Arabidopsis thaliana
  peptide (1)..(483): Ceres Seq. ID no. 12559703
  misc_feature (428)..(468): Pfam Name: Zinc finger, C3HC4 type (RING finger) Pfam Description: Zinc finger, C3HC4 type (RING finger)
  misc_feature (120)..(475): Homolog of NCBI NO: 11358120 NR Description: hypothetical protein T20K12.80 - Arabidopsis
  misc_feature (147)..(483): Homolog of NCBI NO: 38344371 NR Description: OSJNBb0032E06.5 [Oryza sativa (japonica
  misc_feature (90)..(235): Homolog of NCBI NO: 33146524 NR Description: putative RES protein [Oryza sativa (japonica
  misc_feature (286)..(483): Homolog of NCBI NO: 33146524 NR Description: putative RES protein [Oryza sativa (japonica
  misc_feature (119)..(476): Homolog of NCBI NO: 16604388 NR Description: At1g63170/F16M19_7 [Arabidopsis thaliana]
  misc_feature (119)..(483): Homolog of NCBI NO: 21554228 NR Description: unknown [Arabidopsis thaliana]
  misc_feature (119)..(483): Homolog of NCBI NO: 18407748 NR Description: expressed protein
  misc_feature (317)..(483): Homolog of NCBI NO: 15222059 NR Description: unknown protein; protein id: At1g12760.1
  misc_feature (76)..(288): Homolog of NCBI NO: 15222059 NR Description: unknown protein; protein id: At1g12760.1
  misc_feature (76)..(483): Homolog of NCBI NO: 9502381 NR Description: T12C24.29 [Arabidopsis thaliana]
EIIFLLISLNHHHRLHHHLSLFSSFLFLYTLETLAISISFPLIESSSFYGVTLHEFQRFRFFFFFFEESNTKIETMSTETTTGNSSLIPASSSSSSSDAIDPAPLLFNGDDNEGNNGGGGGERRSVRRQGLREAARFLSRASSGRVMREPSMLVREAAAEQLEERQSDWAYSKPVVVLDIVWNLAFVSVATAILVMSRKEHPIMPLRVWLLGYALQCVLHMVCVCVEYRRRNRRRTNRTTTTTPPRSRSSSSSSSSSSLEEEALGSRRNSGVQDLSLGHLDTESSSVAKHLESANTMFSFIWWIIGFYWVSAGGQELAQESPRIYWLSIVFLGFDVFFVVFCVALACVIGIAVCCCLPCIIAVLYAVADQEGASKEDIEQLTKFKFRKLGDANKHTNDEAQGTTEGIMTECGTDSPIEHTLLQEDAECCICLSAYEDGTELRELPCGHHFHCSCVDKWLYINATCPLCKYNILKSSNLDREEV

SEQ ID NO: 44928 - protein, 408 aa, Arabidopsis thaliana
  peptide (1)..(408): Ceres Seq. ID no. 12559704
  misc_feature (353)..(393): Pfam Name: Zinc finger, C3HC4 type (RING finger) Pfam Description: Zinc finger, C3HC4 type (RING finger)
  misc_feature (45)..(400): Homolog of NCBI NO: 11358120 NR Description: hypothetical protein T20K12.80 - Arabidopsis
  misc_feature (72)..(408): Homolog of NCBI NO: 38344371 NR Description: OSJNBb0032E06.5 [Oryza sativa (japonica
  misc_feature (15)..(160): Homolog of NCBI NO: 33146524 NR Description: putative RES protein [Oryza sativa (japonica
  misc_feature (211)..(408): Homolog of NCBI NO: 33146524 NR Description: putative RES protein [Oryza sativa (japonica
  misc_feature (44)..(401): Homolog of NCBI NO: 16604388 NR Description: At1g63170/F16M19_7 [Arabidopsis thaliana]
  misc_feature (44)..(408): Homolog of NCBI NO: 21554228 NR Description: unknown [Arabidopsis thaliana]
  misc_feature (44)..(408): Homolog of NCBI NO: 18407748 NR Description: expressed protein
  misc_feature (242)..(408): Homolog of NCBI NO: 15222059 NR Description: unknown protein; protein id: At1g12760.1
  misc_feature (1)..(213): Homolog of NCBI NO: 15222059 NR Description: unknown protein; protein id: At1g12760.1
  misc_feature (1)..(408): Homolog of NCBI NO: 9502381 NR Description: T12C24.29 [Arabidopsis thaliana]
MSTETTTGNSSLIPASSSSSSSDAIDPAPLLFNGDDNEGNNGGGGGERRSVRRQGLREAARFLSRASSGRVMREPSMLVREAAAEQLEERQSDWAYSKPVVVLDIVWNLAFVSVATAILVMSRKEHPIMPLRVWLLGYALQCVLHMVCVCVEYRRRNRRRTNRTTTTTPPRSRSSSSSSSSSSLEEEALGSRRNSGVQDLSLGHLDTESSSVAKHLESANTMFSFIWWIIGFYWVSAGGQELAQESPRIYWLSIVFLGFDVFFVVFCVALACVIGIAVCCCLPCIIAVLYAVADQEGASKEDIEQLTKFKFRKLGDANKHTNDEAQGTTEGIMTECGTDSPIEHTLLQEDAECCICLSAYEDGTELRELPCGHHFHCSCVDKWLYINATCPLCKYNILKSSNLDREEV

SEQ ID NO: 44929 - protein, 337 aa, Arabidopsis thaliana
  peptide (1)..(337): Ceres Seq. ID no. 12559705
  misc_feature (282)..(322): Pfam Name: Zinc finger, C3HC4 type (RING finger) Pfam Description: Zinc finger, C3HC4 type (RING finger)
  misc_feature (1)..(329): Homolog of NCBI NO: 11358120 NR Description: hypothetical protein T20K12.80 - Arabidopsis
  misc_feature (1)..(337): Homolog of NCBI NO: 38344371 NR Description: OSJNBb0032E06.5 [Oryza sativa (japonica
  misc_feature (1)..(89): Homolog of NCBI NO: 33146524 NR Description: putative RES protein [Oryza sativa (japonica
  misc_feature (140)..(337): Homolog of NCBI NO: 33146524 NR Description: putative RES protein [Oryza sativa (japonica
  misc_feature (1)..(330): Homolog of NCBI NO: 16604388 NR Description: At1g63170/F16M19_7 [Arabidopsis thaliana]
  misc_feature (1)..(337): Homolog of NCBI NO: 21554228 NR Description: unknown [Arabidopsis thaliana]
  misc_feature (1)..(337): Homolog of NCBI NO: 18407748 NR Description: expressed protein
  misc_feature (171)..(337): Homolog of NCBI NO: 15222059 NR Description: unknown protein; protein id: At1g12760.1
  misc_feature (1)..(142): Homolog of NCBI NO: 15222059 NR Description: unknown protein; protein id: At1g12760.1
  misc_feature (1)..(337): Homolog of NCBI NO: 9502381 NR Description: T12C24.29 [Arabidopsis thaliana]
MREPSMLVREAAAEQLEERQSDWAYSKPVVVLDIVWNLAFVSVATAILVMSRKEHPIMPLRVWLLGYALQCVLHMVCVCVEYRRRNRRRTNRTTTTTPPRSRSSSSSSSSSSLEEEALGSRRNSGVQDLSLGHLDTESSSVAKHLESANTMFSFIWWIIGFYWVSAGGQELAQESPRIYWLSIVFLGFDVFFVVFCVALACVIGIAVCCCLPCIIAVLYAVADQEGASKEDIEQLTKFKFRKLGDANKHTNDEAQGTTEGIMTECGTDSPIEHTLLQEDAECCICLSAYEDGTELRELPCGHHFHCSCVDKWLYINATCPLCKYNILKSSNLDREEV

SEQ ID NO: 44930 - DNA, 1765 bp, Arabidopsis thaliana
  misc_feature (1)..(1765): Ceres Seq. ID no. 12600050
  misc_feature: MA Experiment ID: 20000315 Result: Down-regulated in Transcription
  misc_feature: MA Experiment 20000315 PARAMETER Experiment Name: At_14day_Shoots-Roots_Sub_P Parameter: Age (day) Value: 14
  misc_feature: MA Experiment 20000315 PARAMETER Experiment Name: At_14day_Shoots-Roots_Sub_P Parameter: Organism Value: A. thaliana
  misc_feature: MA Experiment 20000315 PARAMETER Experiment Name: At_14day_Shoots-Roots_Sub_P Parameter: Plant Line Value: WS
  misc_feature: MA Experiment 20000315 PARAMETER Experiment Name: At_14day_Shoots-Roots_Sub_P Parameter: Tissue Value: Shoots vs. Whole Plant
  misc_feature: MA Experiment ID: 20000355 Result: Up-regulated in Transcription
  misc_feature: MA Experiment 20000355 PARAMETER Experiment Name: At_Siliques_Sub_P Parameter: Age (day) Value: 21
  misc_feature: MA Experiment 20000355 PARAMETER Experiment Name: At_Siliques_Sub_P Parameter: Organism Value: A. thaliana
  misc_feature: MA Experiment 20000355 PARAMETER Experiment Name: At_Siliques_Sub_P Parameter: Plant Line Value: WS
  misc_feature: MA Experiment 20000355 PARAMETER Experiment Name: At_Siliques_Sub_P Parameter: Tissue Value: Less Than 5mm Siliques vs. Whole Plant
  misc_feature: MA Experiment ID: 20000440 Result: Up-regulated in Transcription
  misc_feature: MA Experiment 20000440 PARAMETER Experiment Name: At_Closed-Flower__Sub_P Parameter: Tissue Value: Closed Flower vs. Whole Plant
cttttacagaggactgcaagaacgatcaagaagcaagaaagacgtttcagaagaacaaacgtcttcttcttgttcttcttcttcctcctcttcttttttttgttttcattacgacgagaaaatttgagttcgtgatcgcttgaacaaccatcatcatcatctagagccccaaaaaagaagaagctgcgggccggttattttggttaattagtctaaatccatggcaggaggggcatttatagacgagagtggccatggaggagactacgaaggtcgtgtaaccgcgtttgtcatgataacctgcattgtagctgcaatgggtggtctcctctttggttacgacattggtatctcaggaggagtgatatcaatggaggactttctaacgaaattcttccctgacgtgcttcgtcaaatgcaaaacaaaagagggcgtgaaacagaatattgtaaatatgacaatgagcttcttactctcttcacttcctctctttacctcgctgctttgttcgcttctttccttgcctccaccattacaaggctttttggccggaaggtctcaatggttatcgggtctctcgcttttctctctggagctcttctcaacggtttagctatcaacctcgagatgttgatcatcgggcggttatttctcggtgtaggtgtcggattcgctaaccaatctgttcctctttacctctctgagatggctcctgctaagatcagaggagctctcaacattggttttcaattagcaatcacgatcgggatcttagccgcgaacattgtcaattacgtgaccccaaagctccagaacgggatcggatggagattatctctcggtttagctggagttccggccgttatgatgcttgtcggatgctttttcttgccagatacgccaaactcaatccttgaacgtggaaacaaagaaaaggctaaggagatgctgcagaagatcagaggaaccatggaggttgagcatgagtttaatgaactttgcaacgcgtgtgaagccgcgaagaaagttaagcatccatggacgaacataatgcaagctcgttatcgaccgcagctcacgttttgtaccttcatcccattcttccagcagctaaccgggatcaatgtcattatgttctatgcacctgttctgtttaagaccatcggttttggaaatgacgcctctctcatatccgcagttatcaccggtcttgtcaatgtcctttccaccattgtctccatctactccgttgacaaattcggacgaagagctttgtttcttcaaggtggttttcagatgatcgtgacccagatcgcggtcgggtcgatgatcggatggaaatttggattcaacggggaaggaaatttgtcaggggttgatgcggatataatcttggcactgatatgtctctatgtggcgggtttcgcgtggtcatggggaccgttgggatggttagtgccgagtgagatatgtccattggaaattagatcagcaggacaatcgttaaacgtttcggtgaacatgttctttacattcttcattggacaattcttcttgacgatgctttgccatatgaagtttggtttgttctatttcttcgcgggtatggtcttgatcatgaccattttcatttacttcttgttgccggagacaaaaggtgttccgattgaggagatggggaaagtgtggaaagagcatagatattgggggaaatatagtaataatgatgatggtgatgatgttgatgatgatgcttatttttag

SEQ ID NO: 44931 - protein, 514 aa, Arabidopsis thaliana
  peptide (1)..(514): Ceres Seq. ID no. 12600051
  misc_feature (27)..(490): Pfam Name: Sugar (and other) transporter Pfam Description: Sugar (and other) transporter
  misc_feature (1)..(504): Homolog of NCBI NO: 100347 NR Description: monosaccharide transport protein MST1 - common
  misc_feature (2)..(509): Homolog of NCBI NO: 4138724 NR Description: hexose transporter [Vitis vinifera]
  misc_feature (3)..(504): Homolog of NCBI NO: 30349804 NR Description: monosaccharide-H+ symporter [Datisca glomerata]
  misc_feature (1)..(509): Homolog of NCBI NO: 1353516 NR Description: sugar transporter
  misc_feature (11)..(504): Homolog of NCBI NO: 7446727 NR Description: monosaccharid transport protein - fava bean
  misc_feature (1)..(499): Homolog of NCBI NO: 15230987 NR Description: monosaccharide transport protein, STP4
  misc_feature (1)..(506): Homolog of NCBI NO: 3108161 NR Description: putative monosaccharide transporter 1 [Petunia x
  misc_feature (1)..(503): Homolog of NCBI NO: 15231001 NR Description: putative monosaccharide transport protein, STP4
  misc_feature (1)..(503): Homolog of NCBI NO: 15222935 NR Description: hexose transporter, putative; protein id:
  misc_feature (1)..(514): Homolog of NCBI NO: 15237271 NR Description: monosaccharide transporter; protein id:
MAGGAFIDESGHGGDYEGRVTAFVMITCIVAAMGGLLFGYDIGISGGVISMEDFLTKFFPDVLRQMQNKRGRETEYCKYDNELLTLFTSSLYLAALFASFLASTITRLFGRKVSMVIGSLAFLSGALLNGLAINLEMLIIGRLFLGVGVGFANQSVPLYLSEMAPAKIRGALNIGFQLAITIGILAANIVNYVTPKLQNGIGWRLSLGLAGVPAVMMLVGCFFLPDTPNSILERGNKEKAKEMLQKIRGTMEVEHEFNELCNACEAAKKVKHPWTNIMQARYRPQLTFCTFIPFFQQLTGINVIMFYAPVLFKTIGFGNDASLISAVITGLVNVLSTIVSIYSVDKFGRRALFLQGGFQMIVTQIAVGSMIGWKFGFNGEGNLSGVDADIILALICLYVAGFAWSWGPLGWLVPSEICPLEIRSAGQSLNVSVNMFFTFFIGQFFLTMLCHMKFGLFYFFAGMVLIMTIFIYFLLPETKGVPIEEMGKVWKEHRYWGKYSNNDDGDDVDDDAYF

SEQ ID NO: 44932 - protein, 490 aa, Arabidopsis thaliana
  peptide (1)..(490): Ceres Seq. ID no. 12600052
  misc_feature (3)..(466): Pfam Name: Sugar (and other) transporter Pfam Description: Sugar (and other) transporter
  misc_feature (1)..(480): Homolog of NCBI NO: 100347 NR Description: monosaccharide transport protein MST1 - common
  misc_feature (1)..(485): Homolog of NCBI NO: 4138724 NR Description: hexose transporter [Vitis vinifera]
  misc_feature (1)..(480): Homolog of NCBI NO: 30349804 NR Description: monosaccharide-H+ symporter [Datisca glomerata]
  misc_feature (1)..(485): Homolog of NCBI NO: 1353516 NR Description: sugar transporter
  misc_feature (1)..(480): Homolog of NCBI NO: 7446727 NR Description: monosaccharid transport protein - fava bean
  misc_feature (1)..(475): Homolog of NCBI NO: 15230987 NR Description: monosaccharide transport protein, STP4
  misc_feature (1)..(482): Homolog of NCBI NO: 3108161 NR Description: putative monosaccharide transporter 1 [Petunia x
  misc_feature (1)..(479): Homolog of NCBI NO: 15231001 NR Description: putative monosaccharide transport protein, STP4
  misc_feature (1)..(479): Homolog of NCBI NO: 15222935 NR Description: hexose transporter, putative; protein id:
  misc_feature (1)..(490): Homolog of NCBI NO: 15237271 NR Description: monosaccharide transporter; protein id:
MITCIVAAMGGLLFGYDIGISGGVISMEDFLTKFFPDVLRQMQNKRGRETEYCKYDNELLTLFTSSLYLAALFASFLASTITRLFGRKVSMVIGSLAFLSGALLNGLAINLEMLIIGRLFLGVGVGFANQSVPLYLSEMAPAKIRGALNIGFQLAITIGILAANIVNYVTPKLQNGIGWRLSLGLAGVPAVMMLVGCFFLPDTPNSILERGNKEKAKEMLQKIRGTMEVEHEFNELCNACEAAKKVKHPWTNIMQARYRPQLTFCTFIPFFQQLTGINVIMFYAPVLFKTIGFGNDASLISAVITGLVNVLSTIVSIYSVDKFGRRALFLQGGFQMIVTQIAVGSMIGWKFGFNGEGNLSGVDADIILALICLYVAGFAWSWGPLGWLVPSEICPLEIRSAGQSLNVSVNMFFTFFIGQFFLTMLCHMKFGLFYFFAGMVLIMTIFIYFLLPETKGVPIEEMGKVWKEHRYWGKYSNNDDGDDVDDDAYF

SEQ ID NO: 44933 - protein, 482 aa, Arabidopsis thaliana
  peptide (1)..(482): Ceres Seq. ID no. 12600053
  misc_feature (1)..(458): Pfam Name: Sugar (and other) transporter Pfam Description: Sugar (and other) transporter
  misc_feature (1)..(472): Homolog of NCBI NO: 100347 NR Description: monosaccharide transport protein MST1 - common
  misc_feature (1)..(477): Homolog of NCBI NO: 4138724 NR Description: hexose transporter [Vitis vinifera]
  misc_feature (1)..(472): Homolog of NCBI NO: 30349804 NR Description: monosaccharide-H+ symporter [Datisca glomerata]
  misc_feature (1)..(477): Homolog of NCBI NO: 1353516 NR Description: sugar transporter
  misc_feature (1)..(472): Homolog of NCBI NO: 7446727 NR Description: monosaccharid transport protein - fava bean
  misc_feature (1)..(467): Homolog of NCBI NO: 15230987 NR Description: monosaccharide transport protein, STP4
  misc_feature (1)..(474): Homolog of NCBI NO: 3108161 NR Description: putative monosaccharide transporter 1 [Petunia x
  misc_feature (1)..(471): Homolog of NCBI NO: 15231001 NR Description: putative monosaccharide transport protein, STP4
  misc_feature (1)..(471): Homolog of NCBI NO: 15222935 NR Description: hexose transporter, putative; protein id:
  misc_feature (1)..(482): Homolog of NCBI NO: 15237271 NR Description: monosaccharide transporter; protein id:
MGGLLFGYDIGISGGVISMEDFLTKFFPDVLRQMQNKRGRETEYCKYDNELLTLFTSSLYLAALFASFLASTITRLFGRKVSMVIGSLAFLSGALLNGLAINLEMLIIGRLFLGVGVGFANQSVPLYLSEMAPAKIRGALNIGFQLAITIGILAANIVNYVTPKLQNGIGWRLSLGLAGVPAVMMLVGCFFLPDTPNSILERGNKEKAKEMLQKIRGTMEVEHEFNELCNACEAAKKVKHPWTNIMQARYRPQLTFCTFIPFFQQLTGINVIMFYAPVLFKTIGFGNDASLISAVITGLVNVLSTIVSIYSVDKFGRRALFLQGGFQMIVTQIAVGSMIGWKFGFNGEGNLSGVDADIILALICLYVAGFAWSWGPLGWLVPSEICPLEIRSAGQSLNVSVNMFFTFFIGQFFLTMLCHMKFGLFYFFAGMVLIMTIFIYFLLPETKGVPIEEMGKVWKEHRYWGKYSNNDDGDDVDDDAYF

SEQ ID NO: 44934 - DNA, 2325 bp, Arabidopsis thaliana; identical to SEQ ID NO: 40668
  misc_feature (1)..(2325): Ceres Seq. ID no. 12600038
  misc_feature: MA Experiment ID: 108464 Result: Down-regulated in Transcription
  misc_feature: MA Experiment 108464 PARAMETER Experiment Name: At_Germinating_Seeds_cDNA_P Parameter: Age (day) Value: 4 vs. 0
  misc_feature: MA Experiment 108464 PARAMETER Experiment Name: At_Germinating_Seeds_cDNA_P Parameter: Tissue Value: Germinating Seeds
  misc_feature: MA Experiment ID: 108488 Result: Down-regulated in Transcription
  misc_feature: MA Experiment ID: 108605 Result: Up-regulated in Transcription
  misc_feature: MA Experiment 108605 PARAMETER Experiment Name: At_100uM_ABA_cDNA_P Parameter: Timepoint (hr) Value: 6
  misc_feature: MA Experiment 108605 PARAMETER Experiment Name: At_100uM_ABA_cDNA_P Parameter: Tissue Value: Aerial
  misc_feature: MA Experiment 108605 PARAMETER Experiment Name: At_100uM_ABA_cDNA_P Parameter: Treatment Value: 100uM ABA vs. No Treatment
  misc_feature: MA Experiment ID: 108607 Result: Up-regulated in Transcription
  misc_feature: MA Experiment 108607 PARAMETER Experiment Name: At_100uM_ABA_cDNA_P Parameter: Timepoint (hr) Value: 4
  misc_feature: MA Experiment 108607 PARAMETER Experiment Name: At_100uM_ABA_cDNA_P Parameter: Tissue Value: Aerial
  misc_feature: MA Experiment 108607 PARAMETER Experiment Name: At_100uM_ABA_cDNA_P Parameter: Treatment Value: 100uM ABA vs. No Treatment
  misc_feature: MA Experiment ID: 20000069 Result: Up-regulated in Transcription
  misc_feature: MA Experiment 20000069 PARAMETER Experiment Name: At_100uM_ABA_Mutants_cDNA_P Parameter: Plant Line Value: CS23
  misc_feature: MA Experiment 20000069 PARAMETER Experiment Name: At_100uM_ABA_Mutants_cDNA_P Parameter: Timepoint (hr) Value: 6
  misc_feature: MA Experiment 20000069 PARAMETER Experiment Name: At_100uM_ABA_Mutants_cDNA_P Parameter: Tissue Value: Aerial
  misc_feature: MA Experiment 20000069 PARAMETER Experiment Name: At_100uM_ABA_Mutants_cDNA_P Parameter: Treatment Value: 100uM ABA vs. No Treatment
  misc_feature: MA Experiment ID: 20000072 Result: Up-regulated in Transcription
  misc_feature: MA Experiment 20000072 PARAMETER Experiment Name: At_100uM_ABA_Mutants_cDNA_P Parameter: Plant Line Value: CS8105
  misc_feature: MA Experiment 20000072 PARAMETER Experiment Name: At_100uM_ABA_Mutants_cDNA_P Parameter: Timepoint (hr) Value: 6
  misc_feature: MA Experiment 20000072 PARAMETER Experiment Name: At_100uM_ABA_Mutants_cDNA_P Parameter: Tissue Value: Aerial
  misc_feature: MA Experiment 20000072 PARAMETER Experiment Name: At_100uM_ABA_Mutants_cDNA_P Parameter: Treatment Value: 100uM ABA vs. No Treatment
  misc_feature: MA Experiment ID: 20000087 Result: Up-regulated in Transcription
  misc_feature: MA Experiment 20000087 PARAMETER Experiment Name: At_100uM_ABA_Mutants_cDNA_P Parameter: Plant Line Value: WS
  misc_feature: MA Experiment 20000087 PARAMETER Experiment Name: At_100uM_ABA_Mutants_cDNA_P Parameter: Timepoint (hr) Value: 6
  misc_feature: MA Experiment 20000087 PARAMETER Experiment Name: At_100uM_ABA_Mutants_cDNA_P Parameter: Tissue Value: Aerial
  misc_feature: MA Experiment 20000087 PARAMETER Experiment Name: At_100uM_ABA_Mutants_cDNA_P Parameter: Treatment Value: 100uM ABA vs. No Treatment
  misc_feature: MA Experiment ID: 20000113 Result: Down-regulated in Transcription
  misc_feature: MA Experiment 20000113 PARAMETER Experiment Name: At_42deg_Heat_cDNA_P Parameter: Temperature (deg C) Value: 42 vs. 22
  misc_feature: MA Experiment 20000113 PARAMETER Experiment Name: At_42deg_Heat_cDNA_P Parameter: Timepoint (hr) Value: 8
  misc_feature: MA Experiment 20000113 PARAMETER Experiment Name: At_42deg_Heat_cDNA_P Parameter: Tissue Value: Aerial
  misc_feature: MA Experiment ID: 20000185 Result: Up-regulated in Transcription
  misc_feature: MA Experiment 20000185 PARAMETER Experiment Name: At_Roots__P Parameter: Age (day) Value: 7 vs. 21
  misc_feature: MA Experiment 20000185 PARAMETER Experiment Name: At_Roots__P Parameter: Organism Value: A. thaliana
  misc_feature: MA Experiment 20000185 PARAMETER Experiment Name: At_Roots__P Parameter: Tissue Value: Roots vs. Whole Plant
  misc_feature: MA Experiment ID: 20000224 Result: Up-regulated in Transcription
  misc_feature: MA Experiment ID: 20000234 Result: Up-regulated in Transcription
  misc_feature: MA Experiment 20000234 PARAMETER Experiment Name: At_Siliques_P Parameter: Age (day) Value: 21
  misc_feature: MA Experiment 20000234 PARAMETER Experiment Name: At_Siliques_P Parameter: Organism Value: A. thaliana
  misc_feature: MA Experiment 20000234 PARAMETER Experiment Name: At_Siliques_P Parameter: Plant Line Value: WS
  misc_feature: MA Experiment 20000234 PARAMETER Experiment Name: At_Siliques_P Parameter: Tissue Value: Less Than 5mm Siliques vs. Whole Plant
  misc_feature: MA Experiment ID: 20000264 Result: Up-regulated in Transcription
  misc_feature: MA Experiment 20000264 PARAMETER Experiment Name: At_Open_Flower_P Parameter: Age (day) Value: 21
  misc_feature: MA Experiment 20000264 PARAMETER Experiment Name: At_Open_Flower_P Parameter: Plant Line Value: WS
  misc_feature: MA Experiment 20000264 PARAMETER Experiment Name: At_Open_Flower_P Parameter: Tissue Value: Open Flower vs. Whole Plant
  misc_feature: MA Experiment ID: 20000286 Result: Up-regulated in Transcription
  misc_feature: MA Experiment 20000286 PARAMETER Experiment Name: At_Open_Flower_P Parameter: Age (day) Value: 21
  misc_feature: MA Experiment 20000286 PARAMETER Experiment Name: At_Open_Flower_P Parameter: Plant Line Value: WS
  misc_feature: MA Experiment 20000286 PARAMETER Experiment Name: At_Open_Flower_P Parameter: Tissue Value: Half Open vs. Whole Plant
  misc_feature: MA Experiment ID: 20000436 Result: Up-regulated in Transcription
  misc_feature: MA Experiment 20000436 PARAMETER Experiment Name: At_Drought_P Parameter: Age (day) Value: 7
  misc_feature: MA Experiment 20000436 PARAMETER Experiment Name: At_Drought_P Parameter: Organism Value: A. thaliana
  misc_feature: MA Experiment 20000436 PARAMETER Experiment Name: At_Drought_P Parameter: Plant Line Value: WS
  misc_feature: MA Experiment 20000436 PARAMETER Experiment Name: At_Drought_P Parameter: Timepoint (hr) Value: 12
  misc_feature: MA Experiment 20000436 PARAMETER Experiment Name: At_Drought_P Parameter: Tissue Value: Whole Plant
  misc_feature: MA Experiment 20000436 PARAMETER Experiment Name: At_Drought_P Parameter: Treatment Value: Drought vs. No Drought
  misc_feature: MA Experiment ID: 20000437 Result: Up-regulated in Transcription
  misc_feature: MA Experiment 20000437 PARAMETER Experiment Name: At_Drought_P Parameter: Age (day) Value: 8
  misc_feature: MA Experiment 20000437 PARAMETER Experiment Name: At_Drought_P Parameter: Organism Value: A. thaliana
  misc_feature: MA Experiment 20000437 PARAMETER Experiment Name: At_Drought_P Parameter: Plant Line Value: WS
  misc_feature: MA Experiment 20000437 PARAMETER Experiment Name: At_Drought_P Parameter: Timepoint (hr) Value: 24
  misc_feature: MA Experiment 20000437 PARAMETER Experiment Name: At_Drought_P Parameter: Tissue Value: Whole Plant
  misc_feature: MA Experiment 20000437 PARAMETER Experiment Name: At_Drought_P Parameter: Treatment Value: Drought vs. No Drought
  misc_feature: MA Experiment ID: 20000439 Result: Up-regulated in Transcription
  misc_feature: MA Experiment 20000439 PARAMETER Experiment Name: At_Roots__P Parameter: Age (day) Value: 14 vs. 21
  misc_feature: MA Experiment 20000439 PARAMETER Experiment Name: At_Roots__P Parameter: Organism Value: A. thaliana
  misc_feature: MA Experiment 20000439 PARAMETER Experiment Name: At_Roots__P Parameter: Tissue Value: Roots vs. Whole Plant
  misc_feature: MA Experiment ID: 20000794 Result: Up-regulated in Transcription
  misc_feature: MA Experiment 20000794 PARAMETER Experiment Name: At_Petals_P Parameter: Age (day) Value: 23-25 days
  misc_feature: MA Experiment 20000794 PARAMETER Experiment Name: At_Petals_P Parameter: Plant Line Value: WS
  misc_feature: MA Experiment 20000794 PARAMETER Experiment Name: At_Petals_P Parameter: Tissue Value: Petals vs. Whole plant
  misc_feature: MA Experiment ID: 20001557 Result: Up-regulated in Transcription
  misc_feature: MA Experiment 20001557 PARAMETER Experiment Name: At_Drought_Soil_Dry_P Parameter: Age (day) Value: 27
  misc_feature: MA Experiment 20001557 PARAMETER Experiment Name: At_Drought_Soil_Dry_P Parameter: Organism Value: A. thaliana
  misc_feature: MA Experiment 20001557 PARAMETER Experiment Name: At_Drought_Soil_Dry_P Parameter: Plant Line Value: WS
  misc_feature: MA Experiment 20001557 PARAMETER Experiment Name: At_Drought_Soil_Dry_P Parameter: Post Timepoint (hr) Value: 3
  misc_feature: MA Experiment 20001557 PARAMETER Experiment Name: At_Drought_Soil_Dry_P Parameter: Post-Treatment Value: Re-Water vs. No Drought
  misc_feature: MA Experiment 20001557 PARAMETER Experiment Name: At_Drought_Soil_Dry_P Parameter: Timepoint (day) Value: 13
  misc_feature: MA Experiment 20001557 PARAMETER Experiment Name: At_Drought_Soil_Dry_P Parameter: Treatment Value: Drought vs. No Drought
  misc_feature: MA Experiment ID: 20001757 Result: Down-regulated in Transcription
  misc_feature: MA Experiment 20001757 PARAMETER Experiment Name: At_50mM_NH4NO3_L-to-H_P Parameter: Timepoint (hr) Value: 6
  misc_feature: MA Experiment 20001757 PARAMETER Experiment Name: At_50mM_NH4NO3_L-to-H_P Parameter: Tissue Value: Leaf
  misc_feature: MA Experiment 20001757 PARAMETER Experiment Name: At_50mM_NH4NO3_L-to-H_P Parameter: Treatment Value: 50mM NH4NO3 vs 100mM Mannitol
  misc_feature: MA Experiment ID: 20001904 Result: Up-regulated in Transcription
  misc_feature: MA Experiment 20001904 PARAMETER Experiment Name: At_Drought_Reproduction_P Parameter: Age (day) Value: 37
  misc_feature: MA Experiment 20001904 PARAMETER Experiment Name: At_Drought_Reproduction_P Parameter: Organism Value: A. thaliana
  misc_feature: MA Experiment 20001904 PARAMETER Experiment Name: At_Drought_Reproduction_P Parameter: Plant Line Value: WS
  misc_feature: MA Experiment 20001904 PARAMETER Experiment Name: At_Drought_Reproduction_P Parameter: Timepoint (day) Value: 7
  misc_feature: MA Experiment 20001904 PARAMETER Experiment Name: At_Drought_Reproduction_P Parameter: Tissue Value: Rosettes
  misc_feature: MA Experiment 20001904 PARAMETER Experiment Name: At_Drought_Reproduction_P Parameter: Treatment Value: Drought vs. No Drought
  misc_feature: MA Experiment ID: 20001905 Result: Up-regulated in Transcription
  misc_feature: MA Experiment 20001905 PARAMETER Experiment Name: At_Drought_Reproduction_P Parameter: Age (day) Value: 40
  misc_feature: MA Experiment 20001905 PARAMETER Experiment Name: At_Drought_Reproduction_P Parameter: Organism Value: A. thaliana
  misc_feature: MA Experiment 20001905 PARAMETER Experiment Name: At_Drought_Reproduction_P Parameter: Plant Line Value: WS
  misc_feature: MA Experiment 20001905 PARAMETER Experiment Name: At_Drought_Reproduction_P Parameter: Timepoint (day) Value: 10
  misc_feature: MA Experiment 20001905 PARAMETER Experiment Name: At_Drought_Reproduction_P Parameter: Tissue Value: Rosettes
  misc_feature: MA Experiment 20001905 PARAMETER Experiment Name: At_Drought_Reproduction_P Parameter: Treatment Value: Drought vs. No Drought

SEQ ID NO: 44935 - protein, 634 aa, Arabidopsis thaliana; identical to SEQ ID NO: 40669
  peptide (1)..(634): Ceres Seq. ID no. 12600039
  misc_feature (150)..(483): Pfam Name: FAD binding domain Pfam Description: FAD binding domain
  misc_feature (150)..(483): Pfam Name: FAD binding domain Pfam Description: FAD binding domain
  misc_feature (36)..(592): Homolog of NCBI NO: 1169337 NR Description: Succinate dehydrogenase
  misc_feature (3)..(592): Homolog of NCBI NO: 28703813 NR Description: Similar to succinate dehydrogenase complex,
  misc_feature (42)..(634): Homolog of NCBI NO: 6649876 NR Description: SdhA; succinate dehydrogenase flavoprotein
  misc_feature (41)..(634): Homolog of NCBI NO: 6322416 NR Description: Similar to SDH1; Yjl045wp [Saccharomyces
  misc_feature (34)..(634): Homolog of NCBI NO: 6322701 NR Description: Yeast succinate dehydrogenase (SDH) is a tetramer non-equivalent subunits--Sdh1p, Sdh2p, Sdh3p, Sdh4p--that couples oxidation of succinate to the transfer of electrons to
  misc_feature (36)..(592): Homolog of NCBI NO: 1169337 NR Description: Succinate dehydrogenase
  misc_feature (42)..(634): Homolog of NCBI NO: 6649876 NR Description: SdhA; succinate dehydrogenase flavoprotein
  misc_feature (34)..(634): Homolog of NCBI NO: 6322701 NR Description: Yeast succinate dehydrogenase (SDH) is a tetramer non-equivalent subunits--Sdh1p, Sdh2p, Sdh3p, Sdh4p--that couples oxidation of succinate to the transfer of electrons to
  misc_feature (1)..(634): Homolog of NCBI NO: 15224174 NR Description: putative succinate dehydrogenase flavoprotein
  misc_feature (33)..(634): Homolog of NCBI NO: 23011974 NR Description: hypothetical protein [Magnetospirillum
  misc_feature (16)..(634): Homolog of NCBI NO: 19115231 NR Description: probable succinate dehydrogenase flavoprotein
  misc_feature (33)..(634): Homolog of NCBI NO: 27902658 NR Description: succinate dehydrogenase alpha subunit
  misc_feature (30)..(634): Homolog of NCBI NO: 6644394 NR Description: SdhA [Dictyostelium discoideum]
  misc_feature (41)..(634): Homolog of NCBI NO: 6322416 NR Description: Similar to SDH1; Yjl045wp [Saccharomyces
  misc_feature (3)..(592): Homolog of NCBI NO: 28703813 NR Description: Similar to succinate dehydrogenase complex,
  misc_feature (30)..(634): Homolog of NCBI NO: 6644394 NR Description: SdhA [Dictyostelium discoideum]
  misc_feature (33)..(634): Homolog of NCBI NO: 27902658 NR Description: succinate dehydrogenase alpha subunit
  misc_feature (16)..(634): Homolog of NCBI NO: 19115231 NR Description: probable succinate dehydrogenase flavoprotein
  misc_feature (33)..(634): Homolog of NCBI NO: 23011974 NR Description: hypothetical protein [Magnetospirillum
  misc_feature (1)..(634): Homolog of NCBI NO: 15224174 NR Description: putative succinate dehydrogenase flavoprotein

SEQ ID NO: 44936 - protein, 533 aa, Arabidopsis thaliana; identical to SEQ ID NO: 40670
  peptide (1)..(533): Ceres Seq. ID no. 12600040
  misc_feature (49)..(382): Pfam Name: FAD binding domain Pfam Description: FAD binding domain
  misc_feature (49)..(382): Pfam Name: FAD binding domain Pfam Description: FAD binding domain
  misc_feature (1)..(491): Homolog of NCBI NO: 1169337 NR Description: Succinate dehydrogenase
  misc_feature (1)..(491): Homolog of NCBI NO: 28703813 NR Description: Similar to succinate dehydrogenase complex,
  misc_feature (1)..(533): Homolog of NCBI NO: 6649876 NR Description: SdhA; succinate dehydrogenase flavoprotein
  misc_feature (1)..(533): Homolog of NCBI NO: 6322416 NR Description: Similar to SDH1; Yjl045wp [Saccharomyces
  misc_feature (1)..(533): Homolog of NCBI NO: 6322701 NR Description: Yeast succinate dehydrogenase (SDH) is a tetramer non-equivalent subunits--Sdh1p, Sdh2p, Sdh3p, Sdh4p--that couples oxidation of succinate to the transfer of electrons to
  misc_feature (1)..(491): Homolog of NCBI NO: 1169337 NR Description: Succinate dehydrogenase
  misc_feature (1)..(533): Homolog of NCBI NO: 6649876 NR Description: SdhA; succinate dehydrogenase flavoprotein
  misc_feature (1)..(533): Homolog of NCBI NO: 6322701 NR Description: Yeast succinate dehydrogenase (SDH) is a tetramer non-equivalent subunits--Sdh1p, Sdh2p, Sdh3p, Sdh4p--that couples oxidation of succinate to the transfer of electrons to
  misc_feature (1)..(533): Homolog of NCBI NO: 15224174 NR Description: putative succinate dehydrogenase flavoprotein
  misc_feature (1)..(533): Homolog of NCBI NO: 23011974 NR Description: hypothetical protein [Magnetospirillum
  misc_feature (1)..(533): Homolog of NCBI NO: 19115231 NR Description: probable succinate dehydrogenase flavoprotein
  misc_feature (1)..(533): Homolog of NCBI NO: 27902658 NR Description: succinate dehydrogenase alpha subunit
  misc_feature (1)..(533): Homolog of NCBI NO: 6644394 NR Description: SdhA [Dictyostelium discoideum]
  misc_feature (1)..(533): Homolog of NCBI NO: 6322416 NR Description: Similar to SDH1; Yjl045wp [Saccharomyces
  misc_feature (1)..(491): Homolog of NCBI NO: 28703813 NR Description: Similar to succinate dehydrogenase complex,
  misc_feature (1)..(533): Homolog of NCBI NO: 6644394 NR Description: SdhA [Dictyostelium discoideum]
  misc_feature (1)..(533): Homolog of NCBI NO: 27902658 NR Description: succinate dehydrogenase alpha subunit
  misc_feature (1)..(533): Homolog of NCBI NO: 19115231 NR Description: probable succinate dehydrogenase flavoprotein
  misc_feature (1)..(533): Homolog of NCBI NO: 23011974 NR Description: hypothetical protein [Magnetospirillum
  misc_feature (1)..(533): Homolog of NCBI NO: 15224174 NR Description: putative succinate dehydrogenase flavoprotein

SEQ ID NO: 44937 - protein, 524 aa, Arabidopsis thaliana; identical to SEQ ID NO: 40671
  peptide (1)..(524): Ceres Seq. ID no. 12600041
  misc_feature (40)..(373): Pfam Name: FAD binding domain Pfam Description: FAD binding domain
  misc_feature (40)..(373): Pfam Name: FAD binding domain Pfam Description: FAD binding domain
  misc_feature (1)..(482): Homolog of NCBI NO: 1169337 NR Description: Succinate dehydrogenase
  misc_feature (1)..(482): Homolog of NCBI NO: 28703813 NR Description: Similar to succinate dehydrogenase complex,
  misc_feature (1)..(524): Homolog of NCBI NO: 6649876 NR Description: SdhA; succinate dehydrogenase flavoprotein
  misc_feature (1)..(524): Homolog of NCBI NO: 6322416 NR Description: Similar to SDH1; Yjl045wp [Saccharomyces
  misc_feature (1)..(524): Homolog of NCBI NO: 6322701 NR Description: Yeast succinate dehydrogenase (SDH) is a tetramer non-equivalent subunits--Sdh1p, Sdh2p, Sdh3p, Sdh4p--that couples oxidation of succinate to the transfer of electrons to
  misc_feature (1)..(482): Homolog of NCBI NO: 1169337 NR Description: Succinate dehydrogenase
  misc_feature (1)..(524): Homolog of NCBI NO: 6649876 NR Description: SdhA; succinate dehydrogenase flavoprotein
  misc_feature (1)..(524): Homolog of NCBI NO: 6322701 NR Description: Yeast succinate dehydrogenase (SDH) is a tetramer non-equivalent subunits--Sdh1p, Sdh2p, Sdh3p, Sdh4p--that couples oxidation of succinate to the transfer of electrons to
  misc_feature (1)..(524): Homolog of NCBI NO: 15224174 NR Description: putative succinate dehydrogenase flavoprotein
  misc_feature (1)..(524): Homolog of NCBI NO: 23011974 NR Description: hypothetical protein [Magnetospirillum
  misc_feature (1)..(524): Homolog of NCBI NO: 19115231 NR Description: probable succinate dehydrogenase flavoprotein
  misc_feature (1)..(524): Homolog of NCBI NO: 27902658 NR Description: succinate dehydrogenase alpha subunit
  misc_feature (1)..(524): Homolog of NCBI NO: 6644394 NR Description: SdhA [Dictyostelium discoideum]
  misc_feature (1)..(524): Homolog of NCBI NO: 6322416 NR Description: Similar to SDH1; Yjl045wp [Saccharomyces
  misc_feature (1)..(482): Homolog of NCBI NO: 28703813 NR Description: Similar to succinate dehydrogenase complex,
  misc_feature (1)..(524): Homolog of NCBI NO: 6644394 NR Description: SdhA [Dictyostelium discoideum]
  misc_feature (1)..(524): Homolog of NCBI NO: 27902658 NR Description: succinate dehydrogenase alpha subunit
  misc_feature (1)..(524): Homolog of NCBI NO: 19115231 NR Description: probable succinate dehydrogenase flavoprotein
  misc_feature (1)..(524): Homolog of NCBI NO: 23011974 NR Description: hypothetical protein [Magnetospirillum
  misc_feature (1)..(524): Homolog of NCBI NO: 15224174 NR Description: putative succinate dehydrogenase flavoprotein

SEQ ID NO: 44938 - DNA, 2828 bp, Arabidopsis thaliana
  misc_feature (1)..(2828): Ceres Seq. ID no. 13646314
  misc_feature: MA Experiment ID: 20000234 Result: Up-regulated in Transcription
  misc_feature: MA Experiment 20000234 PARAMETER Experiment Name: At_Siliques_P Parameter: Age (day) Value: 21
  misc_feature: MA Experiment 20000234 PARAMETER Experiment Name: At_Siliques_P Parameter: Organism Value: A. thaliana
  misc_feature: MA Experiment 20000234 PARAMETER Experiment Name: At_Siliques_P Parameter: Plant Line Value: WS
  misc_feature: MA Experiment 20000234 PARAMETER Experiment Name: At_Siliques_P Parameter: Tissue Value: Less Than 5mm Siliques vs. Whole Plant
gatcgcgacgactctttgaagcttccgttgctgacgtggatcactcctctccgccacaaaaacaaaacagaaaaacaaactcagacatgagcaagagctagccgtcactctcactctctgatgtctcacgaattccgatttcaattctaacttaaaccatatttctccgatcaaacatggcgtccgtatctccatctccgtcgtgttccactatacccataccacttcgacgaacatctttcgccgttgctgagttgagacgattaaaacaaagaagagcgatcccacctgtgtccgtcggtctcggacacttcgctgatgttgtacgcaatgacgttgatttcctgaagaacaaaatcggtatcggactccgttgggctaacgaggcttttcgtgtaccggaagtgactaaatccgctgaggaactgttttggcttaggcatcttgaggatcatacttctcagaatttgaagtcacaatcttggcctcagccttcctactcagggctcactggggtggatttgttcatggctgatgtcaaagccttggagacatatgctggttacttttacagtctttctaagatgtggtcaagaccacttcctgaagtttatgattcacaagctgttgcagattactttaattgcaggcctcatgtcgttgcctttaggcttctcgaggtattttctgcgttcacgattgctgccatcagattacgaacatcagcatcagttaagggcaaaagtttagaagcttcagagcagatttttgggatggtgttgaaagaaaccatgctacatttgggcccaacttttatcaaagttggtcaatcgctttccacgaggccagatatcattgggactgaaatctccaaggcactatctgaactgcatgaccgaatccctccctttccctggcctgaggctgtaaaaatccttgaaggggaattaggtggtcctgtcgaatcattctttagtcagttttcgcaagaaactgtagcagcagcatcctttggtcaggtctaccgaggaaggaccctcgatggtgcagatgttgcagtgaaagttcagcgccctgatctgagacatgcagtgctacgcgacatctacattctgcgacttgggttaggtgtattgcgaaaggtagcaaagagagaaaatgacattcgtgtatatgctgatgagcttggaatgggtttggctggagaattggactttactttagaggctgccaatgcctctgaatttcaggaagctcacgcacgattttcctatatccgggttccaaaagtatatcagcatctaacgcgcaaaagagttttgaccatggaatggatggttggtgaaagcccaaccgatctactcgcaatatcttctggttactctgatcatgacaatgagagtcatgagaaacaaaaaattgaagcgagaaggcgtcttcttgatctggtgaacaaaggggtagaggcaactctagttcaactccttgatacaggtattttgcatgcagatccgcatcctggaaaccttcgttacacaacatcaagacaaatagggtttttggactttggtttagtttgtcggatgcaaagaaaacatcagcttgccatgctcgcatcaattgtgcatatcgtaaatggtgattgggcctgtcttgttgaatcgttgattgatatggatgtcatcacgccaggcgttaatacccgtcgttttactctggatctggaatatgcattgggagaggttaaacttataaacgggattcctgatatcgagttcaccaaggtgcttagtaaaatagtcaatgtggccctgaagtatcagctacgcatgccaccatacttcacacttgtcctccgttctcttgcttgcttggaaggtctggctgcagctggagatccaaattttaagacatttgaggcagcatacccttttgtggttcaaaagctcatcactgaaaattcagctgcaacaaggaagattcttcattcggcagtccttaaccgaaagaaggaattccgatgggaaagggttgctcttttcctgagtaaaagttctacgaggaaacaatcgccactgctaaagttatcaagggatgaaacttctgttgatagtagttccaatctaacggacaaagatgctgacaatgtaagtttggtcttgagacttttggcatccaaaaatggtgtggttcttagaagactcttgatggctgcgaacgggacttcactgatccggacatttatttcaagagaggcacttgtcatacgccagaaactttgcatgacgattgcaactacgatgtaccaatggatggttggaagccttggaattgaatcccttaaattcatttctctttcagacccaccaccatcttcaggaatcaacattacagtcaaagacttcaagattctaatcaatgacaagcgggtcagagtaatactgagaaagatactggagtctgcaaagagtgaccgagttttgatgctcagattctgctggacttcctttgtcatgtctctcaccaccactgcgcttgcttgccatcggtttgtgatctcggtctctgaaggttacgtcaactacttatctctgtctgctccagtcgcacttcgtacctgattacctgaacatcctacaccaacacagaaccagaatcactaatgtatattgttgtcaagacccaaagcaaagggttccttagtaagagggatagattctacagaaagactaaatattttcgtgtatagagtcgttccatatctaatactatcagacgatcaatgcctgtcgtaacgatatatgactaatcataatatccgagacctc

SEQ ID NO: 44939 - protein, 814 aa, Arabidopsis thaliana
  peptide (1)..(814): Ceres Seq. ID no. 13646315
  misc_feature (256)..(373): Pfam Name: ABC1 family Pfam Description: ABC1 family
  misc_feature (256)..(373): Pfam Name: ABC1 family Pfam Description: ABC1 family
  misc_feature (256)..(373): Pfam Name: ABC1 family Pfam Description: ABC1 family
  misc_feature (119)..(395): Homolog of NCBI NO: 38344898 NR Description: OSJNBb0079B02.1 [Oryza sativa (japonica
  misc_feature (146)..(603): Homolog of NCBI NO: 23042448 NR Description: hypothetical protein [Trichodesmium erythraeum
  misc_feature (146)..(629): Homolog of NCBI NO: 16329739 NR Description: ABC1-like [Synechocystis sp. PCC 6803]
  misc_feature (145)..(682): Homolog of NCBI NO: 18412437 NR Description: expressed protein [Arabidopsis thaliana]
  misc_feature (146)..(603): Homolog of NCBI NO: 16331408 NR Description: ABC1-like [Synechocystis sp. PCC 6803]
  misc_feature (119)..(395): Homolog of NCBI NO: 38344898 NR Description: OSJNBb0079B02.1 [Oryza sativa (japonica
  misc_feature (146)..(629): Homolog of NCBI NO: 16329739 NR Description: ABC1-like [Synechocystis sp. PCC 6803]
  misc_feature (146)..(603): Homolog of NCBI NO: 16331408 NR Description: ABC1-like [Synechocystis sp. PCC 6803]
  misc_feature (145)..(682): Homolog of NCBI NO: 18412437 NR Description: expressed protein [Arabidopsis thaliana]
  misc_feature (146)..(629): Homolog of NCBI NO: 16329739 NR Description: ABC1-like [Synechocystis sp. PCC 6803]
  misc_feature (146)..(603): Homolog of NCBI NO: 23042448 NR Description: hypothetical protein [Trichodesmium erythraeum
  misc_feature (119)..(395): Homolog of NCBI NO: 38344898 NR Description: OSJNBb0079B02.1 [Oryza sativa (japonica
  misc_feature (1)..(361): Homolog of NCBI NO: 18404977 NR Description: ABC transporter -related [Arabidopsis thaliana]
  misc_feature (75)..(704): Homolog of NCBI NO: 15451577 NR Description: Putative ABC transporter [Oryza sativa]
  misc_feature (144)..(619): Homolog of NCBI NO: 23129126 NR Description: hypothetical protein [Nostoc punctiforme]
  misc_feature (143)..(669): Homolog of NCBI NO: 17232452 NR Description: hypothetical protein [Nostoc sp. PCC 7120]
  misc_feature (146)..(608): Homolog of NCBI NO: 22298493 NR Description: ORF_ID:tll0950~hypothetical protein
  misc_feature (1)..(361): Homolog of NCBI NO: 18404977 NR Description: ABC transporter -related [Arabidopsis thaliana]
  misc_feature (75)..(704): Homolog of NCBI NO: 15451577 NR Description: Putative ABC transporter [Oryza sativa]
  misc_feature (144)..(619): Homolog of NCBI NO: 23129126 NR Description: hypothetical protein [Nostoc punctiforme]
  misc_feature (143)..(669): Homolog of NCBI NO: 17232452 NR Description: hypothetical protein [Nostoc sp. PCC 7120]
  misc_feature (146)..(608): Homolog of NCBI NO: 22298493 NR Description: ORF_ID:tll0950~hypothetical protein
  misc_feature (146)..(603): Homolog of NCBI NO: 16331408 NR Description: ABC1-like [Synechocystis sp. PCC 6803]
  misc_feature (145)..(682): Homolog of NCBI NO: 18412437 NR Description: expressed protein [Arabidopsis thaliana]
  misc_feature (146)..(603): Homolog of NCBI NO: 23042448 NR Description: hypothetical protein [Trichodesmium erythraeum
  misc_feature (146)..(608): Homolog of NCBI NO: 22298493 NR Description: ORF_ID:tll0950~hypothetical protein
  misc_feature (143)..(669): Homolog of NCBI NO: 17232452 NR Description: hypothetical protein [Nostoc sp. PCC 7120]
  misc_feature (144)..(619): Homolog of NCBI NO: 23129126 NR Description: hypothetical protein [Nostoc punctiforme]
  misc_feature (75)..(704): Homolog of NCBI NO: 15451577 NR Description: Putative ABC transporter [Oryza sativa]
  misc_feature (1)..(361): Homolog of NCBI NO: 18404977 NR Description: ABC transporter -related [Arabidopsis thaliana]
MASVSPSPSCSTIPIPLRRTSFAVAELRRLKQRRAIPPVSVGLGHFADVVRNDVDFLKNKIGIGLRWANEAFRVPEVTKSAEELFWLRHLEDHTSQNLKSQSWPQPSYSGLTGVDLFMADVKALETYAGYFYSLSKMWSRPLPEVYDSQAVADYFNCRPHVVAFRLLEVFSAFTIAAIRLRTSASVKGKSLEASEQIFGMVLKETMLHLGPTFIKVGQSLSTRPDIIGTEISKALSELHDRIPPFPWPEAVKILEGELGGPVESFFSQFSQETVAAASFGQVYRGRTLDGADVAVKVQRPDLRHAVLRDIYILRLGLGVLRKVAKRENDIRVYADELGMGLAGELDFTLEAANASEFQEAHARFSYIRVPKVYQHLTRKRVLTMEWMVGESPTDLLAISSGYSDHDNESHEKQKIEARRRLLDLVNKGVEATLVQLLDTGILHADPHPGNLRYTTSRQIGFLDFGLVCRMQRKHQLAMLASIVHIVNGDWACLVESLIDMDVITPGVNTRRFTLDLEYALGEVKLINGIPDIEFTKVLSKIVNVALKYQLRMPPYFTLVLRSLACLEGLAAAGDPNFKTFEAAYPFVVQKLITENSAATRKILHSAVLNRKKEFRWERVALFLSKSSTRKQSPLLKLSRDETSVDSSSNLTDKDADNVSLVLRLLASKNGVVLRRLLMAANGTSLIRTFISREALVIRQKLCMTIATTMYQWMVGSLGIESLKFISLSDPPPSSGINITVKDFKILINDKRVRVILRKILESAKSDRVLMLRFCWTSFVMSLTTTALACHRFVISVSEGYVNYLSLSAPVALRT

SEQ ID NO: 44940 - protein, 697 aa, Arabidopsis thaliana
  peptide (1)..(697): Ceres Seq. ID no. 13646316
  misc_feature (139)..(256): Pfam Name: ABC1 family Pfam Description: ABC1 family
  misc_feature (139)..(256): Pfam Name: ABC1 family Pfam Description: ABC1 family
  misc_feature (139)..(256): Pfam Name: ABC1 family Pfam Description: ABC1 family
  misc_feature (2)..(278): Homolog of NCBI NO: 38344898 NR Description: OSJNBb0079B02.1 [Oryza sativa (japonica
  misc_feature (29)..(486): Homolog of NCBI NO: 23042448 NR Description: hypothetical protein [Trichodesmium erythraeum
  misc_feature (29)..(512): Homolog of NCBI NO: 16329739 NR Description: ABC1-like [Synechocystis sp. PCC 6803]
  misc_feature (28)..(565): Homolog of NCBI NO: 18412437 NR Description: expressed protein [Arabidopsis thaliana]
  misc_feature (29)..(486): Homolog of NCBI NO: 16331408 NR Description: ABC1-like [Synechocystis sp. PCC 6803]
  misc_feature (2)..(278): Homolog of NCBI NO: 38344898 NR Description: OSJNBb0079B02.1 [Oryza sativa (japonica
  misc_feature (29)..(512): Homolog of NCBI NO: 16329739 NR Description: ABC1-like [Synechocystis sp. PCC 6803]
  misc_feature (29)..(486): Homolog of NCBI NO: 16331408 NR Description: ABC1-like [Synechocystis sp. PCC 6803]
  misc_feature (28)..(565): Homolog of NCBI NO: 18412437 NR Description: expressed protein [Arabidopsis thaliana]
  misc_feature (29)..(512): Homolog of NCBI NO: 16329739 NR Description: ABC1-like [Synechocystis sp. PCC 6803]
  misc_feature (29)..(486): Homolog of NCBI NO: 23042448 NR Description: hypothetical protein [Trichodesmium erythraeum
  misc_feature (2)..(278): Homolog of NCBI NO: 38344898 NR Description: OSJNBb0079B02.1 [Oryza sativa (japonica
  misc_feature (1)..(244): Homolog of NCBI NO: 18404977 NR Description: ABC transporter -related [Arabidopsis thaliana]
  misc_feature (1)..(587): Homolog of NCBI NO: 15451577 NR Description: Putative ABC transporter [Oryza sativa]
  misc_feature (27)..(502): Homolog of NCBI NO: 23129126 NR Description: hypothetical protein [Nostoc punctiforme]
  misc_feature (26)..(552): Homolog of NCBI NO: 17232452 NR Description: hypothetical protein [Nostoc sp. PCC 7120]
  misc_feature (29)..(491): Homolog of NCBI NO: 22298493 NR Description: ORF_ID:tll0950~hypothetical protein
  misc_feature (1)..(244): Homolog of NCBI NO: 18404977 NR Description: ABC transporter -related [Arabidopsis thaliana]
  misc_feature (1)..(587): Homolog of NCBI NO: 15451577 NR Description: Putative ABC transporter [Oryza sativa]
  misc_feature (27)..(502): Homolog of NCBI NO: 23129126 NR Description: hypothetical protein [Nostoc punctiforme]
  misc_feature (26)..(552): Homolog of NCBI NO: 17232452 NR Description: hypothetical protein [Nostoc sp. PCC 7120]
  misc_feature (29)..(491): Homolog of NCBI NO: 22298493 NR Description: ORF_ID:tll0950~hypothetical protein
  misc_feature (29)..(486): Homolog of NCBI NO: 16331408 NR Description: ABC1-like [Synechocystis sp. PCC 6803]
  misc_feature (28)..(565): Homolog of NCBI NO: 18412437 NR Description: expressed protein [Arabidopsis thaliana]
  misc_feature (29)..(486): Homolog of NCBI NO: 23042448 NR Description: hypothetical protein [Trichodesmium erythraeum
  misc_feature (29)..(491): Homolog of NCBI NO: 22298493 NR Description: ORF_ID:tll0950~hypothetical protein
  misc_feature (26)..(552): Homolog of NCBI NO: 17232452 NR Description: hypothetical protein [Nostoc sp. PCC 7120]
  misc_feature (27)..(502): Homolog of NCBI NO: 23129126 NR Description: hypothetical protein [Nostoc punctiforme]
  misc_feature (1)..(587): Homolog of NCBI NO: 15451577 NR Description: Putative ABC transporter [Oryza sativa]
  misc_feature (1)..(244): Homolog of NCBI NO: 18404977 NR Description: ABC transporter -related [Arabidopsis thaliana]
MADVKALETYAGYFYSLSKMWSRPLPEVYDSQAVADYFNCRPHVVAFRLLEVFSAFTIAAIRLRTSASVKGKSLEASEQIFGMVLKETMLHLGPTFIKVGQSLSTRPDIIGTEISKALSELHDRIPPFPWPEAVKILEGELGGPVESFFSQFSQETVAAASFGQVYRGRTLDGADVAVKVQRPDLRHAVLRDIYILRLGLGVLRKVAKRENDIRVYADELGMGLAGELDFTLEAANASEFQEAHARFSYIRVPKVYQHLTRKRVLTMEWMVGESPTDLLAISSGYSDHDNESHEKQKIEARRRLLDLVNKGVEATLVQLLDTGILHADPHPGNLRYTTSRQIGFLDFGLVCRMQRKHQLAMLASIVHIVNGDWACLVESLIDMDVITPGVNTRRFTLDLEYALGEVKLINGIPDIEFTKVLSKIVNVALKYQLRMPPYFTLVLRSLACLEGLAAAGDPNFKTFEAAYPFVVQKLITENSAATRKILHSAVLNRKKEFRWERVALFLSKSSTRKQSPLLKLSRDETSVDSSSNLTDKDADNVSLVLRLLASKNGVVLRRLLMAANGTSLIRTFISREALVIRQKLCMTIATTMYQWMVGSLGIESLKFISLSDPPPSSGINITVKDFKILINDKRVRVILRKILESAKSDRVLMLRFCWTSFVMSLTTTALACHRFVISVSEGYVNYLSLSAPVALRT

SEQ ID NO: 44941 - protein, 678 aa, Arabidopsis thaliana
  peptide (1)..(678): Ceres Seq. ID no. 13646317
  misc_feature (120)..(237): Pfam Name: ABC1 family Pfam Description: ABC1 family
  misc_feature (120)..(237): Pfam Name: ABC1 family Pfam Description: ABC1 family
  misc_feature (120)..(237): Pfam Name: ABC1 family Pfam Description: ABC1 family
  misc_feature (1)..(259): Homolog of NCBI NO: 38344898 NR Description: OSJNBb0079B02.1 [Oryza sativa (japonica
  misc_feature (10)..(467): Homolog of NCBI NO: 23042448 NR Description: hypothetical protein [Trichodesmium erythraeum
  misc_feature (10)..(493): Homolog of NCBI NO: 16329739 NR Description: ABC1-like [Synechocystis sp. PCC 6803]
  misc_feature (9)..(546): Homolog of NCBI NO: 18412437 NR Description: expressed protein [Arabidopsis thaliana]
  misc_feature (10)..(467): Homolog of NCBI NO: 16331408 NR Description: ABC1-like [Synechocystis sp. PCC 6803]
  misc_feature (1)..(259): Homolog of NCBI NO: 38344898 NR Description: OSJNBb0079B02.1 [Oryza sativa (japonica
  misc_feature (10)..(493): Homolog of NCBI NO: 16329739 NR Description: ABC1-like [Synechocystis sp. PCC 6803]
  misc_feature (10)..(467): Homolog of NCBI NO: 16331408 NR Description: ABC1-like [Synechocystis sp. PCC 6803]
  misc_feature (9)..(546): Homolog of NCBI NO: 18412437 NR Description: expressed protein [Arabidopsis thaliana]
  misc_feature (10)..(493): Homolog of NCBI NO: 16329739 NR Description: ABC1-like [Synechocystis sp. PCC 6803]
  misc_feature (10)..(467): Homolog of NCBI NO: 23042448 NR Description: hypothetical protein [Trichodesmium erythraeum
  misc_feature (1)..(259): Homolog of NCBI NO: 38344898 NR Description: OSJNBb0079B02.1 [Oryza sativa (japonica
  misc_feature (1)..(225): Homolog of NCBI NO: 18404977 NR Description: ABC transporter -related [Arabidopsis thaliana]
  misc_feature (1)..(568): Homolog of NCBI NO: 15451577 NR Description: Putative ABC transporter [Oryza sativa]
  misc_feature (8)..(483): Homolog of NCBI NO: 23129126 NR Description: hypothetical protein [Nostoc punctiforme]
  misc_feature (7)..(533): Homolog of NCBI NO: 17232452 NR Description: hypothetical protein [Nostoc sp. PCC 7120]
  misc_feature (10)..(472): Homolog of NCBI NO: 22298493 NR Description: ORF_ID:tll0950~hypothetical protein
  misc_feature (1)..(225): Homolog of NCBI NO: 18404977 NR Description: ABC transporter -related [Arabidopsis thaliana]
  misc_feature (1)..(568): Homolog of NCBI NO: 15451577 NR Description: Putative ABC transporter [Oryza sativa]
  misc_feature (8)..(483): Homolog of NCBI NO: 23129126 NR Description: hypothetical protein [Nostoc punctiforme]
  misc_feature (7)..(533): Homolog of NCBI NO: 17232452 NR Description: hypothetical protein [Nostoc sp. PCC 7120]
  misc_feature (10)..(472): Homolog of NCBI NO: 22298493 NR Description: ORF_ID:tll0950~hypothetical protein
  misc_feature (10)..(467): Homolog of NCBI NO: 16331408 NR Description: ABC1-like [Synechocystis sp. PCC 6803]
  misc_feature (9)..(546): Homolog of NCBI NO: 18412437 NR Description: expressed protein [Arabidopsis thaliana]
  misc_feature (10)..(467): Homolog of NCBI NO: 23042448 NR Description: hypothetical protein [Trichodesmium erythraeum
  misc_feature (10)..(472): Homolog of NCBI NO: 22298493 NR Description: ORF_ID:tll0950~hypothetical protein
  misc_feature (7)..(533): Homolog of NCBI NO: 17232452 NR Description: hypothetical protein [Nostoc sp. PCC 7120]
  misc_feature (8)..(483): Homolog of NCBI NO: 23129126 NR Description: hypothetical protein [Nostoc punctiforme]
  misc_feature (1)..(568): Homolog of NCBI NO: 15451577 NR Description: Putative ABC transporter [Oryza sativa]
  misc_feature (1)..(225): Homolog of NCBI NO: 18404977 NR Description: ABC transporter -related [Arabidopsis thaliana]
MWSRPLPEVYDSQAVADYFNCRPHVVAFRLLEVFSAFTIAAIRLRTSASVKGKSLEASEQIFGMVLKETMLHLGPTFIKVGQSLSTRPDIIGTEISKALSELHDRIPPFPWPEAVKILEGELGGPVESFFSQFSQETVAAASFGQVYRGRTLDGADVAVKVQRPDLRHAVLRDIYILRLGLGVLRKVAKRENDIRVYADELGMGLAGELDFTLEAANASEFQEAHARFSYIRVPKVYQHLTRKRVLTMEWMVGESPTDLLAISSGYSDHDNESHEKQKIEARRRLLDLVNKGVEATLVQLLDTGILHADPHPGNLRYTTSRQIGFLDFGLVCRMQRKHQLAMLASIVHIVNGDWACLVESLIDMDVITPGVNTRRFTLDLEYALGEVKLINGIPDIEFTKVLSKIVNVALKYQLRMPPYFTLVLRSLACLEGLAAAGDPNFKTFEAAYPFVVQKLITENSAATRKILHSAVLNRKKEFRWERVALFLSKSSTRKQSPLLKLSRDETSVDSSSNLTDKDADNVSLVLRLLASKNGVVLRRLLMAANGTSLIRTFISREALVIRQKLCMTIATTMYQWMVGSLGIESLKFISLSDPPPSSGINITVKDFKILINDKRVRVILRKILESAKSDRVLMLRFCWTSFVMSLTTTALACHRFVISVSEGYVNYLSLSAPVALRT

SEQ ID NO: 44942 - DNA, 807 bp, Arabidopsis thaliana
  misc_feature (1)..(807): Ceres Seq. ID no. 13575668
  misc_feature: MA Experiment ID: 20000315 Result: Down-regulated in Transcription
  misc_feature: MA Experiment 20000315 PARAMETER Experiment Name: At_14day_Shoots-Roots_Sub_P Parameter: Age (day) Value: 14
  misc_feature: MA Experiment 20000315 PARAMETER Experiment Name: At_14day_Shoots-Roots_Sub_P Parameter: Organism Value: A. thaliana
  misc_feature: MA Experiment 20000315 PARAMETER Experiment Name: At_14day_Shoots-Roots_Sub_P Parameter: Plant Line Value: WS
  misc_feature: MA Experiment 20000315 PARAMETER Experiment Name: At_14day_Shoots-Roots_Sub_P Parameter: Tissue Value: Shoots vs. Whole Plant
  misc_feature: MA Experiment ID: 20000328 Result: Up-regulated in Transcription
  misc_feature: MA Experiment 20000328 PARAMETER Experiment Name: At_42deg_Heat_Sub_P Parameter: Age (day) Value: 14
  misc_feature: MA Experiment 20000328 PARAMETER Experiment Name: At_42deg_Heat_Sub_P Parameter: Organism Value: A. thaliana
  misc_feature: MA Experiment 20000328 PARAMETER Experiment Name: At_42deg_Heat_Sub_P Parameter: Plant Line Value: WS
  misc_feature: MA Experiment 20000328 PARAMETER Experiment Name: At_42deg_Heat_Sub_P Parameter: Temperature (deg C) Value: 42 vs. 22
  misc_feature: MA Experiment 20000328 PARAMETER Experiment Name: At_42deg_Heat_Sub_P Parameter: Timepoint (hr) Value: 6
  misc_feature: MA Experiment 20000328 PARAMETER Experiment Name: At_42deg_Heat_Sub_P Parameter: Tissue Value: Aerial
  misc_feature: MA Experiment ID: 20000347 Result: Down-regulated in Transcription
  misc_feature: MA Experiment 20000347 PARAMETER Experiment Name: At_2mM_SA_Sub_P Parameter: Age (day) Value: 14
  misc_feature: MA Experiment 20000347 PARAMETER Experiment Name: At_2mM_SA_Sub_P Parameter: Organism Value: A. thaliana
  misc_feature: MA Experiment 20000347 PARAMETER Experiment Name: At_2mM_SA_Sub_P Parameter: Plant Line Value: WS
  misc_feature: MA Experiment 20000347 PARAMETER Experiment Name: At_2mM_SA_Sub_P Parameter: Timepoint (hr) Value: 6
  misc_feature: MA Experiment 20000347 PARAMETER Experiment Name: At_2mM_SA_Sub_P Parameter: Tissue Value: Aerial
  misc_feature: MA Experiment 20000347 PARAMETER Experiment Name: At_2mM_SA_Sub_P Parameter: Treatment Value: 2mM SA vs. No Treatment
  misc_feature: MA Experiment ID: 20000440 Result: Down-regulated in Transcription
  misc_feature: MA Experiment 20000440 PARAMETER Experiment Name: At_Closed-Flower__Sub_P Parameter: Tissue Value: Closed Flower vs. Whole Plant
ttcaggttgcaacaagaaagagaaaaaaagagaatggcgtacagcccgagcttcttacaccagagtgcacttgcctcctctgccggacgatcatcatcttcatcttcatcgtcgtttcgtcatgtgtccctctcgagacccgtccatttagtatgtagagctcaacagtctcaggaaaacaataactctgctgttttccgccgtcttgcccttaccttactcgttggtgctgcagccatcggatccaaagtctctcctgcgccgcctatggtgaagccgccaaagaagaacacagatttcctgccatacacaggagaaggattcaaaatccagatcccatcaaagtggaacccaagtaaagaaattgagtatccaggacaagtactaagattcgaggacaactttgacgccaccagcaatgtctctgtcatgatcactcctacagacaagaaatccatcactgattacggttctcctgaacagttcctctctcaggtgaattatctcctcgggaagcaagcttacgtcggcgaaacagcctctgagggagggtttgatgcaaatgcagtagcaactgcaaacattttggaaacatctacacaagaaatcggagggaaagaatactattacttgtcggttctgacaagaacagctgatggagatgaaggtgggaagcaccaactgataacagccactgtgaatggtggaaagctttacatttgcaaagctcaagcaggagacaagaggtggttcaaaggagctaggaagttcgttgagaatgctgctacgtccttcagtgttgcttga

SEQ ID NO: 44943 - protein, 268 aa, Arabidopsis thaliana
  peptide (1)..(268): Ceres Seq. ID no. 13575669
  misc_feature (73)..(268): Pfam Name: PsbP Pfam Description: PsbP
  misc_feature (13)..(268): Homolog of NCBI NO: 266856 NR Description: Oxygen-evolving enhancer protein 2, chloroplast (OEE2) (23 kDa subunit of oxygen evolving system of photosystem
  misc_feature (12)..(268): Homolog of NCBI NO: 417604 NR Description: 23 kDa polypeptide of water-oxidizing complex of
  misc_feature (18)..(268): Homolog of NCBI NO: 1345550 NR Description: 23-kDa ploypeptide of photosystem II
  misc_feature (19)..(268): Homolog of NCBI NO: 19898 NR Description: photosystem II 23 kDa polypeptide [Nicotiana
  misc_feature (12)..(268): Homolog of NCBI NO: 7443216 NR Description: photosystem II oxygen-evolving complex protein 2
  misc_feature (24)..(268): Homolog of NCBI NO: 81723 NR Description: photosystem II oxygen-evolving complex protein 2
  misc_feature (12)..(268): Homolog of NCBI NO: 131391 NR Description: Oxygen-evolving enhancer protein 2, chloroplast (OEE2) (23 kDa subunit of oxygen evolving system of photosystem
  misc_feature (12)..(268): Homolog of NCBI NO: 15222166 NR Description: photosystem II oxygen-evolving complex 23 (OEC23)
  misc_feature (12)..(268): Homolog of NCBI NO: 11133887 NR Description: OXYGEN-EVOLVING ENHANCER PROTEIN 2-2, CHLOROPLAST (OEE2) (23 KDA SUBUNIT OF OXYGEN EVOLVING SYSTEM OF PHOTOSYSTEM
  misc_feature (12)..(268): Homolog of NCBI NO: 15224572 NR Description: photosystem II oxygen-evolving complex 23 (OEC23)
FRLQQEREKKRMAYSPSFLHQSALASSAGRSSSSSSSSFRHVSLSRPVHLVCRAQQSQENNNSAVFRRLALTLLVGAAAIGSKVSPAPPMVKPPKKNTDFLPYTGEGFKIQIPSKWNPSKEIEYPGQVLRFEDNFDATSNVSVMITPTDKKSITDYGSPEQFLSQVNYLLGKQAYVGETASEGGFDANAVATANILETSTQEIGGKEYYYLSVLTRTADGDEGGKHQLITATVNGGKLYICKAQAGDKRWFKGARKFVENAATSFSVA

SEQ ID NO: 44944 - protein, 257 aa, Arabidopsis thaliana
  peptide (1)..(257): Ceres Seq. ID no. 13575670
  misc_feature (62)..(257): Pfam Name: PsbP Pfam Description: PsbP
  misc_feature (2)..(257): Homolog of NCBI NO: 266856 NR Description: Oxygen-evolving enhancer protein 2, chloroplast (OEE2) (23 kDa subunit of oxygen evolving system of photosystem
  misc_feature (1)..(257): Homolog of NCBI NO: 417604 NR Description: 23 kDa polypeptide of water-oxidizing complex of
  misc_feature (7)..(257): Homolog of NCBI NO: 1345550 NR Description: 23-kDa ploypeptide of photosystem II
  misc_feature (8)..(257): Homolog of NCBI NO: 19898 NR Description: photosystem II 23 kDa polypeptide [Nicotiana
  misc_feature (1)..(257): Homolog of NCBI NO: 7443216 NR Description: photosystem II oxygen-evolving complex protein 2
  misc_feature (13)..(257): Homolog of NCBI NO: 81723 NR Description: photosystem II oxygen-evolving complex protein 2
  misc_feature (1)..(257): Homolog of NCBI NO: 131391 NR Description: Oxygen-evolving enhancer protein 2, chloroplast (OEE2) (23 kDa subunit of oxygen evolving system of photosystem
  misc_feature (1)..(257): Homolog of NCBI NO: 15222166 NR Description: photosystem II oxygen-evolving complex 23 (OEC23)
  misc_feature (1)..(257): Homolog of NCBI NO: 11133887 NR Description: OXYGEN-EVOLVING ENHANCER PROTEIN 2-2, CHLOROPLAST (OEE2) (23 KDA SUBUNIT OF OXYGEN EVOLVING SYSTEM OF PHOTOSYSTEM
  misc_feature (1)..(257): Homolog of NCBI NO: 15224572 NR Description: photosystem II oxygen-evolving complex 23 (OEC23)
MAYSPSFLHQSALASSAGRSSSSSSSSFRHVSLSRPVHLVCRAQQSQENNNSAVFRRLALTLLVGAAAIGSKVSPAPPMVKPPKKNTDFLPYTGEGFKIQIPSKWNPSKEIEYPGQVLRFEDNFDATSNVSVMITPTDKKSITDYGSPEQFLSQVNYLLGKQAYVGETASEGGFDANAVATANILETSTQEIGGKEYYYLSVLTRTADGDEGGKHQLITATVNGGKLYICKAQAGDKRWFKGARKFVENAATSFSVA

SEQ ID NO: 44945 - protein, 179 aa, Arabidopsis thaliana
  peptide (1)..(179): Ceres Seq. ID no. 13575671
  misc_feature (1)..(179): Pfam Name: PsbP Pfam Description: PsbP
  misc_feature (1)..(179): Homolog of NCBI NO: 266856 NR Description: Oxygen-evolving enhancer protein 2, chloroplast (OEE2) (23 kDa subunit of oxygen evolving system of photosystem
  misc_feature (1)..(179): Homolog of NCBI NO: 417604 NR Description: 23 kDa polypeptide of water-oxidizing complex of
  misc_feature (1)..(179): Homolog of NCBI NO: 1345550 NR Description: 23-kDa ploypeptide of photosystem II
  misc_feature (1)..(179): Homolog of NCBI NO: 19898 NR Description: photosystem II 23 kDa polypeptide [Nicotiana
  misc_feature (1)..(179): Homolog of NCBI NO: 7443216 NR Description: photosystem II oxygen-evolving complex protein 2
  misc_feature (1)..(179): Homolog of NCBI NO: 81723 NR Description: photosystem II oxygen-evolving complex protein 2
  misc_feature (1)..(179): Homolog of NCBI NO: 131391 NR Description: Oxygen-evolving enhancer protein 2, chloroplast (OEE2) (23 kDa subunit of oxygen evolving system of photosystem
  misc_feature (1)..(179): Homolog of NCBI NO: 15222166 NR Description: photosystem II oxygen-evolving complex 23 (OEC23)
  misc_feature (1)..(179): Homolog of NCBI NO: 11133887 NR Description: OXYGEN-EVOLVING ENHANCER PROTEIN 2-2, CHLOROPLAST (OEE2) (23 KDA SUBUNIT OF OXYGEN EVOLVING SYSTEM OF PHOTOSYSTEM
  misc_feature (1)..(179): Homolog of NCBI NO: 15224572 NR Description: photosystem II oxygen-evolving complex 23 (OEC23)
MVKPPKKNTDFLPYTGEGFKIQIPSKWNPSKEIEYPGQVLRFEDNFDATSNVSVMITPTDKKSITDYGSPEQFLSQVNYLLGKQAYVGETASEGGFDANAVATANILETSTQEIGGKEYYYLSVLTRTADGDEGGKHQLITATVNGGKLYICKAQAGDKRWFKGARKFVENAATSFSVA

SEQ ID NO: 44946 - DNA, 2049 bp, Arabidopsis thaliana
  misc_feature (1)..(2049): Ceres Seq. ID no. 12559824
  misc_feature: MA Experiment ID: 20000227 Result: Down-regulated in Transcription
  misc_feature: MA Experiment 20000227 PARAMETER Experiment Name: At_Root-Tips-vs-Tops_P Parameter: Tissue Value: Root Tips vs. Root Tops
  misc_feature: MA Experiment ID: 20000437 Result: Up-regulated in Transcription
  misc_feature: MA Experiment 20000437 PARAMETER Experiment Name: At_Drought_P Parameter: Age (day) Value: 8
  misc_feature: MA Experiment 20000437 PARAMETER Experiment Name: At_Drought_P Parameter: Organism Value: A. thaliana
  misc_feature: MA Experiment 20000437 PARAMETER Experiment Name: At_Drought_P Parameter: Plant Line Value: WS
  misc_feature: MA Experiment 20000437 PARAMETER Experiment Name: At_Drought_P Parameter: Timepoint (hr) Value: 24
  misc_feature: MA Experiment 20000437 PARAMETER Experiment Name: At_Drought_P Parameter: Tissue Value: Whole Plant
  misc_feature: MA Experiment 20000437 PARAMETER Experiment Name: At_Drought_P Parameter: Treatment Value: Drought vs. No Drought
  misc_feature: MA Experiment ID: 20000794 Result: Up-regulated in Transcription
  misc_feature: MA Experiment 20000794 PARAMETER Experiment Name: At_Petals_P Parameter: Age (day) Value: 23-25 days
  misc_feature: MA Experiment 20000794 PARAMETER Experiment Name: At_Petals_P Parameter: Plant Line Value: WS
  misc_feature: MA Experiment 20000794 PARAMETER Experiment Name: At_Petals_P Parameter: Tissue Value: Petals vs. Whole plant
  misc_feature: MA Experiment ID: 20001248 Result: Up-regulated in Transcription
  misc_feature: MA Experiment 20001248 PARAMETER Experiment Name: At_Far-red-induction_P Parameter: Age (day) Value: 7
  misc_feature: MA Experiment 20001248 PARAMETER Experiment Name: At_Far-red-induction_P Parameter: Light Value: Far-red vs. White
  misc_feature: MA Experiment 20001248 PARAMETER Experiment Name: At_Far-red-induction_P Parameter: Organism Value: A. thaliana
  misc_feature: MA Experiment 20001248 PARAMETER Experiment Name: At_Far-red-induction_P Parameter: Plant Line Value: Columbia
  misc_feature: MA Experiment 20001248 PARAMETER Experiment Name: At_Far-red-induction_P Parameter: Timepoint (hr) Value: 4
  misc_feature: MA Experiment 20001248 PARAMETER Experiment Name: At_Far-red-induction_P Parameter: Tissue Value: Whole Plant
  misc_feature: MA Experiment ID: 20001558 Result: Down-regulated in Transcription
  misc_feature: MA Experiment 20001558 PARAMETER Experiment Name: At_Drought_Soil_Dry_P Parameter: Age (day) Value: 27
  misc_feature: MA Experiment 20001558 PARAMETER Experiment Name: At_Drought_Soil_Dry_P Parameter: Organism Value: A. thaliana
  misc_feature: MA Experiment 20001558 PARAMETER Experiment Name: At_Drought_Soil_Dry_P Parameter: Plant Line Value: WS
  misc_feature: MA Experiment 20001558 PARAMETER Experiment Name: At_Drought_Soil_Dry_P Parameter: Post Timepoint (hr) Value: 6
  misc_feature: MA Experiment 20001558 PARAMETER Experiment Name: At_Drought_Soil_Dry_P Parameter: Post-Treatment Value: Re-Water vs. No Drought
  misc_feature: MA Experiment 20001558 PARAMETER Experiment Name: At_Drought_Soil_Dry_P Parameter: Timepoint (day) Value: 13
  misc_feature: MA Experiment 20001558 PARAMETER Experiment Name: At_Drought_Soil_Dry_P Parameter: Treatment Value: Drought vs. No Drought
  misc_feature: MA Experiment ID: 20001560 Result: Down-regulated in Transcription
  misc_feature: MA Experiment 20001560 PARAMETER Experiment Name: At_Drought_Soil_Dry_P Parameter: Age (day) Value: 28
  misc_feature: MA Experiment 20001560 PARAMETER Experiment Name: At_Drought_Soil_Dry_P Parameter: Organism Value: A. thaliana
  misc_feature: MA Experiment 20001560 PARAMETER Experiment Name: At_Drought_Soil_Dry_P Parameter: Plant Line Value: WS
  misc_feature: MA Experiment 20001560 PARAMETER Experiment Name: At_Drought_Soil_Dry_P Parameter: Post Timepoint (hr) Value: None
  misc_feature: MA Experiment 20001560 PARAMETER Experiment Name: At_Drought_Soil_Dry_P Parameter: Post-Treatment Value: None
  misc_feature: MA Experiment 20001560 PARAMETER Experiment Name: At_Drought_Soil_Dry_P Parameter: Timepoint (day) Value: 14
  misc_feature: MA Experiment 20001560 PARAMETER Experiment Name: At_Drought_Soil_Dry_P Parameter: Treatment Value: Drought vs. No Drought
  misc_feature: MA Experiment ID: 20001905 Result: Up-regulated in Transcription
  misc_feature: MA Experiment 20001905 PARAMETER Experiment Name: At_Drought_Reproduction_P Parameter: Age (day) Value: 40
  misc_feature: MA Experiment 20001905 PARAMETER Experiment Name: At_Drought_Reproduction_P Parameter: Organism Value: A. thaliana
  misc_feature: MA Experiment 20001905 PARAMETER Experiment Name: At_Drought_Reproduction_P Parameter: Plant Line Value: WS
  misc_feature: MA Experiment 20001905 PARAMETER Experiment Name: At_Drought_Reproduction_P Parameter: Timepoint (day) Value: 10
  misc_feature: MA Experiment 20001905 PARAMETER Experiment Name: At_Drought_Reproduction_P Parameter: Tissue Value: Rosettes
  misc_feature: MA Experiment 20001905 PARAMETER Experiment Name: At_Drought_Reproduction_P Parameter: Treatment Value: Drought vs. No Drought
  misc_feature: MA Experiment ID: 20001911 Result: Up-regulated in Transcription
  misc_feature: MA Experiment 20001911 PARAMETER Experiment Name: At_Drought_Reproduction_P Parameter: Age (day) Value: 40
  misc_feature: MA Experiment 20001911 PARAMETER Experiment Name: At_Drought_Reproduction_P Parameter: Organism Value: A. thaliana
  misc_feature: MA Experiment 20001911 PARAMETER Experiment Name: At_Drought_Reproduction_P Parameter: Plant Line Value: WS
  misc_feature: MA Experiment 20001911 PARAMETER Experiment Name: At_Drought_Reproduction_P Parameter: Timepoint (day) Value: 10
  misc_feature: MA Experiment 20001911 PARAMETER Experiment Name: At_Drought_Reproduction_P Parameter: Tissue Value: Flowers
  misc_feature: MA Experiment 20001911 PARAMETER Experiment Name: At_Drought_Reproduction_P Parameter: Treatment Value: Drought vs. No Drought
gtcatcaccaacttcttcaccatcatcatgaatgttaaaacttccataaacaaatccttccttgtccccttgtatttttctatctaaatccctaaaaccactcaaaatcatccctctttctctcctccccattttccccaacgcttgattcgaattcgtctctctcgttttctgttgttctaccaattgagcaaccctagaatcattcttgtgtacctaccggaaccgagtcttctcttcttccgtggcacatctttcaaagttttaaaccccttttcccctaacttcttttcatttttctgtttttttcccgggaaattttctctctctctctctattttttgtttctctcgtcatgatcattacttgtcaagtatgatcctttattaggtttctttggggccgatctcactttttctgtttctcaccctcttctcttcgaaggcccttgtaaaccctagaatctcctcttttcaaatttatatgttctgtttcttcatcttcaggtttaatcattcaatctatctctagggtttaccgggtcaagtcttaggatctgtctctatccatacttcatcaaagtttccgtctttggttctaatccatggcgtatcattcgattccgagctctgggtttcattacttgaattctccttttggtgacacaacctttactaaagtctttgttggtggccttgcctgggagactcaaagcgagactcttcgtcggcatttcgatcaatatggtgatatccttgaggctgtcgttattactgataagaacactggtcgatccaaaggttatggctttgtgactttccgagatccagaggctgctaggagagcctgtgtcgatccaacacctattatagatggcagacgagcgaattgtaatctcgcttctcttgggagatctaggcctccaatgcaatatgcagtgataccccatgctcctggacgggtaagacctccttccccatatgttggaagtgtgcagagtcctcgcggtttgcattttggaagccatccgtatcaccaaccccctacttataactaccaacaaggagtggtgtacccttatggggttacaccatatggacctgactacatgtactcacagtctcagggtttctatggtccttacatgggtcaacagtaccttcaggtttatggagtacctggggcagttaactcaccgggttatcaatatgggcaactgagccatactattcctggtgctcacggttatacagcgggtcaaggttattcacatccaggaagtcatgttctacagcttggtgccacttcacctatgtctgctattcaatctccatacccttctccttcagctccaacgcaccaacgtgtcatcgtccagactcctcctcagtatatacagagtagcggttctgatcagacaacagggtgatcaacttagtaatccttaaagattgcagaaaagggaagaagtccaggacaaatgctactctggcaggcttcctgtttaagcttagcacattatttattttcgcattctagaggtattaagtagtcttgctcactgaagaagtcaaaaaagggggaaaggagaatggaagtttcagggtttgtgcttctgttatctttaaccctctcatcctatgtatatagcccacaacaagcttgatggcataaactatatgaatagtttcaccccggaaacaagggttttcgcggtaaactggtaggaataagtttggtgtacaaagaaagttcatatatatataaacacatacataaatgcatatagaatggtggaatcaacatctgattcttttgggtggtaaaagtagtcttcttactacacactctcttaaggcatatgagtgttggtaatattactaggtagattctcacgtcctcttgagtcaagtcctctgcattgtaagtaaaaaattaatgactatggagctcacttcagcttctttgtctgtgcataaattttagctccaggattcttctcttttctatgtctgtacagtttctagactgataaattgttcttctcaa

SEQ ID NO: 44947 - protein, 274 aa, Arabidopsis thaliana
  peptide (1)..(274): Ceres Seq. ID no. 12559825
  misc_feature (26)..(81): Pfam Name: RNA recognition motif. (a.k.a. RRM, RBD, or RNP domain) Pfam Description: RNA recognition motif. (a.k.a. RRM, RBD, or RNP
  misc_feature (19)..(221): Homolog of NCBI NO: 18395177 NR Description: RRM-containing protein
  misc_feature (19)..(259): Homolog of NCBI NO: 25518372 NR Description: hypothetical protein F19G10.13 - Arabidopsis
  misc_feature (18)..(222): Homolog of NCBI NO: 34907334 NR Description: P0698A10.29 [Oryza sativa (japonica
  misc_feature (117)..(273): Homolog of NCBI NO: 14030649 NR Description: F15M4.4/F15M4.4 [Arabidopsis thaliana]
  misc_feature (1)..(273): Homolog of NCBI NO: 25406448 NR Description: probable RNA-binding protein, 24808-23340
  misc_feature (1)..(273): Homolog of NCBI NO: 22330665 NR Description: RRM-containing protein; protein id: At1g76460.1
  misc_feature (1)..(255): Homolog of NCBI NO: 25518498 NR Description: hypothetical protein F9H16.14 - Arabidopsis
  misc_feature (1)..(274): Homolog of NCBI NO: 15010636 NR Description: At1g20880/F9H16_14 [Arabidopsis thaliana]
  misc_feature (1)..(274): Homolog of NCBI NO: 23505939 NR Description: At1g20880/F9H16_14 [Arabidopsis thaliana]
  misc_feature (1)..(274): Homolog of NCBI NO: 18394923 NR Description: RRM-containing protein
MAYHSIPSSGFHYLNSPFGDTTFTKVFVGGLAWETQSETLRRHFDQYGDILEAVVITDKNTGRSKGYGFVTFRDPEAARRACVDPTPIIDGRRANCNLASLGRSRPPMQYAVIPHAPGRVRPPSPYVGSVQSPRGLHFGSHPYHQPPTYNYQQGVVYPYGVTPYGPDYMYSQSQGFYGPYMGQQYLQVYGVPGAVNSPGYQYGQLSHTIPGAHGYTAGQGYSHPGSHVLQLGATSPMSAIQSPYPSPSAPTHQRVIVQTPPQYIQSSGSDQTTG

SEQ ID NO: 44948 - protein, 167 aa, Arabidopsis thaliana
  peptide (1)..(167): Ceres Seq. ID no. 12559826
  misc_feature (1)..(114): Homolog of NCBI NO: 18395177 NR Description: RRM-containing protein
  misc_feature (1)..(152): Homolog of NCBI NO: 25518372 NR Description: hypothetical protein F19G10.13 - Arabidopsis
  misc_feature (1)..(115): Homolog of NCBI NO: 34907334 NR Description: P0698A10.29 [Oryza sativa (japonica
  misc_feature (10)..(166): Homolog of NCBI NO: 14030649 NR Description: F15M4.4/F15M4.4 [Arabidopsis thaliana]
  misc_feature (1)..(166): Homolog of NCBI NO: 25406448 NR Description: probable RNA-binding protein, 24808-23340
  misc_feature (1)..(166): Homolog of NCBI NO: 22330665 NR Description: RRM-containing protein; protein id: At1g76460.1
  misc_feature (1)..(148): Homolog of NCBI NO: 25518498 NR Description: hypothetical protein F9H16.14 - Arabidopsis
  misc_feature (1)..(167): Homolog of NCBI NO: 15010636 NR Description: At1g20880/F9H16_14 [Arabidopsis thaliana]
  misc_feature (1)..(167): Homolog of NCBI NO: 23505939 NR Description: At1g20880/F9H16_14 [Arabidopsis thaliana]
  misc_feature (1)..(167): Homolog of NCBI NO: 18394923 NR Description: RRM-containing protein
MQYAVIPHAPGRVRPPSPYVGSVQSPRGLHFGSHPYHQPPTYNYQQGVVYPYGVTPYGPDYMYSQSQGFYGPYMGQQYLQVYGVPGAVNSPGYQYGQLSHTIPGAHGYTAGQGYSHPGSHVLQLGATSPMSAIQSPYPSPSAPTHQRVIVQTPPQYIQSSGSDQTTG

SEQ ID NO: 44949 - DNA, 2193 bp, Arabidopsis thaliana
  misc_feature (1)..(2193): Ceres Seq. ID no. 12559827
  misc_feature: MA Experiment ID: 20001905 Result: Down-regulated in Transcription
  misc_feature: MA Experiment 20001905 PARAMETER Experiment Name: At_Drought_Reproduction_P Parameter: Age (day) Value: 40
  misc_feature: MA Experiment 20001905 PARAMETER Experiment Name: At_Drought_Reproduction_P Parameter: Organism Value: A. thaliana
  misc_feature: MA Experiment 20001905 PARAMETER Experiment Name: At_Drought_Reproduction_P Parameter: Plant Line Value: WS
  misc_feature: MA Experiment 20001905 PARAMETER Experiment Name: At_Drought_Reproduction_P Parameter: Timepoint (day) Value: 10
  misc_feature: MA Experiment 20001905 PARAMETER Experiment Name: At_Drought_Reproduction_P Parameter: Tissue Value: Rosettes
  misc_feature: MA Experiment 20001905 PARAMETER Experiment Name: At_Drought_Reproduction_P Parameter: Treatment Value: Drought vs. No Drought
aaagtagtaaccagagacactgtgccgtcgcccgtcgccgccgccgccacactatcatctctctcaggtttttgattttccacggcaatggagtcttcgattctcaaaagccctaatctctcttcaccatcgttcggtgtaccttcaattcccgccttatcctcctcctccacctcaccattttcatctcttcatctccgatcacagaaccaccgtaccatctctcttaccaccgccggaaaattccgtgtctcgtattctctctccgcttcttcacctctaccacctcatgctcctcgccgtcgtcccaattacatccctaaccgtatatccgatcccaattacgtcagaatcttcgatacaactctccgagacggtgaacagtctcccggagctacactaacctccaaggaaaagctcgatatcgctcgtcaattagccaagctcggagtcgacatcatcgaagctggatttcccgctgcttcaaaagacgatttcgaagctgttaaaaccatagctgagactgttggcaataccgtcgacgaaaatggctatgtccctgtaatctgtggtctctcgagatgtaacaagaaggatattgagacggcttgggaagctgtgaagtacgctaagcggccaagaatccatacgtttattgccactagtgatattcatctgaagtataagttgaagaagagtaaagaagaagttattgagatcgctaggaacatggttagattcgccagaagcttgggatgtgaagatgttgaatttagtccagaagatgccggaagatcggagagagagtacttatacgagattcttggtgaagtgatcaaagctggagcaaccactcttaacatacctgacactgttggtataaccttgcctagtgagtttggtcagttgattgctgatattaaagctaatactcctgggatccaaaatgttataatctctacacattgtcagaatgatcttggactctccaccgccaacactttatctggtgcacattcgggcgcgaggcaagtggaagtgactatcaatggaattggcgaaagagctggaaacgcttcattggaagaggttgtcatggccataaaatgccgtggagatcatgtcttaggaggcctatttactggaatcgatacccggcacattgttatgacaagcaagatggttgaggagtacactggtatgcaaacgcagccccataaggctattgtaggagcaaacgcctttgcgcatgaaagtggtattcatcaggatggaatgctgaagcacaagggtacctatgaaattatgtcccccgaagagattgggcttgagcgatcaaatgatgctggcatcgtgctgggaaagcttagtgggcgtcacgcactgaaagaccgtttaaatgagctcggttatgtcctggatgatgggcagctaagcaaccttttctggcgtttcaaagctgtggcagagcaaaaaaagagagttaccgatgctgacttaatagctttagtatctgatgaagtgtttcagccagaggctgtctggaaactcctggacatgcagataacttgtggaactctcggtctctcaacatctactgtaaaacttgctgactccgatggcaaagagcatgtagcttgttctgttggaaccggacctgtagatgcagcttacaaggcagttgatcttatcgttaaggaacctgcgactctgcttgagtactcgatgaatgcagtaacagaaggcattgatgctattgcaaccacacgggttctaatccgcggagacaacaactactcatcaacaaacgcggtaacgggtgaatctgttgaaagaacttttagtggaaccggagcaggaatggacattgttgtgtcgagcgttaaagcttatgttggagctttgaacaaaatgttgggtttcaaagaacacacctccactttaagtaaaacccctttggagaccaacgaagtccctgcctgaagaaaatcttacctgcaaatctcagagatcaaatcacaatttagatgagtaaacgtctaaaagatttttattttttgttaccgttattgtttgtataaaaagaatatgagttttggtttactaaaataactatgatataaaacagagtatttggttaaaacattgaaacaagaacaaattttctataaatagtgaaggcatttgccctaa

SEQ ID NO: 44950 - protein, 631 aa, Arabidopsis thaliana
  peptide (1)..(631): Ceres Seq. ID no. 12559828
  misc_feature (25)..(614): Homolog of NCBI NO: 7387849 NR Description: 2-isopropylmalate synthase B
  misc_feature (72)..(621): Homolog of NCBI NO: 7387848 NR Description: 2-isopropylmalate synthase A
  misc_feature (439)..(631): Homolog of NCBI NO: 6714306 NR Description: F15H18.3 [Arabidopsis thaliana]
  misc_feature (1)..(440): Homolog of NCBI NO: 6714306 NR Description: F15H18.3 [Arabidopsis thaliana]
  misc_feature (439)..(631): Homolog of NCBI NO: 15221794 NR Description: 2-isopropylmalate synthase, putative; protein id:
  misc_feature (1)..(440): Homolog of NCBI NO: 15221794 NR Description: 2-isopropylmalate synthase, putative; protein id:
MESSILKSPNLSSPSFGVPSIPALSSSSTSPFSSLHLRSQNHRTISLTTAGKFRVSYSLSASSPLPPHAPRRRPNYIPNRISDPNYVRIFDTTLRDGEQSPGATLTSKEKLDIARQLAKLGVDIIEAGFPAASKDDFEAVKTIAETVGNTVDENGYVPVICGLSRCNKKDIETAWEAVKYAKRPRIHTFIATSDIHLKYKLKKSKEEVIEIARNMVRFARSLGCEDVEFSPEDAGRSEREYLYEILGEVIKAGATTLNIPDTVGITLPSEFGQLIADIKANTPGIQNVIISTHCQNDLGLSTANTLSGAHSGARQVEVTINGIGERAGNASLEEVVMAIKCRGDHVLGGLFTGIDTRHIVMTSKMVEEYTGMQTQPHKAIVGANAFAHESGIHQDGMLKHKGTYEIMSPEEIGLERSNDAGIVLGKLSGRHALKDRLNELGYVLDDGQLSNLFWRFKAVAEQKKRVTDADLIALVSDEVFQPEAVWKLLDMQITCGTLGLSTSTVKLADSDGKEHVACSVGTGPVDAAYKAVDLIVKEPATLLEYSMNAVTEGIDAIATTRVLIRGDNNYSSTNAVTGESVERTFSGTGAGMDIVVSSVKAYVGALNKMLGFKEHTSTLSKTPLETNEVPA

SEQ ID NO: 44951 - protein, 417 aa, Arabidopsis thaliana
  peptide (1)..(417): Ceres Seq. ID no. 12559829
  misc_feature (1)..(400): Homolog of NCBI NO: 7387849 NR Description: 2-isopropylmalate synthase B
  misc_feature (1)..(407): Homolog of NCBI NO: 7387848 NR Description: 2-isopropylmalate synthase A
  misc_feature (225)..(417): Homolog of NCBI NO: 6714306 NR Description: F15H18.3 [Arabidopsis thaliana]
  misc_feature (1)..(226): Homolog of NCBI NO: 6714306 NR Description: F15H18.3 [Arabidopsis thaliana]
  misc_feature (225)..(417): Homolog of NCBI NO: 15221794 NR Description: 2-isopropylmalate synthase, putative; protein id:
  misc_feature (1)..(226): Homolog of NCBI NO: 15221794 NR Description: 2-isopropylmalate synthase, putative; protein id:
MVRFARSLGCEDVEFSPEDAGRSEREYLYEILGEVIKAGATTLNIPDTVGITLPSEFGQLIADIKANTPGIQNVIISTHCQNDLGLSTANTLSGAHSGARQVEVTINGIGERAGNASLEEVVMAIKCRGDHVLGGLFTGIDTRHIVMTSKMVEEYTGMQTQPHKAIVGANAFAHESGIHQDGMLKHKGTYEIMSPEEIGLERSNDAGIVLGKLSGRHALKDRLNELGYVLDDGQLSNLFWRFKAVAEQKKRVTDADLIALVSDEVFQPEAVWKLLDMQITCGTLGLSTSTVKLADSDGKEHVACSVGTGPVDAAYKAVDLIVKEPATLLEYSMNAVTEGIDAIATTRVLIRGDNNYSSTNAVTGESVERTFSGTGAGMDIVVSSVKAYVGALNKMLGFKEHTSTLSKTPLETNEVPA

SEQ ID NO: 44952 - DNA, 2714 bp, Arabidopsis thaliana
  misc_feature (1)..(2714): Ceres Seq. ID no. 12600111
  misc_feature: MA Experiment ID: 20000169 Result: Up-regulated in Transcription
  misc_feature: MA Experiment 20000169 PARAMETER Experiment Name: At_100uM_ABA_P Parameter: Age (day) Value: 14
  misc_feature: MA Experiment 20000169 PARAMETER Experiment Name: At_100uM_ABA_P Parameter: Organism Value: A. thaliana
  misc_feature: MA Experiment 20000169 PARAMETER Experiment Name: At_100uM_ABA_P Parameter: Plant Line Value: WS
  misc_feature: MA Experiment 20000169 PARAMETER Experiment Name: At_100uM_ABA_P Parameter: Timepoint (hr) Value: 6
  misc_feature: MA Experiment 20000169 PARAMETER Experiment Name: At_100uM_ABA_P Parameter: Tissue Value: Aerial
  misc_feature: MA Experiment 20000169 PARAMETER Experiment Name: At_100uM_ABA_P Parameter: Treatment Value: 100uM ABA vs. No Treatment
  misc_feature: MA Experiment ID: 20000173 Result: Up-regulated in Transcription
  misc_feature: MA Experiment 20000173 PARAMETER Experiment Name: At_42deg_Heat_P Parameter: Age (day) Value: 14
  misc_feature: MA Experiment 20000173 PARAMETER Experiment Name: At_42deg_Heat_P Parameter: Organism Value: A. thaliana
  misc_feature: MA Experiment 20000173 PARAMETER Experiment Name: At_42deg_Heat_P Parameter: Plant Line Value: WS
  misc_feature: MA Experiment 20000173 PARAMETER Experiment Name: At_42deg_Heat_P Parameter: Temperature (deg C) Value: 42 vs. 22
  misc_feature: MA Experiment 20000173 PARAMETER Experiment Name: At_42deg_Heat_P Parameter: Timepoint (hr) Value: 6
  misc_feature: MA Experiment 20000173 PARAMETER Experiment Name: At_42deg_Heat_P Parameter: Tissue Value: Aerial
  misc_feature: MA Experiment ID: 20000179 Result: Down-regulated in Transcription
  misc_feature: MA Experiment 20000179 PARAMETER Experiment Name: At_Germinating_Seeds_P Parameter: Age (hr) Value: 6 vs. 0
  misc_feature: MA Experiment 20000179 PARAMETER Experiment Name: At_Germinating_Seeds_P Parameter: Tissue Value: Germinating Seeds
  misc_feature: MA Experiment ID: 20000180 Result: Down-regulated in Transcription
  misc_feature: MA Experiment 20000180 PARAMETER Experiment Name: At_Germinating_Seeds_P Parameter: Age (hr) Value: 24 vs. 0
  misc_feature: MA Experiment 20000180 PARAMETER Experiment Name: At_Germinating_Seeds_P Parameter: Tissue Value: Germinating Seeds
  misc_feature: MA Experiment ID: 20000182 Result: Up-regulated in Transcription
  misc_feature: MA Experiment 20000182 PARAMETER Experiment Name: At_2mM_SA_P Parameter: Age (day) Value: 14
  misc_feature: MA Experiment 20000182 PARAMETER Experiment Name: At_2mM_SA_P Parameter: Organism Value: A. thaliana
  misc_feature: MA Experiment 20000182 PARAMETER Experiment Name: At_2mM_SA_P Parameter: Plant Line Value: WS
  misc_feature: MA Experiment 20000182 PARAMETER Experiment Name: At_2mM_SA_P Parameter: Timepoint (hr) Value: 6
  misc_feature: MA Experiment 20000182 PARAMETER Experiment Name: At_2mM_SA_P Parameter: Tissue Value: Aerial
  misc_feature: MA Experiment 20000182 PARAMETER Experiment Name: At_2mM_SA_P Parameter: Treatment Value: 2mM SA vs. No Treatment
  misc_feature: MA Experiment ID: 20000184 Result: Down-regulated in Transcription
  misc_feature: MA Experiment 20000184 PARAMETER Experiment Name: At_Shoots__P Parameter: Age (day) Value: 7
  misc_feature: MA Experiment 20000184 PARAMETER Experiment Name: At_Shoots__P Parameter: Tissue Value: Shoots vs. Whole Plant
  misc_feature: MA Experiment ID: 20000185 Result: Down-regulated in Transcription
  misc_feature: MA Experiment 20000185 PARAMETER Experiment Name: At_Roots__P Parameter: Age (day) Value: 7 vs. 21
  misc_feature: MA Experiment 20000185 PARAMETER Experiment Name: At_Roots__P Parameter: Organism Value: A. thaliana
  misc_feature: MA Experiment 20000185 PARAMETER Experiment Name: At_Roots__P Parameter: Tissue Value: Roots vs. Whole Plant
  misc_feature: MA Experiment ID: 20000211 Result: Up-regulated in Transcription
  misc_feature: MA Experiment 20000211 PARAMETER Experiment Name: At_0.001percent_MeJA__P Parameter: Age (day) Value: 14
  misc_feature: MA Experiment 20000211 PARAMETER Experiment Name: At_0.001percent_MeJA__P Parameter: Organism Value: A. thaliana
  misc_feature: MA Experiment 20000211 PARAMETER Experiment Name: At_0.001percent_MeJA__P Parameter: Plant Line Value: WS
  misc_feature: MA Experiment 20000211 PARAMETER Experiment Name: At_0.001percent_MeJA__P Parameter: Timepoint (hr) Value: 1
  misc_feature: MA Experiment 20000211 PARAMETER Experiment Name: At_0.001percent_MeJA__P Parameter: Tissue Value: Aerial
  misc_feature: MA Experiment 20000211 PARAMETER Experiment Name: At_0.001percent_MeJA__P Parameter: Treatment Value: 0.001percent MeJA vs. No Treatment
  misc_feature: MA Experiment ID: 20000264 Result: Down-regulated in Transcription
  misc_feature: MA Experiment 20000264 PARAMETER Experiment Name: At_Open_Flower_P Parameter: Age (day) Value: 21
  misc_feature: MA Experiment 20000264 PARAMETER Experiment Name: At_Open_Flower_P Parameter: Plant Line Value: WS
  misc_feature: MA Experiment 20000264 PARAMETER Experiment Name: At_Open_Flower_P Parameter: Tissue Value: Open Flower vs. Whole Plant
  misc_feature: MA Experiment ID: 20000265 Result: Down-regulated in Transcription
  misc_feature: MA Experiment 20000265 PARAMETER Experiment Name: At_Open_Flower_P Parameter: Age (day) Value: 21
  misc_feature: MA Experiment 20000265 PARAMETER Experiment Name: At_Open_Flower_P Parameter: Plant Line Value: WS
  misc_feature: MA Experiment 20000265 PARAMETER Experiment Name: At_Open_Flower_P Parameter: Tissue Value: Closed Flower vs. Whole Plant
  misc_feature: MA Experiment ID: 20000267 Result: Up-regulated in Transcription
  misc_feature: MA Experiment 20000267 PARAMETER Experiment Name: At_Drought_P Parameter: Age (day) Value: 7
  misc_feature: MA Experiment 20000267 PARAMETER Experiment Name: At_Drought_P Parameter: Organism Value: A. thaliana
  misc_feature: MA Experiment 20000267 PARAMETER Experiment Name: At_Drought_P Parameter: Plant Line Value: WS
  misc_feature: MA Experiment 20000267 PARAMETER Experiment Name: At_Drought_P Parameter: Timepoint (hr) Value: 6
  misc_feature: MA Experiment 20000267 PARAMETER Experiment Name: At_Drought_P Parameter: Tissue Value: Whole Plant
  misc_feature: MA Experiment 20000267 PARAMETER Experiment Name: At_Drought_P Parameter: Treatment Value: Drought vs. No Drought
  misc_feature: MA Experiment ID: 20000436 Result: Up-regulated in Transcription
  misc_feature: MA Experiment 20000436 PARAMETER Experiment Name: At_Drought_P Parameter: Age (day) Value: 7
  misc_feature: MA Experiment 20000436 PARAMETER Experiment Name: At_Drought_P Parameter: Organism Value: A. thaliana
  misc_feature: MA Experiment 20000436 PARAMETER Experiment Name: At_Drought_P Parameter: Plant Line Value: WS
  misc_feature: MA Experiment 20000436 PARAMETER Experiment Name: At_Drought_P Parameter: Timepoint (hr) Value: 12
  misc_feature: MA Experiment 20000436 PARAMETER Experiment Name: At_Drought_P Parameter: Tissue Value: Whole Plant
  misc_feature: MA Experiment 20000436 PARAMETER Experiment Name: At_Drought_P Parameter: Treatment Value: Drought vs. No Drought
  misc_feature: MA Experiment ID: 20000437 Result: Up-regulated in Transcription
  misc_feature: MA Experiment 20000437 PARAMETER Experiment Name: At_Drought_P Parameter: Age (day) Value: 8
  misc_feature: MA Experiment 20000437 PARAMETER Experiment Name: At_Drought_P Parameter: Organism Value: A. thaliana
  misc_feature: MA Experiment 20000437 PARAMETER Experiment Name: At_Drought_P Parameter: Plant Line Value: WS
  misc_feature: MA Experiment 20000437 PARAMETER Experiment Name: At_Drought_P Parameter: Timepoint (hr) Value: 24
  misc_feature: MA Experiment 20000437 PARAMETER Experiment Name: At_Drought_P Parameter: Tissue Value: Whole Plant
  misc_feature: MA Experiment 20000437 PARAMETER Experiment Name: At_Drought_P Parameter: Treatment Value: Drought vs. No Drought
  misc_feature: MA Experiment ID: 20000438 Result: Down-regulated in Transcription
  misc_feature: MA Experiment 20000438 PARAMETER Experiment Name: At_Shoots__P Parameter: Age (day) Value: 14
  misc_feature: MA Experiment 20000438 PARAMETER Experiment Name: At_Shoots__P Parameter: Tissue Value: Shoots vs. Whole Plant
  misc_feature: MA Experiment ID: 20000439 Result: Down-regulated in Transcription
  misc_feature: MA Experiment 20000439 PARAMETER Experiment Name: At_Roots__P Parameter: Age (day) Value: 14 vs. 21
  misc_feature: MA Experiment 20000439 PARAMETER Experiment Name: At_Roots__P Parameter: Organism Value: A. thaliana
  misc_feature: MA Experiment 20000439 PARAMETER Experiment Name: At_Roots__P Parameter: Tissue Value: Roots vs. Whole Plant
  misc_feature: MA Experiment ID: 20000441 Result: Up-regulated in Transcription
  misc_feature: MA Experiment 20000441 PARAMETER Experiment Name: At_1uM_BR-BRZ__P Parameter: Tissue Value: Shoot Apices
  misc_feature: MA Experiment 20000441 PARAMETER Experiment Name: At_1uM_BR-BRZ__P Parameter: Treatment Value: 1uM BR vs. No Treatment
  misc_feature: MA Experiment ID: 20000452 Result: Down-regulated in Transcription
  misc_feature: MA Experiment 20000452 PARAMETER Experiment Name: At_CS6879_Shoots-Roots_P Parameter: Age (day) Value: 14
  misc_feature: MA Experiment 20000452 PARAMETER Experiment Name: At_CS6879_Shoots-Roots_P Parameter: Organism Value: A. thaliana
  misc_feature: MA Experiment 20000452 PARAMETER Experiment Name: At_CS6879_Shoots-Roots_P Parameter: Plant Line Value: CS6879 vs. WS
  misc_feature: MA Experiment 20000452 PARAMETER Experiment Name: At_CS6879_Shoots-Roots_P Parameter: Tissue Value: Shoots
  misc_feature: MA Experiment ID: 20000453 Result: Up-regulated in Transcription
  misc_feature: MA Experiment 20000453 PARAMETER Experiment Name: At_100uM_ABA_P Parameter: Age (day) Value: 15
  misc_feature: MA Experiment 20000453 PARAMETER Experiment Name: At_100uM_ABA_P Parameter: Organism Value: A. thaliana
  misc_feature: MA Experiment 20000453 PARAMETER Experiment Name: At_100uM_ABA_P Parameter: Plant Line Value: WS
  misc_feature: MA Experiment 20000453 PARAMETER Experiment Name: At_100uM_ABA_P Parameter: Timepoint (hr) Value: 24
  misc_feature: MA Experiment 20000453 PARAMETER Experiment Name: At_100uM_ABA_P Parameter: Tissue Value: Aerial
  misc_feature: MA Experiment 20000453 PARAMETER Experiment Name: At_100uM_ABA_P Parameter: Treatment Value: 100uM ABA vs. No Treatment
  misc_feature: MA Experiment ID: 20000527 Result: Up-regulated in Transcription
  misc_feature: MA Experiment 20000527 PARAMETER Experiment Name: At_10percent_PEG_P Parameter: Age (day) Value: 20
  misc_feature: MA Experiment 20000527 PARAMETER Experiment Name: At_10percent_PEG_P Parameter: Organism Value: A. thaliana
  misc_feature: MA Experiment 20000527 PARAMETER Experiment Name: At_10percent_PEG_P Parameter: Plant Line Value: WS
  misc_feature: MA Experiment 20000527 PARAMETER Experiment Name: At_10percent_PEG_P Parameter: Timepoint (day) Value: 20
  misc_feature: MA Experiment 20000527 PARAMETER Experiment Name: At_10percent_PEG_P Parameter: Tissue Value: Whole Plant
  misc_feature: MA Experiment 20000527 PARAMETER Experiment Name: At_10percent_PEG_P Parameter: Treatment Value: 10percent PEG vs. No Treatment
  misc_feature: MA Experiment ID: 20000573 Result: Up-regulated in Transcription
  misc_feature: MA Experiment 20000573 PARAMETER Experiment Name: At_100uM_ABA_Mutants__P Parameter: Organism Value: A. thaliana
  misc_feature: MA Experiment 20000573 PARAMETER Experiment Name: At_100uM_ABA_Mutants__P Parameter: Plant Line Value: CS22 vs. Ler wt
  misc_feature: MA Experiment 20000573 PARAMETER Experiment Name: At_100uM_ABA_Mutants__P Parameter: Timepoint (hr) Value: N/A
  misc_feature: MA Experiment 20000573 PARAMETER Experiment Name: At_100uM_ABA_Mutants__P Parameter: Tissue Value: Whole Plant
  misc_feature: MA Experiment 20000573 PARAMETER Experiment Name: At_100uM_ABA_Mutants__P Parameter: Treatment Value: None
  misc_feature: MA Experiment ID: 20000578 Result: Up-regulated in Transcription
  misc_feature: MA Experiment 20000578 PARAMETER Experiment Name: At_CS3726__P Parameter: Organism Value: A. thaliana
  misc_feature: MA Experiment 20000578 PARAMETER Experiment Name: At_CS3726__P Parameter: Plant Line Value: CS3726
  misc_feature: MA Experiment 20000578 PARAMETER Experiment Name: At_CS3726__P Parameter: Tissue Value: Whole Plant
  misc_feature: MA Experiment ID: 20000606 Result: Up-regulated in Transcription
  misc_feature: MA Experiment 20000606 PARAMETER Experiment Name: At_CS8548_Mutant_P Parameter: Age (day) Value: 14
  misc_feature: MA Experiment 20000606 PARAMETER Experiment Name: At_CS8548_Mutant_P Parameter: Plant Line Value: CS8548 vs. wt
  misc_feature: MA Experiment 20000606 PARAMETER Experiment Name: At_CS8548_Mutant_P Parameter: Tissue Value: Whole Plant
  misc_feature: MA Experiment ID: 20000709 Result: Up-regulated in Transcription
  misc_feature: MA Experiment 20000709 PARAMETER Experiment Name: At_15mM_NH4NO3_L-to-H_P Parameter: Age (hr) Value: 14
  misc_feature: MA Experiment 20000709 PARAMETER Experiment Name: At_15mM_NH4NO3_L-to-H_P Parameter: Organism Value: A. thaliana
  misc_feature: MA Experiment 20000709 PARAMETER Experiment Name: At_15mM_NH4NO3_L-to-H_P Parameter: Plant Line Value: WS
  misc_feature: MA Experiment 20000709 PARAMETER Experiment Name: At_15mM_NH4NO3_L-to-H_P Parameter: Timepoint (hr) Value: 4
  misc_feature: MA Experiment 20000709 PARAMETER Experiment Name: At_15mM_NH4NO3_L-to-H_P Parameter: Tissue Value: Aerial
  misc_feature: MA Experiment 20000709 PARAMETER Experiment Name: At_15mM_NH4NO3_L-to-H_P Parameter: Treatment Value: 15mM NH4NO3 vs. 30mM Mannitol
  misc_feature: MA Experiment ID: 20001248 Result: Up-regulated in Transcription
  misc_feature: MA Experiment 20001248 PARAMETER Experiment Name: At_Far-red-induction_P Parameter: Age (day) Value: 7
  misc_feature: MA Experiment 20001248 PARAMETER Experiment Name: At_Far-red-induction_P Parameter: Light Value: Far-red vs. White
  misc_feature: MA Experiment 20001248 PARAMETER Experiment Name: At_Far-red-induction_P Parameter: Organism Value: A. thaliana
  misc_feature: MA Experiment 20001248 PARAMETER Experiment Name: At_Far-red-induction_P Parameter: Plant Line Value: Columbia
  misc_feature: MA Experiment 20001248 PARAMETER Experiment Name: At_Far-red-induction_P Parameter: Timepoint (hr) Value: 4
  misc_feature: MA Experiment 20001248 PARAMETER Experiment Name: At_Far-red-induction_P Parameter: Tissue Value: Whole Plant
  misc_feature: MA Experiment ID: 20001450 Result: Up-regulated in Transcription
  misc_feature: MA Experiment 20001450 PARAMETER Experiment Name: At_Far-red-induction_P Parameter: Age (day) Value: 7
  misc_feature: MA Experiment 20001450 PARAMETER Experiment Name: At_Far-red-induction_P Parameter: Light Value: Far-red vs. White
  misc_feature: MA Experiment 20001450 PARAMETER Experiment Name: At_Far-red-induction_P Parameter: Organism Value: A. thaliana
  misc_feature: MA Experiment 20001450 PARAMETER Experiment Name: At_Far-red-induction_P Parameter: Plant Line Value: Columbia
  misc_feature: MA Experiment 20001450 PARAMETER Experiment Name: At_Far-red-induction_P Parameter: Timepoint (hr) Value: 8
  misc_feature: MA Experiment 20001450 PARAMETER Experiment Name: At_Far-red-induction_P Parameter: Tissue Value: Whole Plant
  misc_feature: MA Experiment ID: 20001451 Result: Up-regulated in Transcription
  misc_feature: MA Experiment 20001451 PARAMETER Experiment Name: At_Far-red-induction_P Parameter: Age (day) Value: 7
  misc_feature: MA Experiment 20001451 PARAMETER Experiment Name: At_Far-red-induction_P Parameter: Light Value: Far-red vs. White
  misc_feature: MA Experiment 20001451 PARAMETER Experiment Name: At_Far-red-induction_P Parameter: Organism Value: A. thaliana
  misc_feature: MA Experiment 20001451 PARAMETER Experiment Name: At_Far-red-induction_P Parameter: Plant Line Value: Columbia
  misc_feature: MA Experiment 20001451 PARAMETER Experiment Name: At_Far-red-induction_P Parameter: Timepoint (hr) Value: 24
  misc_feature: MA Experiment 20001451 PARAMETER Experiment Name: At_Far-red-induction_P Parameter: Tissue Value: Whole Plant
  misc_feature: MA Experiment ID: 20001554 Result: Up-regulated in Transcription
  misc_feature: MA Experiment 20001554 PARAMETER Experiment Name: At_Drought_Soil_Dry_P Parameter: Age (day) Value: 21
  misc_feature: MA Experiment 20001554 PARAMETER Experiment Name: At_Drought_Soil_Dry_P Parameter: Organism Value: A. thaliana
  misc_feature: MA Experiment 20001554 PARAMETER Experiment Name: At_Drought_Soil_Dry_P Parameter: Plant Line Value: WS
  misc_feature: MA Experiment 20001554 PARAMETER Experiment Name: At_Drought_Soil_Dry_P Parameter: Post Timepoint (hr) Value: None
  misc_feature: MA Experiment 20001554 PARAMETER Experiment Name: At_Drought_Soil_Dry_P Parameter: Post-Treatment Value: None
  misc_feature: MA Experiment 20001554 PARAMETER Experiment Name: At_Drought_Soil_Dry_P Parameter: Timepoint (day) Value: 7
  misc_feature: MA Experiment 20001554 PARAMETER Experiment Name: At_Drought_Soil_Dry_P Parameter: Treatment Value: Drought vs. No Drought
  misc_feature: MA Experiment ID: 20001555 Result: Up-regulated in Transcription
  misc_feature: MA Experiment 20001555 PARAMETER Experiment Name: At_Drought_Soil_Dry_P Parameter: Age (day) Value: 24
  misc_feature: MA Experiment 20001555 PARAMETER Experiment Name: At_Drought_Soil_Dry_P Parameter: Organism Value: A. thaliana
  misc_feature: MA Experiment 20001555 PARAMETER Experiment Name: At_Drought_Soil_Dry_P Parameter: Plant Line Value: WS
  misc_feature: MA Experiment 20001555 PARAMETER Experiment Name: At_Drought_Soil_Dry_P Parameter: Post Timepoint (hr) Value: None
  misc_feature: MA Experiment 20001555 PARAMETER Experiment Name: At_Drought_Soil_Dry_P Parameter: Post-Treatment Value: None
  misc_feature: MA Experiment 20001555 PARAMETER Experiment Name: At_Drought_Soil_Dry_P Parameter: Timepoint (day) Value: 10
  misc_feature: MA Experiment 20001555 PARAMETER Experiment Name: At_Drought_Soil_Dry_P Parameter: Treatment Value: Drought vs. No Drought
  misc_feature: MA Experiment ID: 20001556 Result: Up-regulated in Transcription
  misc_feature: MA Experiment 20001556 PARAMETER Experiment Name: At_Drought_Soil_Dry_P Parameter: Age (day) Value: 26
  misc_feature: MA Experiment 20001556 PARAMETER Experiment Name: At_Drought_Soil_Dry_P Parameter: Organism Value: A. thaliana
  misc_feature: MA Experiment 20001556 PARAMETER Experiment Name: At_Drought_Soil_Dry_P Parameter: Plant Line Value: WS
  misc_feature: MA Experiment 20001556 PARAMETER Experiment Name: At_Drought_Soil_Dry_P Parameter: Post Timepoint (hr) Value: None
  misc_feature: MA Experiment 20001556 PARAMETER Experiment Name: At_Drought_Soil_Dry_P Parameter: Post-Treatment Value: None
  misc_feature: MA Experiment 20001556 PARAMETER Experiment Name: At_Drought_Soil_Dry_P Parameter: Timepoint (day) Value: 12
  misc_feature: MA Experiment 20001556 PARAMETER Experiment Name: At_Drought_Soil_Dry_P Parameter: Treatment Value: Drought vs. No Drought
  misc_feature: MA Experiment ID: 20001557 Result: Up-regulated in Transcription
  misc_feature: MA Experiment 20001557 PARAMETER Experiment Name: At_Drought_Soil_Dry_P Parameter: Age (day) Value: 27
  misc_feature: MA Experiment 20001557 PARAMETER Experiment Name: At_Drought_Soil_Dry_P Parameter: Organism Value: A. thaliana
  misc_feature: MA Experiment 20001557 PARAMETER Experiment Name: At_Drought_Soil_Dry_P Parameter: Plant Line Value: WS
  misc_feature: MA Experiment 20001557 PARAMETER Experiment Name: At_Drought_Soil_Dry_P Parameter: Post Timepoint (hr) Value: 3
  misc_feature: MA Experiment 20001557 PARAMETER Experiment Name: At_Drought_Soil_Dry_P Parameter: Post-Treatment Value: Re-Water vs. No Drought
  misc_feature: MA Experiment 20001557 PARAMETER Experiment Name: At_Drought_Soil_Dry_P Parameter: Timepoint (day) Value: 13
  misc_feature: MA Experiment 20001557 PARAMETER Experiment Name: At_Drought_Soil_Dry_P Parameter: Treatment Value: Drought vs. No Drought
  misc_feature: MA Experiment ID: 20001558 Result: Up-regulated in Transcription
  misc_feature: MA Experiment 20001558 PARAMETER Experiment Name: At_Drought_Soil_Dry_P Parameter: Age (day) Value: 27
  misc_feature: MA Experiment 20001558 PARAMETER Experiment Name: At_Drought_Soil_Dry_P Parameter: Organism Value: A. thaliana
  misc_feature: MA Experiment 20001558 PARAMETER Experiment Name: At_Drought_Soil_Dry_P Parameter: Plant Line Value: WS
  misc_feature: MA Experiment 20001558 PARAMETER Experiment Name: At_Drought_Soil_Dry_P Parameter: Post Timepoint (hr) Value: 6
  misc_feature: MA Experiment 20001558 PARAMETER Experiment Name: At_Drought_Soil_Dry_P Parameter: Post-Treatment Value: Re-Water vs. No Drought
  misc_feature: MA Experiment 20001558 PARAMETER Experiment Name: At_Drought_Soil_Dry_P Parameter: Timepoint (day) Value: 13
  misc_feature: MA Experiment 20001558 PARAMETER Experiment Name: At_Drought_Soil_Dry_P Parameter: Treatment Value: Drought vs. No Drought
  misc_feature: MA Experiment ID: 20001757 Result: Up-regulated in Transcription
  misc_feature: MA Experiment 20001757 PARAMETER Experiment Name: At_50mM_NH4NO3_L-to-H_P Parameter: Timepoint (hr) Value: 6
  misc_feature: MA Experiment 20001757 PARAMETER Experiment Name: At_50mM_NH4NO3_L-to-H_P Parameter: Tissue Value: Leaf
  misc_feature: MA Experiment 20001757 PARAMETER Experiment Name: At_50mM_NH4NO3_L-to-H_P Parameter: Treatment Value: 50mM NH4NO3 vs 100mM Mannitol
  misc_feature: MA Experiment ID: 20001905 Result: Up-regulated in Transcription
  misc_feature: MA Experiment 20001905 PARAMETER Experiment Name: At_Drought_Reproduction_P Parameter: Age (day) Value: 40
  misc_feature: MA Experiment 20001905 PARAMETER Experiment Name: At_Drought_Reproduction_P Parameter: Organism Value: A. thaliana
  misc_feature: MA Experiment 20001905 PARAMETER Experiment Name: At_Drought_Reproduction_P Parameter: Plant Line Value: WS
  misc_feature: MA Experiment 20001905 PARAMETER Experiment Name: At_Drought_Reproduction_P Parameter: Timepoint (day) Value: 10
  misc_feature: MA Experiment 20001905 PARAMETER Experiment Name: At_Drought_Reproduction_P Parameter: Tissue Value: Rosettes
  misc_feature: MA Experiment 20001905 PARAMETER Experiment Name: At_Drought_Reproduction_P Parameter: Treatment Value: Drought vs. No Drought
  misc_feature: MA Experiment ID: 20001908 Result: Up-regulated in Transcription
  misc_feature: MA Experiment 20001908 PARAMETER Experiment Name: At_Drought_Reproduction_P Parameter: Age (day) Value: 40
  misc_feature: MA Experiment 20001908 PARAMETER Experiment Name: At_Drought_Reproduction_P Parameter: Organism Value: A. thaliana
  misc_feature: MA Experiment 20001908 PARAMETER Experiment Name: At_Drought_Reproduction_P Parameter: Plant Line Value: WS
  misc_feature: MA Experiment 20001908 PARAMETER Experiment Name: At_Drought_Reproduction_P Parameter: Timepoint (day) Value: 10
  misc_feature: MA Experiment 20001908 PARAMETER Experiment Name: At_Drought_Reproduction_P Parameter: Tissue Value: Siliques
  misc_feature: MA Experiment 20001908 PARAMETER Experiment Name: At_Drought_Reproduction_P Parameter: Treatment Value: Drought vs. No Drought
  misc_feature: MA Experiment ID: 20001911 Result: Up-regulated in Transcription
  misc_feature: MA Experiment 20001911 PARAMETER Experiment Name: At_Drought_Reproduction_P Parameter: Age (day) Value: 40
  misc_feature: MA Experiment 20001911 PARAMETER Experiment Name: At_Drought_Reproduction_P Parameter: Organism Value: A. thaliana
  misc_feature: MA Experiment 20001911 PARAMETER Experiment Name: At_Drought_Reproduction_P Parameter: Plant Line Value: WS
  misc_feature: MA Experiment 20001911 PARAMETER Experiment Name: At_Drought_Reproduction_P Parameter: Timepoint (day) Value: 10
  misc_feature: MA Experiment 20001911 PARAMETER Experiment Name: At_Drought_Reproduction_P Parameter: Tissue Value: Flowers
  misc_feature: MA Experiment 20001911 PARAMETER Experiment Name: At_Drought_Reproduction_P Parameter: Treatment Value: Drought vs. No Drought
agccaaacacaccgttctgattactgattcttcattgacggtaggagtcaccacttttggcggcgattccttgttctctattttttttgcacaagcaacatttagcttctgcaaactccagttcatctctcaaccctcatatcgccgtgttttctcgctctagtaccgcgagctcggacgaaccaggaagcaatccgttaatctagaagcggtgttgagaagatgacgattacatcaaatatctctgtacagaacgataacctcgttgttcaagggaagactatccttaccaaaatccctgacaacattatcctaactccggttaccggtaatggattcgtttccggttcatttataggcgcgacgtttgaacaaagcaagagtcttcatgtgttccccatcggtgtattggagggtcttcggttcatgtgctgtttccggtttaagctatggtggatgactcagagaatgggaagctgtggaaaagacattcctttggagacacagttcatgctactggaaagcaaggatgaggttgaagggaatggggatgatgctcctactgtttataccgtctttctccctctccttgaaggccagttcagagctgttctgcaaggaaatgagaagaatgagattgagatttgttttgagagtggagataaggcggtggaaactagccagggaactcaccttgtttatgttcatgctggaaccaatccctttgaagttatcagacaatccgtaaaggctgtggagagacacatgcagacatttcatcatcgtgagaagaagaagcttccttctttcctagactggtttggctggtgcacatgggacgctttctacacagatgtgactgccgagggtgttgatgaaggccttaaaagtctttctgaaggaggtacccctccgaagtttctgatcatagacgatggttggcaacaaatagaaaacaaagagaaagatgaaaactgcgttgttcaggaaggagcacagtttgctactaggcttgttggtatcaaggagaatgcaaaatttcagaagagtgatcagaaggatacgcaagtgtcaggactaaagagtgtagttgacaatgcgaagcagcgccataatgtgaagcaagtttatgcatggcatgctttagctggatactggggtggagtaaaacccgctgcttctggaatggaacactatgatagtgcattagcatacccagttcagtctccaggtgtcttagggaaccaaccagatatagtaatggacagccttgctgttcatggtctcggacttgtcaatccgaagaaagttttcaacttctacaacgaactgcattcatacttggcttcatgtggtatagatggagtcaaagttgacgtccagaacatcattgaaaccctaggtgctggtcttggcgggagagtctctctcactcgtagctaccagcaagctttagaagcttcaattgcccggaacttcacagataatggttgcatatcttgcatgtgtcacaacacagacggactttacagcgcaaaacaaaccgctattgttagagcttccgatgatttctacccaagagatcctgcttctcacaccatccacattgcatcggttgcatacaacagccttttccttggagagttcatgcaacctgactgggatatgttccatagtctacacccaactgcagagtaccatgctgcagcgcgtgcagtgggtggatgcgcaatctatgtcagtgataagccaggcaaccacaactttgatctattgaggaagctggttcttcctgatggttcagttcttcgggctaagctcccgggtaggcctacccgtgactgcttattcgctgatccagctagagatggaatcagcttgctcaagatctggaacatgaataagtttactggtattgttggtgtattcaattgtcaaggtgctggttggtgcaaggaaacgaagaagaaccagatccatgatacttctcctggcacactcacgggttcaatccgtgcggatgatgctgatctaatctctcaagtggctggtgaagattggagtggagattcaatagtctatgcatacagatcaggtgaggtggtaagactacctaaaggtgcttcaattcctctcaccctcaaagtccttgaatatgaactcttccacatctctcctttgaaggaaatcactgaaaacatttcgttcgcaccaataggacttgtagacatgttcaactcaagtggagcaatcgagtcgattgatatcaatcacgtgaccgacaagaatcctgaattcttcgatggagagatctcctcggcttctcccgcgctcagcgataaccgttctccaacagctctggtatctgtcagtgtcagaggctgtggtcgttttggagcttactcttctcagcgtcctctaaaatgcgccgttgaaagcacagagactgatttcacgtacgacgccgaggttgggcttgtgactttgaatctgccggtgacgagggaggaaatgttcagatggcatgttgagattctggtctagaccaccaataagttattttttttcaccaatttgtcattcatcattttgtagtataaaggcatcaataaattaggaaattaatggtcattcttcgctttgtaataatgtaatctcgtcaagttggggaagcaccgtccccttgtagtttcgttctaataatatagtacctt

SEQ ID NO: 44953 - protein, 773 aa, Arabidopsis thaliana
  peptide (1)..(773): Ceres Seq. ID no. 12600112
  misc_feature (714)..(769): Homolog of NCBI NO: 30687712 NR Description: glycosyl hydrolase family 36 [Arabidopsis
  misc_feature (1)..(680): Homolog of NCBI NO: 30687712 NR Description: glycosyl hydrolase family 36 [Arabidopsis
  misc_feature (706)..(771): Homolog of NCBI NO: 15222768 NR Description: glycosyl hydrolase family 36; protein id:
  misc_feature (1)..(680): Homolog of NCBI NO: 15222768 NR Description: glycosyl hydrolase family 36; protein id:
  misc_feature (713)..(771): Homolog of NCBI NO: 23452226 NR Description: alkaline alpha-galactosidase seed imbibition
  misc_feature (1)..(680): Homolog of NCBI NO: 23452226 NR Description: alkaline alpha-galactosidase seed imbibition
  misc_feature (707)..(771): Homolog of NCBI NO: 29838629 NR Description: alkaline alpha galactosidase I [Cucumis melo]
  misc_feature (1)..(684): Homolog of NCBI NO: 29838629 NR Description: alkaline alpha galactosidase I [Cucumis melo]
  misc_feature (712)..(773): Homolog of NCBI NO: 282994 NR Description: Sip1 protein - barley
  misc_feature (1)..(689): Homolog of NCBI NO: 282994 NR Description: Sip1 protein - barley
  misc_feature (714)..(769): Homolog of NCBI NO: 30687712 NR Description: glycosyl hydrolase family 36 [Arabidopsis
  misc_feature (1)..(680): Homolog of NCBI NO: 30687712 NR Description: glycosyl hydrolase family 36 [Arabidopsis
  misc_feature (706)..(771): Homolog of NCBI NO: 15222768 NR Description: glycosyl hydrolase family 36; protein id:
  misc_feature (1)..(680): Homolog of NCBI NO: 15222768 NR Description: glycosyl hydrolase family 36; protein id:
  misc_feature (713)..(771): Homolog of NCBI NO: 23452226 NR Description: alkaline alpha-galactosidase seed imbibition
  misc_feature (1)..(680): Homolog of NCBI NO: 23452226 NR Description: alkaline alpha-galactosidase seed imbibition
  misc_feature (707)..(771): Homolog of NCBI NO: 29838629 NR Description: alkaline alpha galactosidase I [Cucumis melo]
  misc_feature (1)..(684): Homolog of NCBI NO: 29838629 NR Description: alkaline alpha galactosidase I [Cucumis melo]
  misc_feature (712)..(773): Homolog of NCBI NO: 282994 NR Description: Sip1 protein - barley
  misc_feature (1)..(689): Homolog of NCBI NO: 282994 NR Description: Sip1 protein - barley
  misc_feature (714)..(769): Homolog of NCBI NO: 30687712 NR Description: glycosyl hydrolase family 36 [Arabidopsis
  misc_feature (1)..(680): Homolog of NCBI NO: 30687712 NR Description: glycosyl hydrolase family 36 [Arabidopsis
  misc_feature (706)..(771): Homolog of NCBI NO: 15222768 NR Description: glycosyl hydrolase family 36; protein id:
  misc_feature (1)..(680): Homolog of NCBI NO: 15222768 NR Description: glycosyl hydrolase family 36; protein id:
  misc_feature (713)..(771): Homolog of NCBI NO: 23452226 NR Description: alkaline alpha-galactosidase seed imbibition
  misc_feature (1)..(680): Homolog of NCBI NO: 23452226 NR Description: alkaline alpha-galactosidase seed imbibition
  misc_feature (707)..(771): Homolog of NCBI NO: 29838629 NR Description: alkaline alpha galactosidase I [Cucumis melo]
  misc_feature (1)..(684): Homolog of NCBI NO: 29838629 NR Description: alkaline alpha galactosidase I [Cucumis melo]
  misc_feature (712)..(773): Homolog of NCBI NO: 282994 NR Description: Sip1 protein - barley
  misc_feature (1)..(689): Homolog of NCBI NO: 282994 NR Description: Sip1 protein - barley
MTITSNISVQNDNLVVQGKTILTKIPDNIILTPVTGNGFVSGSFIGATFEQSKSLHVFPIGVLEGLRFMCCFRFKLWWMTQRMGSCGKDIPLETQFMLLESKDEVEGNGDDAPTVYTVFLPLLEGQFRAVLQGNEKNEIEICFESGDKAVETSQGTHLVYVHAGTNPFEVIRQSVKAVERHMQTFHHREKKKLPSFLDWFGWCTWDAFYTDVTAEGVDEGLKSLSEGGTPPKFLIIDDGWQQIENKEKDENCVVQEGAQFATRLVGIKENAKFQKSDQKDTQVSGLKSVVDNAKQRHNVKQVYAWHALAGYWGGVKPAASGMEHYDSALAYPVQSPGVLGNQPDIVMDSLAVHGLGLVNPKKVFNFYNELHSYLASCGIDGVKVDVQNIIETLGAGLGGRVSLTRSYQQALEASIARNFTDNGCISCMCHNTDGLYSAKQTAIVRASDDFYPRDPASHTIHIASVAYNSLFLGEFMQPDWDMFHSLHPTAEYHAAARAVGGCAIYVSDKPGNHNFDLLRKLVLPDGSVLRAKLPGRPTRDCLFADPARDGISLLKIWNMNKFTGIVGVFNCQGAGWCKETKKNQIHDTSPGTLTGSIRADDADLISQVAGEDWSGDSIVYAYRSGEVVRLPKGASIPLTLKVLEYELFHISPLKEITENISFAPIGLVDMFNSSGAIESIDINHVTDKNPEFFDGEISSASPALSDNRSPTALVSVSVRGCGRFGAYSSQRPLKCAVESTETDFTYDAEVGLVTLNLPVTREEMFRWHVEILV

SEQ ID NO: 44954 - protein, 705 aa, Arabidopsis thaliana
  peptide (1)..(705): Ceres Seq. ID no. 12600113
  misc_feature (646)..(701): Homolog of NCBI NO: 30687712 NR Description: glycosyl hydrolase family 36 [Arabidopsis
  misc_feature (1)..(612): Homolog of NCBI NO: 30687712 NR Description: glycosyl hydrolase family 36 [Arabidopsis
  misc_feature (638)..(703): Homolog of NCBI NO: 15222768 NR Description: glycosyl hydrolase family 36; protein id:
  misc_feature (1)..(612): Homolog of NCBI NO: 15222768 NR Description: glycosyl hydrolase family 36; protein id:
  misc_feature (645)..(703): Homolog of NCBI NO: 23452226 NR Description: alkaline alpha-galactosidase seed imbibition
  misc_feature (1)..(612): Homolog of NCBI NO: 23452226 NR Description: alkaline alpha-galactosidase seed imbibition
  misc_feature (639)..(703): Homolog of NCBI NO: 29838629 NR Description: alkaline alpha galactosidase I [Cucumis melo]
  misc_feature (1)..(616): Homolog of NCBI NO: 29838629 NR Description: alkaline alpha galactosidase I [Cucumis melo]
  misc_feature (644)..(705): Homolog of NCBI NO: 282994 NR Description: Sip1 protein - barley
  misc_feature (1)..(621): Homolog of NCBI NO: 282994 NR Description: Sip1 protein - barley
  misc_feature (646)..(701): Homolog of NCBI NO: 30687712 NR Description: glycosyl hydrolase family 36 [Arabidopsis
  misc_feature (1)..(612): Homolog of NCBI NO: 30687712 NR Description: glycosyl hydrolase family 36 [Arabidopsis
  misc_feature (638)..(703): Homolog of NCBI NO: 15222768 NR Description: glycosyl hydrolase family 36; protein id:
  misc_feature (1)..(612): Homolog of NCBI NO: 15222768 NR Description: glycosyl hydrolase family 36; protein id:
  misc_feature (645)..(703): Homolog of NCBI NO: 23452226 NR Description: alkaline alpha-galactosidase seed imbibition
  misc_feature (1)..(612): Homolog of NCBI NO: 23452226 NR Description: alkaline alpha-galactosidase seed imbibition
  misc_feature (639)..(703): Homolog of NCBI NO: 29838629 NR Description: alkaline alpha galactosidase I [Cucumis melo]
  misc_feature (1)..(616): Homolog of NCBI NO: 29838629 NR Description: alkaline alpha galactosidase I [Cucumis melo]
  misc_feature (644)..(705): Homolog of NCBI NO: 282994 NR Description: Sip1 protein - barley
  misc_feature (1)..(621): Homolog of NCBI NO: 282994 NR Description: Sip1 protein - barley
  misc_feature (646)..(701): Homolog of NCBI NO: 30687712 NR Description: glycosyl hydrolase family 36 [Arabidopsis
  misc_feature (1)..(612): Homolog of NCBI NO: 30687712 NR Description: glycosyl hydrolase family 36 [Arabidopsis
  misc_feature (638)..(703): Homolog of NCBI NO: 15222768 NR Description: glycosyl hydrolase family 36; protein id:
  misc_feature (1)..(612): Homolog of NCBI NO: 15222768 NR Description: glycosyl hydrolase family 36; protein id:
  misc_feature (645)..(703): Homolog of NCBI NO: 23452226 NR Description: alkaline alpha-galactosidase seed imbibition
  misc_feature (1)..(612): Homolog of NCBI NO: 23452226 NR Description: alkaline alpha-galactosidase seed imbibition
  misc_feature (639)..(703): Homolog of NCBI NO: 29838629 NR Description: alkaline alpha galactosidase I [Cucumis melo]
  misc_feature (1)..(616): Homolog of NCBI NO: 29838629 NR Description: alkaline alpha galactosidase I [Cucumis melo]
  misc_feature (644)..(705): Homolog of NCBI NO: 282994 NR Description: Sip1 protein - barley
  misc_feature (1)..(621): Homolog of NCBI NO: 282994 NR Description: Sip1 protein - barley
MCCFRFKLWWMTQRMGSCGKDIPLETQFMLLESKDEVEGNGDDAPTVYTVFLPLLEGQFRAVLQGNEKNEIEICFESGDKAVETSQGTHLVYVHAGTNPFEVIRQSVKAVERHMQTFHHREKKKLPSFLDWFGWCTWDAFYTDVTAEGVDEGLKSLSEGGTPPKFLIIDDGWQQIENKEKDENCVVQEGAQFATRLVGIKENAKFQKSDQKDTQVSGLKSVVDNAKQRHNVKQVYAWHALAGYWGGVKPAASGMEHYDSALAYPVQSPGVLGNQPDIVMDSLAVHGLGLVNPKKVFNFYNELHSYLASCGIDGVKVDVQNIIETLGAGLGGRVSLTRSYQQALEASIARNFTDNGCISCMCHNTDGLYSAKQTAIVRASDDFYPRDPASHTIHIASVAYNSLFLGEFMQPDWDMFHSLHPTAEYHAAARAVGGCAIYVSDKPGNHNFDLLRKLVLPDGSVLRAKLPGRPTRDCLFADPARDGISLLKIWNMNKFTGIVGVFNCQGAGWCKETKKNQIHDTSPGTLTGSIRADDADLISQVAGEDWSGDSIVYAYRSGEVVRLPKGASIPLTLKVLEYELFHISPLKEITENISFAPIGLVDMFNSSGAIESIDINHVTDKNPEFFDGEISSASPALSDNRSPTALVSVSVRGCGRFGAYSSQRPLKCAVESTETDFTYDAEVGLVTLNLPVTREEMFRWHVEILV

SEQ ID NO: 44955 - protein, 695 aa, Arabidopsis thaliana
  peptide (1)..(695): Ceres Seq. ID no. 12600114
  misc_feature (636)..(691): Homolog of NCBI NO: 30687712 NR Description: glycosyl hydrolase family 36 [Arabidopsis
  misc_feature (1)..(602): Homolog of NCBI NO: 30687712 NR Description: glycosyl hydrolase family 36 [Arabidopsis
  misc_feature (628)..(693): Homolog of NCBI NO: 15222768 NR Description: glycosyl hydrolase family 36; protein id:
  misc_feature (1)..(602): Homolog of NCBI NO: 15222768 NR Description: glycosyl hydrolase family 36; protein id:
  misc_feature (635)..(693): Homolog of NCBI NO: 23452226 NR Description: alkaline alpha-galactosidase seed imbibition
  misc_feature (1)..(602): Homolog of NCBI NO: 23452226 NR Description: alkaline alpha-galactosidase seed imbibition
  misc_feature (629)..(693): Homolog of NCBI NO: 29838629 NR Description: alkaline alpha galactosidase I [Cucumis melo]
  misc_feature (1)..(606): Homolog of NCBI NO: 29838629 NR Description: alkaline alpha galactosidase I [Cucumis melo]
  misc_feature (634)..(695): Homolog of NCBI NO: 282994 NR Description: Sip1 protein - barley
  misc_feature (1)..(611): Homolog of NCBI NO: 282994 NR Description: Sip1 protein - barley
  misc_feature (636)..(691): Homolog of NCBI NO: 30687712 NR Description: glycosyl hydrolase family 36 [Arabidopsis
  misc_feature (1)..(602): Homolog of NCBI NO: 30687712 NR Description: glycosyl hydrolase family 36 [Arabidopsis
  misc_feature (628)..(693): Homolog of NCBI NO: 15222768 NR Description: glycosyl hydrolase family 36; protein id:
  misc_feature (1)..(602): Homolog of NCBI NO: 15222768 NR Description: glycosyl hydrolase family 36; protein id:
  misc_feature (635)..(693): Homolog of NCBI NO: 23452226 NR Description: alkaline alpha-galactosidase seed imbibition
  misc_feature (1)..(602): Homolog of NCBI NO: 23452226 NR Description: alkaline alpha-galactosidase seed imbibition
  misc_feature (629)..(693): Homolog of NCBI NO: 29838629 NR Description: alkaline alpha galactosidase I [Cucumis melo]
  misc_feature (1)..(606): Homolog of NCBI NO: 29838629 NR Description: alkaline alpha galactosidase I [Cucumis melo]
  misc_feature (634)..(695): Homolog of NCBI NO: 282994 NR Description: Sip1 protein - barley
  misc_feature (1)..(611): Homolog of NCBI NO: 282994 NR Description: Sip1 protein - barley
  misc_feature (636)..(691): Homolog of NCBI NO: 30687712 NR Description: glycosyl hydrolase family 36 [Arabidopsis
  misc_feature (1)..(602): Homolog of NCBI NO: 30687712 NR Description: glycosyl hydrolase family 36 [Arabidopsis
  misc_feature (628)..(693): Homolog of NCBI NO: 15222768 NR Description: glycosyl hydrolase family 36; protein id:
  misc_feature (1)..(602): Homolog of NCBI NO: 15222768 NR Description: glycosyl hydrolase family 36; protein id:
  misc_feature (635)..(693): Homolog of NCBI NO: 23452226 NR Description: alkaline alpha-galactosidase seed imbibition
  misc_feature (1)..(602): Homolog of NCBI NO: 23452226 NR Description: alkaline alpha-galactosidase seed imbibition
  misc_feature (629)..(693): Homolog of NCBI NO: 29838629 NR Description: alkaline alpha galactosidase I [Cucumis melo]
  misc_feature (1)..(606): Homolog of NCBI NO: 29838629 NR Description: alkaline alpha galactosidase I [Cucumis melo]
  misc_feature (634)..(695): Homolog of NCBI NO: 282994 NR Description: Sip1 protein - barley
  misc_feature (1)..(611): Homolog of NCBI NO: 282994 NR Description: Sip1 protein - barley
MTQRMGSCGKDIPLETQFMLLESKDEVEGNGDDAPTVYTVFLPLLEGQFRAVLQGNEKNEIEICFESGDKAVETSQGTHLVYVHAGTNPFEVIRQSVKAVERHMQTFHHREKKKLPSFLDWFGWCTWDAFYTDVTAEGVDEGLKSLSEGGTPPKFLIIDDGWQQIENKEKDENCVVQEGAQFATRLVGIKENAKFQKSDQKDTQVSGLKSVVDNAKQRHNVKQVYAWHALAGYWGGVKPAASGMEHYDSALAYPVQSPGVLGNQPDIVMDSLAVHGLGLVNPKKVFNFYNELHSYLASCGIDGVKVDVQNIIETLGAGLGGRVSLTRSYQQALEASIARNFTDNGCISCMCHNTDGLYSAKQTAIVRASDDFYPRDPASHTIHIASVAYNSLFLGEFMQPDWDMFHSLHPTAEYHAAARAVGGCAIYVSDKPGNHNFDLLRKLVLPDGSVLRAKLPGRPTRDCLFADPARDGISLLKIWNMNKFTGIVGVFNCQGAGWCKETKKNQIHDTSPGTLTGSIRADDADLISQVAGEDWSGDSIVYAYRSGEVVRLPKGASIPLTLKVLEYELFHISPLKEITENISFAPIGLVDMFNSSGAIESIDINHVTDKNPEFFDGEISSASPALSDNRSPTALVSVSVRGCGRFGAYSSQRPLKCAVESTETDFTYDAEVGLVTLNLPVTREEMFRWHVEILV

SEQ ID NO: 44956 - DNA, 2611 bp, Arabidopsis thaliana
  misc_feature (1)..(2611): Ceres Seq. ID no. 13591498
  misc_feature: MA Experiment ID: 20000179 Result: Down-regulated in Transcription
  misc_feature: MA Experiment 20000179 PARAMETER Experiment Name: At_Germinating_Seeds_P Parameter: Age (hr) Value: 6 vs. 0
  misc_feature: MA Experiment 20000179 PARAMETER Experiment Name: At_Germinating_Seeds_P Parameter: Tissue Value: Germinating Seeds
  misc_feature: MA Experiment ID: 20000180 Result: Down-regulated in Transcription
  misc_feature: MA Experiment 20000180 PARAMETER Experiment Name: At_Germinating_Seeds_P Parameter: Age (hr) Value: 24 vs. 0
  misc_feature: MA Experiment 20000180 PARAMETER Experiment Name: At_Germinating_Seeds_P Parameter: Tissue Value: Germinating Seeds
  misc_feature: MA Experiment ID: 20000184 Result: Up-regulated in Transcription
  misc_feature: MA Experiment 20000184 PARAMETER Experiment Name: At_Shoots__P Parameter: Age (day) Value: 7
  misc_feature: MA Experiment 20000184 PARAMETER Experiment Name: At_Shoots__P Parameter: Tissue Value: Shoots vs. Whole Plant
  misc_feature: MA Experiment ID: 20000234 Result: Up-regulated in Transcription
  misc_feature: MA Experiment 20000234 PARAMETER Experiment Name: At_Siliques_P Parameter: Age (day) Value: 21
  misc_feature: MA Experiment 20000234 PARAMETER Experiment Name: At_Siliques_P Parameter: Organism Value: A. thaliana
  misc_feature: MA Experiment 20000234 PARAMETER Experiment Name: At_Siliques_P Parameter: Plant Line Value: WS
  misc_feature: MA Experiment 20000234 PARAMETER Experiment Name: At_Siliques_P Parameter: Tissue Value: Less Than 5mm Siliques vs. Whole Plant
  misc_feature: MA Experiment ID: 20000235 Result: Up-regulated in Transcription
  misc_feature: MA Experiment 20000235 PARAMETER Experiment Name: At_Siliques_P Parameter: Age (day) Value: 21
  misc_feature: MA Experiment 20000235 PARAMETER Experiment Name: At_Siliques_P Parameter: Organism Value: A. thaliana
  misc_feature: MA Experiment 20000235 PARAMETER Experiment Name: At_Siliques_P Parameter: Plant Line Value: WS
  misc_feature: MA Experiment 20000235 PARAMETER Experiment Name: At_Siliques_P Parameter: Tissue Value: 5-10mm Siliques vs. Whole Plant
  misc_feature: MA Experiment ID: 20000794 Result: Up-regulated in Transcription
  misc_feature: MA Experiment 20000794 PARAMETER Experiment Name: At_Petals_P Parameter: Age (day) Value: 23-25 days
  misc_feature: MA Experiment 20000794 PARAMETER Experiment Name: At_Petals_P Parameter: Plant Line Value: WS
  misc_feature: MA Experiment 20000794 PARAMETER Experiment Name: At_Petals_P Parameter: Tissue Value: Petals vs. Whole plant
  misc_feature: MA Experiment ID: 20001757 Result: Down-regulated in Transcription
  misc_feature: MA Experiment 20001757 PARAMETER Experiment Name: At_50mM_NH4NO3_L-to-H_P Parameter: Timepoint (hr) Value: 6
  misc_feature: MA Experiment 20001757 PARAMETER Experiment Name: At_50mM_NH4NO3_L-to-H_P Parameter: Tissue Value: Leaf
  misc_feature: MA Experiment 20001757 PARAMETER Experiment Name: At_50mM_NH4NO3_L-to-H_P Parameter: Treatment Value: 50mM NH4NO3 vs 100mM Mannitol
agtctctctaatgattccttcgtacgcatcctcatcttcttcttcttctctcttctactgtatttaaacactctctcgtcttctccttggatccagagagagacacaacacaccatctcaatcatgtcttcttcgtttctctcctccactgctttcttcctcctcctttgtctaggattctgccacgtgtcctcttcctcctccgaccaaggaacttacatcgttcacatggctaaatctcagatgccgtcgtctttcgacctccactctaactggtacgattcatctctcagatctatctccgactcagccgaattgctctacacttacgagaacgcgattcatggattctcaacacggctaactcaagaagaagccgactcgctcatgactcaacctggtgttatctccgttttaccggagcaccgttacgagctacacaccactcgtactcctctcttcctcggtctcgacgaacacaccgcagatctgttccctgaagccggctcttacagcgacgtcgtcgtcggagttctcgataccggagtttggcccgagagtaaaagctactccgacgaaggattcggtcctattccttcctcctggaaaggcggatgcgaggccggaaccaatttcaccgcttctctctgtaaccgtaaactaatcggagcaagattcttcgctcgtggttacgaatcaacgatgggaccaatcgatgaatctaaagaatcaagatctcctagagacgacgacggtcacggaactcacacctcatcgaccgccgctggatccgtcgttgaaggagctagcttattaggctacgcttcaggaacagctcgtggtatggctccacgcgctcgtgtcgctgtttacaaagtctgttggctcggtggttgtttcagctcagatattttagctgcaatcgataaagccatcgccgataacgtcaatgtcctgtcgatgtcactcggcggtggaatgtcggattattatagagacggtgttgcgatcggagcattcgccgccatggaaagagggattttagtatcttgctcagctggtaatgctggtccgagtagttctagtttatcaaacgtagctccatggatcacaactgttggtgctggtactttagatcgtgattttccggcgcttgcgattctcggtaacggcaagaatttcaccggagtttctttgtttaaaggagaagctttaccggataaattgttgccgtttatttacgctgggaatgctagtaatgctactaatggtaatctctgtatgaccggaactttgatcccggagaaagtaaaggggaagattgtgatgtgtgatagaggaattaatgctagagttcagaaaggtgatgtggttaaagcagcaggtggagttggaatgattctggctaacactgcggcgaatggtgaagagcttgttgcggatgctcatttgttaccggcgaccaccgttggtgaaaaagccggtgatataatccggcattacgtgactactgatcctaatcccaccgcttcgatttcaatcttaggaacagtcgtcggtgttaaaccatctccggttgtcgcagcgtttagctcacgtggaccgaattcgattacaccgaatattcttaaaccggatctgatcgctcctggagtaaacatcctcgccgcgtggaccggtgctgctggaccaaccggactcgcttccgattctcgccgcgtggagttcaatatcatctctgggacgtcgatgtcttgccctcacgttagtggtttagcggcgcttctcaagtcggtgcatcctgaatggagcccggcggcgattagatcggcgcttatgaccaccgcttacaaaacctacaaagacggtaaaccgttactcgacatcgcgacagggaagccttcgacgccgttcgatcacggtgcaggacacgtgtcaccaacaactgccactaatccaggactcatctacgatctaacgacggaggattacttaggcttcctctgcgcattgaattacacatcgccgcaaattcgaagtgtctcgagacgtaattacacttgcgatccgagtaaatcgtactcggtcgctgatttgaactacccgtcgttcgccgttaacgttgatggagtcggtgcgtataagtacacgcgcacggtgacgagcgtgggaggagctgggacttactcggttaaagtaacttcggagacgacaggagtcaagatttcggttgaaccggcggttttgaatttcaaggaagctaacgagaaaaaatcgtatacggtgacgtttactgtagactcgtcgaagccgtctggatctaacagctttgggagtattgaatggtcggatgggaaacacgtggtgggaagtcccgtggcgattagctggacatagtcgtaaattatgagaaatgaaaggggttttatggaaaagaaaaggtgtttacagatttattgtaatgccgtttttagatacgaagaaacctctgtttagcaaaaacgacatgcagtctgttaagacttgcctagtttgtttttgggatgtcttgctgtttttaattttaaaaagaaatatattctccggctacaacagtagctgggtctctcta

SEQ ID NO: 44957 - protein, 798 aa, Arabidopsis thaliana
  peptide (1)..(798): Ceres Seq. ID no. 13591499
  misc_feature (403)..(502): Pfam Name: PA domain Pfam Description: PA domain
  misc_feature (403)..(502): Pfam Name: PA domain Pfam Description: PA domain
  misc_feature (403)..(502): Pfam Name: PA domain Pfam Description: PA domain
  misc_feature (403)..(502): Pfam Name: PA domain Pfam Description: PA domain
  misc_feature (403)..(502): Pfam Name: PA domain Pfam Description: PA domain
  misc_feature (106)..(796): Homolog of NCBI NO: 24414066 NR Description: OJ1136_A10.14 [Oryza sativa (japonica
  misc_feature (35)..(795): Homolog of NCBI NO: 30697281 NR Description: subtilisin-like serine protease [Arabidopsis
  misc_feature (46)..(797): Homolog of NCBI NO: 30678198 NR Description: subtilisin-like serine protease, putative
  misc_feature (243)..(798): Homolog of NCBI NO: 29786399 NR Description: putative serine protease [Populus euramericana]
  misc_feature (42)..(797): Homolog of NCBI NO: 7435656 NR Description: subtilisin-like proteinase (EC 3.4.21.-) 2 -
  misc_feature (106)..(796): Homolog of NCBI NO: 24414066 NR Description: OJ1136_A10.14 [Oryza sativa (japonica
  misc_feature (46)..(797): Homolog of NCBI NO: 30678198 NR Description: subtilisin-like serine protease, putative
  misc_feature (42)..(797): Homolog of NCBI NO: 7435656 NR Description: subtilisin-like proteinase (EC 3.4.21.-) 2 -
  misc_feature (243)..(798): Homolog of NCBI NO: 29786399 NR Description: putative serine protease [Populus euramericana]
  misc_feature (46)..(797): Homolog of NCBI NO: 30678198 NR Description: subtilisin-like serine protease, putative
  misc_feature (35)..(795): Homolog of NCBI NO: 30697281 NR Description: subtilisin-like serine protease [Arabidopsis
  misc_feature (106)..(796): Homolog of NCBI NO: 24414066 NR Description: OJ1136_A10.14 [Oryza sativa (japonica
  misc_feature (52)..(798): Homolog of NCBI NO: 7435657 NR Description: subtilisin-like proteinase (EC 3.4.21.-) 1 -
  misc_feature (69)..(798): Homolog of NCBI NO: 14488360 NR Description: putative serine protease [Oryza sativa (japonica
  misc_feature (42)..(797): Homolog of NCBI NO: 18396193 NR Description: subtilisin-like serine protease, putative
  misc_feature (42)..(797): Homolog of NCBI NO: 22331076 NR Description: subtilisin-like serine protease, putative
  misc_feature (68)..(797): Homolog of NCBI NO: 18423316 NR Description: subtilisin-like serine protease [Arabidopsis
  misc_feature (106)..(796): Homolog of NCBI NO: 24414066 NR Description: OJ1136_A10.14 [Oryza sativa (japonica
  misc_feature (52)..(798): Homolog of NCBI NO: 7435657 NR Description: subtilisin-like proteinase (EC 3.4.21.-) 1 -
  misc_feature (69)..(798): Homolog of NCBI NO: 14488360 NR Description: putative serine protease [Oryza sativa (japonica
  misc_feature (42)..(797): Homolog of NCBI NO: 18396193 NR Description: subtilisin-like serine protease, putative
  misc_feature (42)..(797): Homolog of NCBI NO: 22331076 NR Description: subtilisin-like serine protease, putative
  misc_feature (68)..(797): Homolog of NCBI NO: 18423316 NR Description: subtilisin-like serine protease [Arabidopsis
  misc_feature (42)..(797): Homolog of NCBI NO: 7435656 NR Description: subtilisin-like proteinase (EC 3.4.21.-) 2 -
  misc_feature (243)..(798): Homolog of NCBI NO: 29786399 NR Description: putative serine protease [Populus euramericana]
  misc_feature (46)..(797): Homolog of NCBI NO: 30678198 NR Description: subtilisin-like serine protease, putative
  misc_feature (52)..(798): Homolog of NCBI NO: 7435657 NR Description: subtilisin-like proteinase (EC 3.4.21.-) 1 -
  misc_feature (69)..(798): Homolog of NCBI NO: 14488360 NR Description: putative serine protease [Oryza sativa (japonica
  misc_feature (42)..(797): Homolog of NCBI NO: 18396193 NR Description: subtilisin-like serine protease, putative
  misc_feature (42)..(797): Homolog of NCBI NO: 22331076 NR Description: subtilisin-like serine protease, putative
  misc_feature (68)..(797): Homolog of NCBI NO: 18423316 NR Description: subtilisin-like serine protease [Arabidopsis
  misc_feature (42)..(797): Homolog of NCBI NO: 7435656 NR Description: subtilisin-like proteinase (EC 3.4.21.-) 2 -
  misc_feature (243)..(798): Homolog of NCBI NO: 29786399 NR Description: putative serine protease [Populus euramericana]
  misc_feature (46)..(797): Homolog of NCBI NO: 30678198 NR Description: subtilisin-like serine protease, putative
  misc_feature (35)..(795): Homolog of NCBI NO: 30697281 NR Description: subtilisin-like serine protease [Arabidopsis
  misc_feature (35)..(795): Homolog of NCBI NO: 30697281 NR Description: subtilisin-like serine protease [Arabidopsis
  misc_feature (106)..(796): Homolog of NCBI NO: 24414066 NR Description: OJ1136_A10.14 [Oryza sativa (japonica
  misc_feature (52)..(798): Homolog of NCBI NO: 7435657 NR Description: subtilisin-like proteinase (EC 3.4.21.-) 1 -
  misc_feature (69)..(798): Homolog of NCBI NO: 14488360 NR Description: putative serine protease [Oryza sativa (japonica
  misc_feature (42)..(797): Homolog of NCBI NO: 18396193 NR Description: subtilisin-like serine protease, putative
  misc_feature (42)..(797): Homolog of NCBI NO: 22331076 NR Description: subtilisin-like serine protease, putative
  misc_feature (68)..(797): Homolog of NCBI NO: 18423316 NR Description: subtilisin-like serine protease [Arabidopsis
  misc_feature (42)..(797): Homolog of NCBI NO: 7435656 NR Description: subtilisin-like proteinase (EC 3.4.21.-) 2 -
  misc_feature (243)..(798): Homolog of NCBI NO: 29786399 NR Description: putative serine protease [Populus euramericana]
  misc_feature (35)..(795): Homolog of NCBI NO: 30697281 NR Description: subtilisin-like serine protease [Arabidopsis
  misc_feature (68)..(797): Homolog of NCBI NO: 18423316 NR Description: subtilisin-like serine protease [Arabidopsis
  misc_feature (42)..(797): Homolog of NCBI NO: 22331076 NR Description: subtilisin-like serine protease, putative
  misc_feature (42)..(797): Homolog of NCBI NO: 18396193 NR Description: subtilisin-like serine protease, putative
  misc_feature (69)..(798): Homolog of NCBI NO: 14488360 NR Description: putative serine protease [Oryza sativa (japonica
  misc_feature (52)..(798): Homolog of NCBI NO: 7435657 NR Description: subtilisin-like proteinase (EC 3.4.21.-) 1 -
SLSNDSFVRILIFFFFSLLLYLNTLSSSPWIQRETQHTISIMSSSFLSSTAFFLLLCLGFCHVSSSSSDQGTYIVHMAKSQMPSSFDLHSNWYDSSLRSISDSAELLYTYENAIHGFSTRLTQEEADSLMTQPGVISVLPEHRYELHTTRTPLFLGLDEHTADLFPEAGSYSDVVVGVLDTGVWPESKSYSDEGFGPIPSSWKGGCEAGTNFTASLCNRKLIGARFFARGYESTMGPIDESKESRSPRDDDGHGTHTSSTAAGSVVEGASLLGYASGTARGMAPRARVAVYKVCWLGGCFSSDILAAIDKAIADNVNVLSMSLGGGMSDYYRDGVAIGAFAAMERGILVSCSAGNAGPSSSSLSNVAPWITTVGAGTLDRDFPALAILGNGKNFTGVSLFKGEALPDKLLPFIYAGNASNATNGNLCMTGTLIPEKVKGKIVMCDRGINARVQKGDVVKAAGGVGMILANTAANGEELVADAHLLPATTVGEKAGDIIRHYVTTDPNPTASISILGTVVGVKPSPVVAAFSSRGPNSITPNILKPDLIAPGVNILAAWTGAAGPTGLASDSRRVEFNIISGTSMSCPHVSGLAALLKSVHPEWSPAAIRSALMTTAYKTYKDGKPLLDIATGKPSTPFDHGAGHVSPTTATNPGLIYDLTTEDYLGFLCALNYTSPQIRSVSRRNYTCDPSKSYSVADLNYPSFAVNVDGVGAYKYTRTVTSVGGAGTYSVKVTSETTGVKISVEPAVLNFKEANEKKSYTVTFTVDSSKPSGSNSFGSIEWSDGKHVVGSPVAISWT

SEQ ID NO: 44958 - protein, 757 aa, Arabidopsis thaliana
  peptide (1)..(757): Ceres Seq. ID no. 13591500
  misc_feature (362)..(461): Pfam Name: PA domain Pfam Description: PA domain
  misc_feature (362)..(461): Pfam Name: PA domain Pfam Description: PA domain
  misc_feature (362)..(461): Pfam Name: PA domain Pfam Description: PA domain
  misc_feature (362)..(461): Pfam Name: PA domain Pfam Description: PA domain
  misc_feature (362)..(461): Pfam Name: PA domain Pfam Description: PA domain
  misc_feature (65)..(755): Homolog of NCBI NO: 24414066 NR Description: OJ1136_A10.14 [Oryza sativa (japonica
  misc_feature (1)..(754): Homolog of NCBI NO: 30697281 NR Description: subtilisin-like serine protease [Arabidopsis
  misc_feature (5)..(756): Homolog of NCBI NO: 30678198 NR Description: subtilisin-like serine protease, putative
  misc_feature (202)..(757): Homolog of NCBI NO: 29786399 NR Description: putative serine protease [Populus euramericana]
  misc_feature (1)..(756): Homolog of NCBI NO: 7435656 NR Description: subtilisin-like proteinase (EC 3.4.21.-) 2 -
  misc_feature (65)..(755): Homolog of NCBI NO: 24414066 NR Description: OJ1136_A10.14 [Oryza sativa (japonica
  misc_feature (5)..(756): Homolog of NCBI NO: 30678198 NR Description: subtilisin-like serine protease, putative
  misc_feature (1)..(756): Homolog of NCBI NO: 7435656 NR Description: subtilisin-like proteinase (EC 3.4.21.-) 2 -
  misc_feature (202)..(757): Homolog of NCBI NO: 29786399 NR Description: putative serine protease [Populus euramericana]
  misc_feature (5)..(756): Homolog of NCBI NO: 30678198 NR Description: subtilisin-like serine protease, putative
  misc_feature (1)..(754): Homolog of NCBI NO: 30697281 NR Description: subtilisin-like serine protease [Arabidopsis
  misc_feature (65)..(755): Homolog of NCBI NO: 24414066 NR Description: OJ1136_A10.14 [Oryza sativa (japonica
  misc_feature (11)..(757): Homolog of NCBI NO: 7435657 NR Description: subtilisin-like proteinase (EC 3.4.21.-) 1 -
  misc_feature (28)..(757): Homolog of NCBI NO: 14488360 NR Description: putative serine protease [Oryza sativa (japonica
  misc_feature (1)..(756): Homolog of NCBI NO: 18396193 NR Description: subtilisin-like serine protease, putative
  misc_feature (1)..(756): Homolog of NCBI NO: 22331076 NR Description: subtilisin-like serine protease, putative
  misc_feature (27)..(756): Homolog of NCBI NO: 18423316 NR Description: subtilisin-like serine protease [Arabidopsis
  misc_feature (65)..(755): Homolog of NCBI NO: 24414066 NR Description: OJ1136_A10.14 [Oryza sativa (japonica
  misc_feature (11)..(757): Homolog of NCBI NO: 7435657 NR Description: subtilisin-like proteinase (EC 3.4.21.-) 1 -
  misc_feature (28)..(757): Homolog of NCBI NO: 14488360 NR Description: putative serine protease [Oryza sativa (japonica
  misc_feature (1)..(756): Homolog of NCBI NO: 18396193 NR Description: subtilisin-like serine protease, putative
  misc_feature (1)..(756): Homolog of NCBI NO: 22331076 NR Description: subtilisin-like serine protease, putative
  misc_feature (27)..(756): Homolog of NCBI NO: 18423316 NR Description: subtilisin-like serine protease [Arabidopsis
  misc_feature (1)..(756): Homolog of NCBI NO: 7435656 NR Description: subtilisin-like proteinase (EC 3.4.21.-) 2 -
  misc_feature (202)..(757): Homolog of NCBI NO: 29786399 NR Description: putative serine protease [Populus euramericana]
  misc_feature (5)..(756): Homolog of NCBI NO: 30678198 NR Description: subtilisin-like serine protease, putative
  misc_feature (11)..(757): Homolog of NCBI NO: 7435657 NR Description: subtilisin-like proteinase (EC 3.4.21.-) 1 -
  misc_feature (28)..(757): Homolog of NCBI NO: 14488360 NR Description: putative serine protease [Oryza sativa (japonica
  misc_feature (1)..(756): Homolog of NCBI NO: 18396193 NR Description: subtilisin-like serine protease, putative
  misc_feature (1)..(756): Homolog of NCBI NO: 22331076 NR Description: subtilisin-like serine protease, putative
  misc_feature (27)..(756): Homolog of NCBI NO: 18423316 NR Description: subtilisin-like serine protease [Arabidopsis
  misc_feature (1)..(756): Homolog of NCBI NO: 7435656 NR Description: subtilisin-like proteinase (EC 3.4.21.-) 2 -
  misc_feature (202)..(757): Homolog of NCBI NO: 29786399 NR Description: putative serine protease [Populus euramericana]
  misc_feature (5)..(756): Homolog of NCBI NO: 30678198 NR Description: subtilisin-like serine protease, putative
  misc_feature (1)..(754): Homolog of NCBI NO: 30697281 NR Description: subtilisin-like serine protease [Arabidopsis
  misc_feature (1)..(754): Homolog of NCBI NO: 30697281 NR Description: subtilisin-like serine protease [Arabidopsis
  misc_feature (65)..(755): Homolog of NCBI NO: 24414066 NR Description: OJ1136_A10.14 [Oryza sativa (japonica
  misc_feature (11)..(757): Homolog of NCBI NO: 7435657 NR Description: subtilisin-like proteinase (EC 3.4.21.-) 1 -
  misc_feature (28)..(757): Homolog of NCBI NO: 14488360 NR Description: putative serine protease [Oryza sativa (japonica
  misc_feature (1)..(756): Homolog of NCBI NO: 18396193 NR Description: subtilisin-like serine protease, putative
  misc_feature (1)..(756): Homolog of NCBI NO: 22331076 NR Description: subtilisin-like serine protease, putative
  misc_feature (27)..(756): Homolog of NCBI NO: 18423316 NR Description: subtilisin-like serine protease [Arabidopsis
  misc_feature (1)..(756): Homolog of NCBI NO: 7435656 NR Description: subtilisin-like proteinase (EC 3.4.21.-) 2 -
  misc_feature (202)..(757): Homolog of NCBI NO: 29786399 NR Description: putative serine protease [Populus euramericana]
  misc_feature (1)..(754): Homolog of NCBI NO: 30697281 NR Description: subtilisin-like serine protease [Arabidopsis
  misc_feature (27)..(756): Homolog of NCBI NO: 18423316 NR Description: subtilisin-like serine protease [Arabidopsis
  misc_feature (1)..(756): Homolog of NCBI NO: 22331076 NR Description: subtilisin-like serine protease, putative
  misc_feature (1)..(756): Homolog of NCBI NO: 18396193 NR Description: subtilisin-like serine protease, putative
  misc_feature (28)..(757): Homolog of NCBI NO: 14488360 NR Description: putative serine protease [Oryza sativa (japonica
  misc_feature (11)..(757): Homolog of NCBI NO: 7435657 NR Description: subtilisin-like proteinase (EC 3.4.21.-) 1 -
MSSSFLSSTAFFLLLCLGFCHVSSSSSDQGTYIVHMAKSQMPSSFDLHSNWYDSSLRSISDSAELLYTYENAIHGFSTRLTQEEADSLMTQPGVISVLPEHRYELHTTRTPLFLGLDEHTADLFPEAGSYSDVVVGVLDTGVWPESKSYSDEGFGPIPSSWKGGCEAGTNFTASLCNRKLIGARFFARGYESTMGPIDESKESRSPRDDDGHGTHTSSTAAGSVVEGASLLGYASGTARGMAPRARVAVYKVCWLGGCFSSDILAAIDKAIADNVNVLSMSLGGGMSDYYRDGVAIGAFAAMERGILVSCSAGNAGPSSSSLSNVAPWITTVGAGTLDRDFPALAILGNGKNFTGVSLFKGEALPDKLLPFIYAGNASNATNGNLCMTGTLIPEKVKGKIVMCDRGINARVQKGDVVKAAGGVGMILANTAANGEELVADAHLLPATTVGEKAGDIIRHYVTTDPNPTASISILGTVVGVKPSPVVAAFSSRGPNSITPNILKPDLIAPGVNILAAWTGAAGPTGLASDSRRVEFNIISGTSMSCPHVSGLAALLKSVHPEWSPAAIRSALMTTAYKTYKDGKPLLDIATGKPSTPFDHGAGHVSPTTATNPGLIYDLTTEDYLGFLCALNYTSPQIRSVSRRNYTCDPSKSYSVADLNYPSFAVNVDGVGAYKYTRTVTSVGGAGTYSVKVTSETTGVKISVEPAVLNFKEANEKKSYTVTFTVDSSKPSGSNSFGSIEWSDGKHVVGSPVAISWT

SEQ ID NO: 44959 - protein, 722 aa, Arabidopsis thaliana
  peptide (1)..(722): Ceres Seq. ID no. 13591501
  misc_feature (327)..(426): Pfam Name: PA domain Pfam Description: PA domain
  misc_feature (327)..(426): Pfam Name: PA domain Pfam Description: PA domain
  misc_feature (327)..(426): Pfam Name: PA domain Pfam Description: PA domain
  misc_feature (327)..(426): Pfam Name: PA domain Pfam Description: PA domain
  misc_feature (327)..(426): Pfam Name: PA domain Pfam Description: PA domain
  misc_feature (30)..(720): Homolog of NCBI NO: 24414066 NR Description: OJ1136_A10.14 [Oryza sativa (japonica
  misc_feature (1)..(719): Homolog of NCBI NO: 30697281 NR Description: subtilisin-like serine protease [Arabidopsis
  misc_feature (1)..(721): Homolog of NCBI NO: 30678198 NR Description: subtilisin-like serine protease, putative
  misc_feature (167)..(722): Homolog of NCBI NO: 29786399 NR Description: putative serine protease [Populus euramericana]
  misc_feature (1)..(721): Homolog of NCBI NO: 7435656 NR Description: subtilisin-like proteinase (EC 3.4.21.-) 2 -
  misc_feature (30)..(720): Homolog of NCBI NO: 24414066 NR Description: OJ1136_A10.14 [Oryza sativa (japonica
  misc_feature (1)..(721): Homolog of NCBI NO: 30678198 NR Description: subtilisin-like serine protease, putative
  misc_feature (1)..(721): Homolog of NCBI NO: 7435656 NR Description: subtilisin-like proteinase (EC 3.4.21.-) 2 -
  misc_feature (167)..(722): Homolog of NCBI NO: 29786399 NR Description: putative serine protease [Populus euramericana]
  misc_feature (1)..(721): Homolog of NCBI NO: 30678198 NR Description: subtilisin-like serine protease, putative
  misc_feature (1)..(719): Homolog of NCBI NO: 30697281 NR Description: subtilisin-like serine protease [Arabidopsis
  misc_feature (30)..(720): Homolog of NCBI NO: 24414066 NR Description: OJ1136_A10.14 [Oryza sativa (japonica
  misc_feature (1)..(722): Homolog of NCBI NO: 7435657 NR Description: subtilisin-like proteinase (EC 3.4.21.-) 1 -
  misc_feature (1)..(722): Homolog of NCBI NO: 14488360 NR Description: putative serine protease [Oryza sativa (japonica
  misc_feature (1)..(721): Homolog of NCBI NO: 18396193 NR Description: subtilisin-like serine protease, putative
  misc_feature (1)..(721): Homolog of NCBI NO: 22331076 NR Description: subtilisin-like serine protease, putative
  misc_feature (1)..(721): Homolog of NCBI NO: 18423316 NR Description: subtilisin-like serine protease [Arabidopsis
  misc_feature (30)..(720): Homolog of NCBI NO: 24414066 NR Description: OJ1136_A10.14 [Oryza sativa (japonica
  misc_feature (1)..(722): Homolog of NCBI NO: 7435657 NR Description: subtilisin-like proteinase (EC 3.4.21.-) 1 -
  misc_feature (1)..(722): Homolog of NCBI NO: 14488360 NR Description: putative serine protease [Oryza sativa (japonica
  misc_feature (1)..(721): Homolog of NCBI NO: 18396193 NR Description: subtilisin-like serine protease, putative
  misc_feature (1)..(721): Homolog of NCBI NO: 22331076 NR Description: subtilisin-like serine protease, putative
  misc_feature (1)..(721): Homolog of NCBI NO: 18423316 NR Description: subtilisin-like serine protease [Arabidopsis
  misc_feature (1)..(721): Homolog of NCBI NO: 7435656 NR Description: subtilisin-like proteinase (EC 3.4.21.-) 2 -
  misc_feature (167)..(722): Homolog of NCBI NO: 29786399 NR Description: putative serine protease [Populus euramericana]
  misc_feature (1)..(721): Homolog of NCBI NO: 30678198 NR Description: subtilisin-like serine protease, putative
  misc_feature (1)..(722): Homolog of NCBI NO: 7435657 NR Description: subtilisin-like proteinase (EC 3.4.21.-) 1 -
  misc_feature (1)..(722): Homolog of NCBI NO: 14488360 NR Description: putative serine protease [Oryza sativa (japonica
  misc_feature (1)..(721): Homolog of NCBI NO: 18396193 NR Description: subtilisin-like serine protease, putative
  misc_feature (1)..(721): Homolog of NCBI NO: 22331076 NR Description: subtilisin-like serine protease, putative
  misc_feature (1)..(721): Homolog of NCBI NO: 18423316 NR Description: subtilisin-like serine protease [Arabidopsis
  misc_feature (1)..(721): Homolog of NCBI NO: 7435656 NR Description: subtilisin-like proteinase (EC 3.4.21.-) 2 -
  misc_feature (167)..(722): Homolog of NCBI NO: 29786399 NR Description: putative serine protease [Populus euramericana]
  misc_feature (1)..(721): Homolog of NCBI NO: 30678198 NR Description: subtilisin-like serine protease, putative
  misc_feature (1)..(719): Homolog of NCBI NO: 30697281 NR Description: subtilisin-like serine protease [Arabidopsis
  misc_feature (1)..(719): Homolog of NCBI NO: 30697281 NR Description: subtilisin-like serine protease [Arabidopsis
  misc_feature (30)..(720): Homolog of NCBI NO: 24414066 NR Description: OJ1136_A10.14 [Oryza sativa (japonica
  misc_feature (1)..(722): Homolog of NCBI NO: 7435657 NR Description: subtilisin-like proteinase (EC 3.4.21.-) 1 -
  misc_feature (1)..(722): Homolog of NCBI NO: 14488360 NR Description: putative serine protease [Oryza sativa (japonica
  misc_feature (1)..(721): Homolog of NCBI NO: 18396193 NR Description: subtilisin-like serine protease, putative
  misc_feature (1)..(721): Homolog of NCBI NO: 22331076 NR Description: subtilisin-like serine protease, putative
  misc_feature (1)..(721): Homolog of NCBI NO: 18423316 NR Description: subtilisin-like serine protease [Arabidopsis
  misc_feature (1)..(721): Homolog of NCBI NO: 7435656 NR Description: subtilisin-like proteinase (EC 3.4.21.-) 2 -
  misc_feature (167)..(722): Homolog of NCBI NO: 29786399 NR Description: putative serine protease [Populus euramericana]
  misc_feature (1)..(719): Homolog of NCBI NO: 30697281 NR Description: subtilisin-like serine protease [Arabidopsis
  misc_feature (1)..(721): Homolog of NCBI NO: 18423316 NR Description: subtilisin-like serine protease [Arabidopsis
  misc_feature (1)..(721): Homolog of NCBI NO: 22331076 NR Description: subtilisin-like serine protease, putative
  misc_feature (1)..(721): Homolog of NCBI NO: 18396193 NR Description: subtilisin-like serine protease, putative
  misc_feature (1)..(722): Homolog of NCBI NO: 14488360 NR Description: putative serine protease [Oryza sativa (japonica
  misc_feature (1)..(722): Homolog of NCBI NO: 7435657 NR Description: subtilisin-like proteinase (EC 3.4.21.-) 1 -
MAKSQMPSSFDLHSNWYDSSLRSISDSAELLYTYENAIHGFSTRLTQEEADSLMTQPGVISVLPEHRYELHTTRTPLFLGLDEHTADLFPEAGSYSDVVVGVLDTGVWPESKSYSDEGFGPIPSSWKGGCEAGTNFTASLCNRKLIGARFFARGYESTMGPIDESKESRSPRDDDGHGTHTSSTAAGSVVEGASLLGYASGTARGMAPRARVAVYKVCWLGGCFSSDILAAIDKAIADNVNVLSMSLGGGMSDYYRDGVAIGAFAAMERGILVSCSAGNAGPSSSSLSNVAPWITTVGAGTLDRDFPALAILGNGKNFTGVSLFKGEALPDKLLPFIYAGNASNATNGNLCMTGTLIPEKVKGKIVMCDRGINARVQKGDVVKAAGGVGMILANTAANGEELVADAHLLPATTVGEKAGDIIRHYVTTDPNPTASISILGTVVGVKPSPVVAAFSSRGPNSITPNILKPDLIAPGVNILAAWTGAAGPTGLASDSRRVEFNIISGTSMSCPHVSGLAALLKSVHPEWSPAAIRSALMTTAYKTYKDGKPLLDIATGKPSTPFDHGAGHVSPTTATNPGLIYDLTTEDYLGFLCALNYTSPQIRSVSRRNYTCDPSKSYSVADLNYPSFAVNVDGVGAYKYTRTVTSVGGAGTYSVKVTSETTGVKISVEPAVLNFKEANEKKSYTVTFTVDSSKPSGSNSFGSIEWSDGKHVVGSPVAISWT

SEQ ID NO: 44960 - DNA, 2809 bp, Arabidopsis thaliana
  misc_feature (1)..(2809): Ceres Seq. ID no. 12559536
  misc_feature: MA Experiment ID: 108434 Result: Down-regulated in Transcription
  misc_feature: MA Experiment 108434 PARAMETER Experiment Name: At_Root_Tips_cDNA_P Parameter: Tissue Value: Root Tips
  misc_feature: MA Experiment ID: 108463 Result: Up-regulated in Transcription
  misc_feature: MA Experiment 108463 PARAMETER Experiment Name: At_Germinating_Seeds_cDNA_P Parameter: Age (day) Value: 3 vs. 0
  misc_feature: MA Experiment 108463 PARAMETER Experiment Name: At_Germinating_Seeds_cDNA_P Parameter: Tissue Value: Germinating Seeds
  misc_feature: MA Experiment ID: 108473 Result: Down-regulated in Transcription
  misc_feature: MA Experiment 108473 PARAMETER Experiment Name: At_Drought_Flowers_cDNA_P Parameter: Timepoint (hr) Value: 7 d
  misc_feature: MA Experiment 108473 PARAMETER Experiment Name: At_Drought_Flowers_cDNA_P Parameter: Tissue Value: Flower
  misc_feature: MA Experiment 108473 PARAMETER Experiment Name: At_Drought_Flowers_cDNA_P Parameter: Treatment Value: Drought vs. No Drought
  misc_feature: MA Experiment ID: 108488 Result: Up-regulated in Transcription
  misc_feature: MA Experiment ID: 108489 Result: Down-regulated in Transcription
  misc_feature: MA Experiment ID: 108574 Result: Up-regulated in Transcription
  misc_feature: MA Experiment 108574 PARAMETER Experiment Name: At_Wounding__cDNA_P Parameter: Timepoint (hr) Value: 1
  misc_feature: MA Experiment 108574 PARAMETER Experiment Name: At_Wounding__cDNA_P Parameter: Tissue Value: Aerial
  misc_feature: MA Experiment 108574 PARAMETER Experiment Name: At_Wounding__cDNA_P Parameter: Treatment Value: Wounding vs. No Wounding
  misc_feature: MA Experiment ID: 108579 Result: Up-regulated in Transcription
  misc_feature: MA Experiment 108579 PARAMETER Experiment Name: At_4deg_Cold_cDNA_P Parameter: Temperature (deg C) Value: 4 vs. 22
  misc_feature: MA Experiment 108579 PARAMETER Experiment Name: At_4deg_Cold_cDNA_P Parameter: Timepoint (hr) Value: 6
  misc_feature: MA Experiment 108579 PARAMETER Experiment Name: At_4deg_Cold_cDNA_P Parameter: Tissue Value: Aerial
  misc_feature: MA Experiment ID: 108585 Result: Down-regulated in Transcription
  misc_feature: MA Experiment 108585 PARAMETER Experiment Name: At_5mM_NaNP_cDNA_P Parameter: Timepoint (hr) Value: 6
  misc_feature: MA Experiment 108585 PARAMETER Experiment Name: At_5mM_NaNP_cDNA_P Parameter: Tissue Value: Aerial
  misc_feature: MA Experiment 108585 PARAMETER Experiment Name: At_5mM_NaNP_cDNA_P Parameter: Treatment Value: null
  misc_feature: MA Experiment ID: 108607 Result: Up-regulated in Transcription
  misc_feature: MA Experiment 108607 PARAMETER Experiment Name: At_100uM_ABA_cDNA_P Parameter: Timepoint (hr) Value: 4
  misc_feature: MA Experiment 108607 PARAMETER Experiment Name: At_100uM_ABA_cDNA_P Parameter: Tissue Value: Aerial
  misc_feature: MA Experiment 108607 PARAMETER Experiment Name: At_100uM_ABA_cDNA_P Parameter: Treatment Value: 100uM ABA vs. No Treatment
  misc_feature: MA Experiment ID: 20000069 Result: Up-regulated in Transcription
  misc_feature: MA Experiment 20000069 PARAMETER Experiment Name: At_100uM_ABA_Mutants_cDNA_P Parameter: Plant Line Value: CS23
  misc_feature: MA Experiment 20000069 PARAMETER Experiment Name: At_100uM_ABA_Mutants_cDNA_P Parameter: Timepoint (hr) Value: 6
  misc_feature: MA Experiment 20000069 PARAMETER Experiment Name: At_100uM_ABA_Mutants_cDNA_P Parameter: Tissue Value: Aerial
  misc_feature: MA Experiment 20000069 PARAMETER Experiment Name: At_100uM_ABA_Mutants_cDNA_P Parameter: Treatment Value: 100uM ABA vs. No Treatment
  misc_feature: MA Experiment ID: 20000070 Result: Up-regulated in Transcription
  misc_feature: MA Experiment 20000070 PARAMETER Experiment Name: At_100uM_ABA_Mutants_cDNA_P Parameter: Plant Line Value: CS24
  misc_feature: MA Experiment 20000070 PARAMETER Experiment Name: At_100uM_ABA_Mutants_cDNA_P Parameter: Timepoint (hr) Value: 6
  misc_feature: MA Experiment 20000070 PARAMETER Experiment Name: At_100uM_ABA_Mutants_cDNA_P Parameter: Tissue Value: Aerial
  misc_feature: MA Experiment 20000070 PARAMETER Experiment Name: At_100uM_ABA_Mutants_cDNA_P Parameter: Treatment Value: 100uM ABA vs. No Treatment
  misc_feature: MA Experiment ID: 20000086 Result: Up-regulated in Transcription
  misc_feature: MA Experiment 20000086 PARAMETER Experiment Name: At_100uM_ABA_Mutants_cDNA_P Parameter: Plant Line Value: CS22
  misc_feature: MA Experiment 20000086 PARAMETER Experiment Name: At_100uM_ABA_Mutants_cDNA_P Parameter: Timepoint (hr) Value: 6
  misc_feature: MA Experiment 20000086 PARAMETER Experiment Name: At_100uM_ABA_Mutants_cDNA_P Parameter: Tissue Value: Aerial
  misc_feature: MA Experiment 20000086 PARAMETER Experiment Name: At_100uM_ABA_Mutants_cDNA_P Parameter: Treatment Value: 100uM ABA vs. No Treatment
  misc_feature: MA Experiment ID: 20000088 Result: Up-regulated in Transcription
  misc_feature: MA Experiment 20000088 PARAMETER Experiment Name: At_100uM_ABA_Mutants_cDNA_P Parameter: Plant Line Value: Landsberg
  misc_feature: MA Experiment 20000088 PARAMETER Experiment Name: At_100uM_ABA_Mutants_cDNA_P Parameter: Timepoint (hr) Value: 6
  misc_feature: MA Experiment 20000088 PARAMETER Experiment Name: At_100uM_ABA_Mutants_cDNA_P Parameter: Tissue Value: Aerial
  misc_feature: MA Experiment 20000088 PARAMETER Experiment Name: At_100uM_ABA_Mutants_cDNA_P Parameter: Treatment Value: 100uM ABA vs. No Treatment
  misc_feature: MA Experiment ID: 20000111 Result: Down-regulated in Transcription
  misc_feature: MA Experiment 20000111 PARAMETER Experiment Name: At_42deg_Heat_cDNA_P Parameter: Temperature (deg C) Value: 42 vs. 22
  misc_feature: MA Experiment 20000111 PARAMETER Experiment Name: At_42deg_Heat_cDNA_P Parameter: Timepoint (hr) Value: 6
  misc_feature: MA Experiment 20000111 PARAMETER Experiment Name: At_42deg_Heat_cDNA_P Parameter: Tissue Value: Aerial
  misc_feature: MA Experiment ID: 20000112 Result: Down-regulated in Transcription
  misc_feature: MA Experiment 20000112 PARAMETER Experiment Name: At_42deg_Heat_cDNA_P Parameter: Temperature (deg C) Value: 42 vs. 22
  misc_feature: MA Experiment 20000112 PARAMETER Experiment Name: At_42deg_Heat_cDNA_P Parameter: Timepoint (hr) Value: 2
  misc_feature: MA Experiment 20000112 PARAMETER Experiment Name: At_42deg_Heat_cDNA_P Parameter: Tissue Value: Aerial
  misc_feature: MA Experiment ID: 20000113 Result: Down-regulated in Transcription
  misc_feature: MA Experiment 20000113 PARAMETER Experiment Name: At_42deg_Heat_cDNA_P Parameter: Temperature (deg C) Value: 42 vs. 22
  misc_feature: MA Experiment 20000113 PARAMETER Experiment Name: At_42deg_Heat_cDNA_P Parameter: Timepoint (hr) Value: 8
  misc_feature: MA Experiment 20000113 PARAMETER Experiment Name: At_42deg_Heat_cDNA_P Parameter: Tissue Value: Aerial
  misc_feature: MA Experiment ID: 20000173 Result: Down-regulated in Transcription
  misc_feature: MA Experiment 20000173 PARAMETER Experiment Name: At_42deg_Heat_P Parameter: Age (day) Value: 14
  misc_feature: MA Experiment 20000173 PARAMETER Experiment Name: At_42deg_Heat_P Parameter: Organism Value: A. thaliana
  misc_feature: MA Experiment 20000173 PARAMETER Experiment Name: At_42deg_Heat_P Parameter: Plant Line Value: WS
  misc_feature: MA Experiment 20000173 PARAMETER Experiment Name: At_42deg_Heat_P Parameter: Temperature (deg C) Value: 42 vs. 22
  misc_feature: MA Experiment 20000173 PARAMETER Experiment Name: At_42deg_Heat_P Parameter: Timepoint (hr) Value: 6
  misc_feature: MA Experiment 20000173 PARAMETER Experiment Name: At_42deg_Heat_P Parameter: Tissue Value: Aerial
  misc_feature: MA Experiment ID: 20000184 Result: Down-regulated in Transcription
  misc_feature: MA Experiment 20000184 PARAMETER Experiment Name: At_Shoots__P Parameter: Age (day) Value: 7
  misc_feature: MA Experiment 20000184 PARAMETER Experiment Name: At_Shoots__P Parameter: Tissue Value: Shoots vs. Whole Plant
  misc_feature: MA Experiment ID: 20000185 Result: Down-regulated in Transcription
  misc_feature: MA Experiment 20000185 PARAMETER Experiment Name: At_Roots__P Parameter: Age (day) Value: 7 vs. 21
  misc_feature: MA Experiment 20000185 PARAMETER Experiment Name: At_Roots__P Parameter: Organism Value: A. thaliana
  misc_feature: MA Experiment 20000185 PARAMETER Experiment Name: At_Roots__P Parameter: Tissue Value: Roots vs. Whole Plant
  misc_feature: MA Experiment ID: 20000211 Result: Up-regulated in Transcription
  misc_feature: MA Experiment 20000211 PARAMETER Experiment Name: At_0.001percent_MeJA__P Parameter: Age (day) Value: 14
  misc_feature: MA Experiment 20000211 PARAMETER Experiment Name: At_0.001percent_MeJA__P Parameter: Organism Value: A. thaliana
  misc_feature: MA Experiment 20000211 PARAMETER Experiment Name: At_0.001percent_MeJA__P Parameter: Plant Line Value: WS
  misc_feature: MA Experiment 20000211 PARAMETER Experiment Name: At_0.001percent_MeJA__P Parameter: Timepoint (hr) Value: 1
  misc_feature: MA Experiment 20000211 PARAMETER Experiment Name: At_0.001percent_MeJA__P Parameter: Tissue Value: Aerial
  misc_feature: MA Experiment 20000211 PARAMETER Experiment Name: At_0.001percent_MeJA__P Parameter: Treatment Value: 0.001percent MeJA vs. No Treatment
  misc_feature: MA Experiment ID: 20000213 Result: Up-regulated in Transcription
  misc_feature: MA Experiment 20000213 PARAMETER Experiment Name: At_4deg_Cold_P Parameter: Timepoint (hr) Value: 2
  misc_feature: MA Experiment ID: 20000224 Result: Up-regulated in Transcription
  misc_feature: MA Experiment ID: 20000286 Result: Up-regulated in Transcription
  misc_feature: MA Experiment 20000286 PARAMETER Experiment Name: At_Open_Flower_P Parameter: Age (day) Value: 21
  misc_feature: MA Experiment 20000286 PARAMETER Experiment Name: At_Open_Flower_P Parameter: Plant Line Value: WS
  misc_feature: MA Experiment 20000286 PARAMETER Experiment Name: At_Open_Flower_P Parameter: Tissue Value: Half Open vs. Whole Plant
  misc_feature: MA Experiment ID: 20000308 Result: Up-regulated in Transcription
  misc_feature: MA Experiment 20000308 PARAMETER Experiment Name: At_100mM_NaCl__P Parameter: Age (day) Value: 17
  misc_feature: MA Experiment 20000308 PARAMETER Experiment Name: At_100mM_NaCl__P Parameter: Organism Value: A. thaliana
  misc_feature: MA Experiment 20000308 PARAMETER Experiment Name: At_100mM_NaCl__P Parameter: Plant Line Value: WS
  misc_feature: MA Experiment 20000308 PARAMETER Experiment Name: At_100mM_NaCl__P Parameter: Timepoint (hr) Value: 72
  misc_feature: MA Experiment 20000308 PARAMETER Experiment Name: At_100mM_NaCl__P Parameter: Tissue Value: Whole Plant
  misc_feature: MA Experiment 20000308 PARAMETER Experiment Name: At_100mM_NaCl__P Parameter: Treatment Value: 100mM NaCl vs. No Treatment
  misc_feature: MA Experiment ID: 20000437 Result: Down-regulated in Transcription
  misc_feature: MA Experiment 20000437 PARAMETER Experiment Name: At_Drought_P Parameter: Age (day) Value: 8
  misc_feature: MA Experiment 20000437 PARAMETER Experiment Name: At_Drought_P Parameter: Organism Value: A. thaliana
  misc_feature: MA Experiment 20000437 PARAMETER Experiment Name: At_Drought_P Parameter: Plant Line Value: WS
  misc_feature: MA Experiment 20000437 PARAMETER Experiment Name: At_Drought_P Parameter: Timepoint (hr) Value: 24
  misc_feature: MA Experiment 20000437 PARAMETER Experiment Name: At_Drought_P Parameter: Tissue Value: Whole Plant
  misc_feature: MA Experiment 20000437 PARAMETER Experiment Name: At_Drought_P Parameter: Treatment Value: Drought vs. No Drought
  misc_feature: MA Experiment ID: 20000439 Result: Down-regulated in Transcription
  misc_feature: MA Experiment 20000439 PARAMETER Experiment Name: At_Roots__P Parameter: Age (day) Value: 14 vs. 21
  misc_feature: MA Experiment 20000439 PARAMETER Experiment Name: At_Roots__P Parameter: Organism Value: A. thaliana
  misc_feature: MA Experiment 20000439 PARAMETER Experiment Name: At_Roots__P Parameter: Tissue Value: Roots vs. Whole Plant
  misc_feature: MA Experiment ID: 20000452 Result: Up-regulated in Transcription
  misc_feature: MA Experiment 20000452 PARAMETER Experiment Name: At_CS6879_Shoots-Roots_P Parameter: Age (day) Value: 14
  misc_feature: MA Experiment 20000452 PARAMETER Experiment Name: At_CS6879_Shoots-Roots_P Parameter: Organism Value: A. thaliana
  misc_feature: MA Experiment 20000452 PARAMETER Experiment Name: At_CS6879_Shoots-Roots_P Parameter: Plant Line Value: CS6879 vs. WS
  misc_feature: MA Experiment 20000452 PARAMETER Experiment Name: At_CS6879_Shoots-Roots_P Parameter: Tissue Value: Shoots
  misc_feature: MA Experiment ID: 20000527 Result: Down-regulated in Transcription
  misc_feature: MA Experiment 20000527 PARAMETER Experiment Name: At_10percent_PEG_P Parameter: Age (day) Value: 20
  misc_feature: MA Experiment 20000527 PARAMETER Experiment Name: At_10percent_PEG_P Parameter: Organism Value: A. thaliana
  misc_feature: MA Experiment 20000527 PARAMETER Experiment Name: At_10percent_PEG_P Parameter: Plant Line Value: WS
  misc_feature: MA Experiment 20000527 PARAMETER Experiment Name: At_10percent_PEG_P Parameter: Timepoint (day) Value: 20
  misc_feature: MA Experiment 20000527 PARAMETER Experiment Name: At_10percent_PEG_P Parameter: Tissue Value: Whole Plant
  misc_feature: MA Experiment 20000527 PARAMETER Experiment Name: At_10percent_PEG_P Parameter: Treatment Value: 10percent PEG vs. No Treatment
  misc_feature: MA Experiment ID: 20000573 Result: Up-regulated in Transcription
  misc_feature: MA Experiment 20000573 PARAMETER Experiment Name: At_100uM_ABA_Mutants__P Parameter: Organism Value: A. thaliana
  misc_feature: MA Experiment 20000573 PARAMETER Experiment Name: At_100uM_ABA_Mutants__P Parameter: Plant Line Value: CS22 vs. Ler wt
  misc_feature: MA Experiment 20000573 PARAMETER Experiment Name: At_100uM_ABA_Mutants__P Parameter: Timepoint (hr) Value: N/A
  misc_feature: MA Experiment 20000573 PARAMETER Experiment Name: At_100uM_ABA_Mutants__P Parameter: Tissue Value: Whole Plant
  misc_feature: MA Experiment 20000573 PARAMETER Experiment Name: At_100uM_ABA_Mutants__P Parameter: Treatment Value: None
  misc_feature: MA Experiment ID: 20001247 Result: Down-regulated in Transcription
  misc_feature: MA Experiment 20001247 PARAMETER Experiment Name: At_Far-red-induction_P Parameter: Age (day) Value: 7
  misc_feature: MA Experiment 20001247 PARAMETER Experiment Name: At_Far-red-induction_P Parameter: Light Value: Far-red vs. White
  misc_feature: MA Experiment 20001247 PARAMETER Experiment Name: At_Far-red-induction_P Parameter: Organism Value: A. thaliana
  misc_feature: MA Experiment 20001247 PARAMETER Experiment Name: At_Far-red-induction_P Parameter: Plant Line Value: Columbia
  misc_feature: MA Experiment 20001247 PARAMETER Experiment Name: At_Far-red-induction_P Parameter: Timepoint (hr) Value: 1
  misc_feature: MA Experiment 20001247 PARAMETER Experiment Name: At_Far-red-induction_P Parameter: Tissue Value: Whole Plant
  misc_feature: MA Experiment ID: 20001248 Result: Down-regulated in Transcription
  misc_feature: MA Experiment 20001248 PARAMETER Experiment Name: At_Far-red-induction_P Parameter: Age (day) Value: 7
  misc_feature: MA Experiment 20001248 PARAMETER Experiment Name: At_Far-red-induction_P Parameter: Light Value: Far-red vs. White
  misc_feature: MA Experiment 20001248 PARAMETER Experiment Name: At_Far-red-induction_P Parameter: Organism Value: A. thaliana
  misc_feature: MA Experiment 20001248 PARAMETER Experiment Name: At_Far-red-induction_P Parameter: Plant Line Value: Columbia
  misc_feature: MA Experiment 20001248 PARAMETER Experiment Name: At_Far-red-induction_P Parameter: Timepoint (hr) Value: 4
  misc_feature: MA Experiment 20001248 PARAMETER Experiment Name: At_Far-red-induction_P Parameter: Tissue Value: Whole Plant
  misc_feature: MA Experiment ID: 20001450 Result: Down-regulated in Transcription
  misc_feature: MA Experiment 20001450 PARAMETER Experiment Name: At_Far-red-induction_P Parameter: Age (day) Value: 7
  misc_feature: MA Experiment 20001450 PARAMETER Experiment Name: At_Far-red-induction_P Parameter: Light Value: Far-red vs. White
  misc_feature: MA Experiment 20001450 PARAMETER Experiment Name: At_Far-red-induction_P Parameter: Organism Value: A. thaliana
  misc_feature: MA Experiment 20001450 PARAMETER Experiment Name: At_Far-red-induction_P Parameter: Plant Line Value: Columbia
  misc_feature: MA Experiment 20001450 PARAMETER Experiment Name: At_Far-red-induction_P Parameter: Timepoint (hr) Value: 8
  misc_feature: MA Experiment 20001450 PARAMETER Experiment Name: At_Far-red-induction_P Parameter: Tissue Value: Whole Plant
  misc_feature: MA Experiment ID: 20001451 Result: Down-regulated in Transcription
  misc_feature: MA Experiment 20001451 PARAMETER Experiment Name: At_Far-red-induction_P Parameter: Age (day) Value: 7
  misc_feature: MA Experiment 20001451 PARAMETER Experiment Name: At_Far-red-induction_P Parameter: Light Value: Far-red vs. White
  misc_feature: MA Experiment 20001451 PARAMETER Experiment Name: At_Far-red-induction_P Parameter: Organism Value: A. thaliana
  misc_feature: MA Experiment 20001451 PARAMETER Experiment Name: At_Far-red-induction_P Parameter: Plant Line Value: Columbia
  misc_feature: MA Experiment 20001451 PARAMETER Experiment Name: At_Far-red-induction_P Parameter: Timepoint (hr) Value: 24
  misc_feature: MA Experiment 20001451 PARAMETER Experiment Name: At_Far-red-induction_P Parameter: Tissue Value: Whole Plant
  misc_feature: MA Experiment ID: 20001555 Result: Down-regulated in Transcription
  misc_feature: MA Experiment 20001555 PARAMETER Experiment Name: At_Drought_Soil_Dry_P Parameter: Age (day) Value: 24
  misc_feature: MA Experiment 20001555 PARAMETER Experiment Name: At_Drought_Soil_Dry_P Parameter: Organism Value: A. thaliana
  misc_feature: MA Experiment 20001555 PARAMETER Experiment Name: At_Drought_Soil_Dry_P Parameter: Plant Line Value: WS
  misc_feature: MA Experiment 20001555 PARAMETER Experiment Name: At_Drought_Soil_Dry_P Parameter: Post Timepoint (hr) Value: None
  misc_feature: MA Experiment 20001555 PARAMETER Experiment Name: At_Drought_Soil_Dry_P Parameter: Post-Treatment Value: None
  misc_feature: MA Experiment 20001555 PARAMETER Experiment Name: At_Drought_Soil_Dry_P Parameter: Timepoint (day) Value: 10
  misc_feature: MA Experiment 20001555 PARAMETER Experiment Name: At_Drought_Soil_Dry_P Parameter: Treatment Value: Drought vs. No Drought
  misc_feature: MA Experiment ID: 20001558 Result: Down-regulated in Transcription
  misc_feature: MA Experiment 20001558 PARAMETER Experiment Name: At_Drought_Soil_Dry_P Parameter: Age (day) Value: 27
  misc_feature: MA Experiment 20001558 PARAMETER Experiment Name: At_Drought_Soil_Dry_P Parameter: Organism Value: A. thaliana
  misc_feature: MA Experiment 20001558 PARAMETER Experiment Name: At_Drought_Soil_Dry_P Parameter: Plant Line Value: WS
  misc_feature: MA Experiment 20001558 PARAMETER Experiment Name: At_Drought_Soil_Dry_P Parameter: Post Timepoint (hr) Value: 6
  misc_feature: MA Experiment 20001558 PARAMETER Experiment Name: At_Drought_Soil_Dry_P Parameter: Post-Treatment Value: Re-Water vs. No Drought
  misc_feature: MA Experiment 20001558 PARAMETER Experiment Name: At_Drought_Soil_Dry_P Parameter: Timepoint (day) Value: 13
  misc_feature: MA Experiment 20001558 PARAMETER Experiment Name: At_Drought_Soil_Dry_P Parameter: Treatment Value: Drought vs. No Drought
  misc_feature: MA Experiment ID: 20001757 Result: Up-regulated in Transcription
  misc_feature: MA Experiment 20001757 PARAMETER Experiment Name: At_50mM_NH4NO3_L-to-H_P Parameter: Timepoint (hr) Value: 6
  misc_feature: MA Experiment 20001757 PARAMETER Experiment Name: At_50mM_NH4NO3_L-to-H_P Parameter: Tissue Value: Leaf
  misc_feature: MA Experiment 20001757 PARAMETER Experiment Name: At_50mM_NH4NO3_L-to-H_P Parameter: Treatment Value: 50mM NH4NO3 vs 100mM Mannitol
  misc_feature: MA Experiment ID: 20001774 Result: Up-regulated in Transcription
  misc_feature: MA Experiment 20001774 PARAMETER Experiment Name: At_Far-red-enriched-adult_P Parameter: Age (day) Value: 31
  misc_feature: MA Experiment 20001774 PARAMETER Experiment Name: At_Far-red-enriched-adult_P Parameter: Light Value: Far-red enriched vs. White
  misc_feature: MA Experiment 20001774 PARAMETER Experiment Name: At_Far-red-enriched-adult_P Parameter: Organism Value: A. thaliana
  misc_feature: MA Experiment 20001774 PARAMETER Experiment Name: At_Far-red-enriched-adult_P Parameter: Plant Line Value: Columbia
  misc_feature: MA Experiment 20001774 PARAMETER Experiment Name: At_Far-red-enriched-adult_P Parameter: Timepoint (hr) Value: 72
  misc_feature: MA Experiment 20001774 PARAMETER Experiment Name: At_Far-red-enriched-adult_P Parameter: Tissue Value: Aerial
  misc_feature: MA Experiment ID: 20001911 Result: Down-regulated in Transcription
  misc_feature: MA Experiment 20001911 PARAMETER Experiment Name: At_Drought_Reproduction_P Parameter: Age (day) Value: 40
  misc_feature: MA Experiment 20001911 PARAMETER Experiment Name: At_Drought_Reproduction_P Parameter: Organism Value: A. thaliana
  misc_feature: MA Experiment 20001911 PARAMETER Experiment Name: At_Drought_Reproduction_P Parameter: Plant Line Value: WS
  misc_feature: MA Experiment 20001911 PARAMETER Experiment Name: At_Drought_Reproduction_P Parameter: Timepoint (day) Value: 10
  misc_feature: MA Experiment 20001911 PARAMETER Experiment Name: At_Drought_Reproduction_P Parameter: Tissue Value: Flowers
  misc_feature: MA Experiment 20001911 PARAMETER Experiment Name: At_Drought_Reproduction_P Parameter: Treatment Value: Drought vs. No Drought
aagccttatagaagagaaaaaaaatatgtattgtagagagtccttgtcgagtctccagactttgaacgtagcaaagagtctcagctctttgttccctaaacaatcagctctcatcaacccgatctccgctggacgtcgaaacaacctgcctcgtccaaacctcagaagacgatgtaaggtcaccgcttcacgggctaatattgaacaagaaggtaacacagtgaaagaacccattcagaatattaaagtaaagggatacataacggcccaagaagagtttctggagggcataacttggtcgagaggtctcgatgacattgctgatatccgcggcagatcattgctcgtcgagcttattagcgccaagactgaccagcggattacggtagaagactacgcacaacgtgtatgggccgaagcccctgatgagaagtacgagtgcgagtttgagatgcctgaagactttggaccagtgggagccatcaagattcagaaccaataccatcgacagttgttcctcaagggggtagagcttaaattacccggcgggtcgataacgtttacatgtgagtcatgggtggcccccaagtccgttgacccaaccaagcggatattcttctccgacaagtcctacttgccttcccaaacaccagagcctcttaaaaagtatcgaaaagaggagctcgagaccttacaaggcaagaaccgcgaggaagttggtgaatttaccaagtttgagcgcatttacgactatgatgtgtacaacgatgttggtgaccctgacaatgatcctgaacttgctcgtccggtaattggaggcctcacacatccatatccaaggcgttgcaagaccggtcgaaaaccttgtgagactgacccctcttcagagcaacgctacgggggagagttctatgtaccaagagacgaggagttctctacagccaagggcacttcattcacaggcaaggccgtactggcagctcttccctccatcttccctcagatcgagtctgttctattgagtccccaagaaccttttccacacttcaaggccatacaaaatctctttgaagaaggcattcagcttcccaaggatgctggcctcttacctctgctccccagaatcatcaaagctcttggcgaagctcaagatgatattctccagtttgatgccccagttctcattaacagggatagattttcatggttacgagacgacgagtttgctcgccagacacttgccggccttaatccttatagcattcagctagttgaagagtggccgttaataagcaaactagacccggccgtttatggtgatcccacctcactcattacttgggaaattgtggaaagagaagttaaaggaaacatgacagttgatgaggctctaaagaataagagattgttcgtgttggattatcatgatttgcttctaccatatgtgaacaaagtgagagagttaaacaataccacattatatgcttctagaacactattcttcctcagcgatgatagcacattgaggcctgttgccattgagttgacttgtccaccaaatatcaacaagccccaatggaaacaagtcttcacgccaggctatgatgctacgtcatgctggctatggaatcttgctaagactcatgctatctctcatgacgccggttatcatcagcttatttcccattggttgaggactcatgcctgtacggagccatacataatagcggcaaatagacaactaagtgccatgcatcccatttataggcttttgcatcctcatttccgctacaccatggaaatcaacgctcgtgcacgccaaagtcttgtcaacggaggtggaatcattgagacttgtttctggcccgggaagtatgcattagagctaagttcagccgtctatggtaaactatggaggtttgaccaggaaggcttacccgcggatctcatcaaaagggggttggctgaggaagataagaccgcagaacatggagtacgtctgacgataccagactatccatttgcaaatgatggtctaatattgtgggatgcaattaaagaatgggtgacagactatgtgaaacattactatcctgatgaagaactgatcacatcggacgaggaactccaaggatggtggagtgaagtgcggaacataggccacggagacaagaaagacgaaccttggtggcctgtcctcaaaacacaagatgacttgattggtgtggtaactacgattgcatgggtcacctcaggtcaccatgcagctgtaaactttggacagtacggatatggaggatactttcccaaccgaccaacgacaacaaggataagaatgccaacggaagatccgacagatgaagccttaaaagagttctatgagtcgccagaaaaagtgttgcttaagacatacccatcgcagaaacaggcgaccctagtgatggtcacgttggatcttttatcaacacattcacctgacgaagagtacattggagaacaacaagaagcatcttgggccaatgagcctgttatcaatgctgcatttgaaagattcaaaggcaagctccaatatctagaaggagtgatagatgagagaaacgtgaacattactctaaagaatagagctggagctggtgttgttaagtatgagcttttgaagcctacctctgagcatggtgttaccggaatgggtgttccttatagtatttctatttgatctatgcattttctttctcaaaaatgctttcattaattttctgtatctctgtcttcttgataaaatgaataaaacaaatgctcctttgtctcc

SEQ ID NO: 44961 - protein, 904 aa, Arabidopsis thaliana
  peptide (1)..(904): Ceres Seq. ID no. 12559537
  misc_feature (114)..(205): Pfam Name: PLAT/LH2 domain Pfam Description: PLAT/LH2 domain
  misc_feature (114)..(205): Pfam Name: PLAT/LH2 domain Pfam Description: PLAT/LH2 domain
  misc_feature (114)..(205): Pfam Name: PLAT/LH2 domain Pfam Description: PLAT/LH2 domain
  misc_feature (75)..(903): Homolog of NCBI NO: 14589309 NR Description: lipoxygenase [Sesbania rostrata]
  misc_feature (145)..(359): Homolog of NCBI NO: 9714392 NR Description: lipoxygenase [Oryza sativa]
  misc_feature (311)..(904): Homolog of NCBI NO: 9714392 NR Description: lipoxygenase [Oryza sativa]
  misc_feature (119)..(904): Homolog of NCBI NO: 28411860 NR Description: putative lipoxygenase [Oryza sativa (japonica
  misc_feature (17)..(904): Homolog of NCBI NO: 34922538 NR Description: Lipoxygenase 2.3, chloroplast precursor
  misc_feature (75)..(903): Homolog of NCBI NO: 14589309 NR Description: lipoxygenase [Sesbania rostrata]
  misc_feature (311)..(904): Homolog of NCBI NO: 9714392 NR Description: lipoxygenase [Oryza sativa]
  misc_feature (17)..(904): Homolog of NCBI NO: 34922538 NR Description: Lipoxygenase 2.3, chloroplast precursor
  misc_feature (119)..(904): Homolog of NCBI NO: 28411860 NR Description: putative lipoxygenase [Oryza sativa (japonica
  misc_feature (311)..(904): Homolog of NCBI NO: 9714392 NR Description: lipoxygenase [Oryza sativa]
  misc_feature (145)..(359): Homolog of NCBI NO: 9714392 NR Description: lipoxygenase [Oryza sativa]
  misc_feature (75)..(903): Homolog of NCBI NO: 14589309 NR Description: lipoxygenase [Sesbania rostrata]
  misc_feature (24)..(904): Homolog of NCBI NO: 7433169 NR Description: probable lipoxygenase (EC 1.13.11.12) (clone H1)
  misc_feature (72)..(904): Homolog of NCBI NO: 7433168 NR Description: lipoxygenase (EC 1.13.11.12) loxC, chloroplast -
  misc_feature (125)..(904): Homolog of NCBI NO: 2826842 NR Description: loxc homologue [Lycopersicon pimpinellifolium]
  misc_feature (74)..(904): Homolog of NCBI NO: 7433160 NR Description: probable lipoxygenase (EC 1.13.11.12) CPRD46,
  misc_feature (103)..(904): Homolog of NCBI NO: 18461098 NR Description: lipoxygenase [Citrus jambhiri]
  misc_feature (24)..(904): Homolog of NCBI NO: 7433169 NR Description: probable lipoxygenase (EC 1.13.11.12) (clone H1)
  misc_feature (72)..(904): Homolog of NCBI NO: 7433168 NR Description: lipoxygenase (EC 1.13.11.12) loxC, chloroplast -
  misc_feature (125)..(904): Homolog of NCBI NO: 2826842 NR Description: loxc homologue [Lycopersicon pimpinellifolium]
  misc_feature (74)..(904): Homolog of NCBI NO: 7433160 NR Description: probable lipoxygenase (EC 1.13.11.12) CPRD46,
  misc_feature (103)..(904): Homolog of NCBI NO: 18461098 NR Description: lipoxygenase [Citrus jambhiri]
  misc_feature (17)..(904): Homolog of NCBI NO: 34922538 NR Description: Lipoxygenase 2.3, chloroplast precursor
  misc_feature (119)..(904): Homolog of NCBI NO: 28411860 NR Description: putative lipoxygenase [Oryza sativa (japonica
  misc_feature (145)..(359): Homolog of NCBI NO: 9714392 NR Description: lipoxygenase [Oryza sativa]
  misc_feature (103)..(904): Homolog of NCBI NO: 18461098 NR Description: lipoxygenase [Citrus jambhiri]
  misc_feature (74)..(904): Homolog of NCBI NO: 7433160 NR Description: probable lipoxygenase (EC 1.13.11.12) CPRD46,
  misc_feature (125)..(904): Homolog of NCBI NO: 2826842 NR Description: loxc homologue [Lycopersicon pimpinellifolium]
  misc_feature (72)..(904): Homolog of NCBI NO: 7433168 NR Description: lipoxygenase (EC 1.13.11.12) loxC, chloroplast -
  misc_feature (24)..(904): Homolog of NCBI NO: 7433169 NR Description: probable lipoxygenase (EC 1.13.11.12) (clone H1)
SLIEEKKNMYCRESLSSLQTLNVAKSLSSLFPKQSALINPISAGRRNNLPRPNLRRRCKVTASRANIEQEGNTVKEPIQNIKVKGYITAQEEFLEGITWSRGLDDIADIRGRSLLVELISAKTDQRITVEDYAQRVWAEAPDEKYECEFEMPEDFGPVGAIKIQNQYHRQLFLKGVELKLPGGSITFTCESWVAPKSVDPTKRIFFSDKSYLPSQTPEPLKKYRKEELETLQGKNREEVGEFTKFERIYDYDVYNDVGDPDNDPELARPVIGGLTHPYPRRCKTGRKPCETDPSSEQRYGGEFYVPRDEEFSTAKGTSFTGKAVLAALPSIFPQIESVLLSPQEPFPHFKAIQNLFEEGIQLPKDAGLLPLLPRIIKALGEAQDDILQFDAPVLINRDRFSWLRDDEFARQTLAGLNPYSIQLVEEWPLISKLDPAVYGDPTSLITWEIVEREVKGNMTVDEALKNKRLFVLDYHDLLLPYVNKVRELNNTTLYASRTLFFLSDDSTLRPVAIELTCPPNINKPQWKQVFTPGYDATSCWLWNLAKTHAISHDAGYHQLISHWLRTHACTEPYIIAANRQLSAMHPIYRLLHPHFRYTMEINARARQSLVNGGGIIETCFWPGKYALELSSAVYGKLWRFDQEGLPADLIKRGLAEEDKTAEHGVRLTIPDYPFANDGLILWDAIKEWVTDYVKHYYPDEELITSDEELQGWWSEVRNIGHGDKKDEPWWPVLKTQDDLIGVVTTIAWVTSGHHAAVNFGQYGYGGYFPNRPTTTRIRMPTEDPTDEALKEFYESPEKVLLKTYPSQKQATLVMVTLDLLSTHSPDEEYIGEQQEASWANEPVINAAFERFKGKLQYLEGVIDERNVNITLKNRAGAGVVKYELLKPTSEHGVTGMGVPYSISI

SEQ ID NO: 44962 - protein, 896 aa, Arabidopsis thaliana
  peptide (1)..(896): Ceres Seq. ID no. 12559538
  misc_feature (106)..(197): Pfam Name: PLAT/LH2 domain Pfam Description: PLAT/LH2 domain
  misc_feature (106)..(197): Pfam Name: PLAT/LH2 domain Pfam Description: PLAT/LH2 domain
  misc_feature (106)..(197): Pfam Name: PLAT/LH2 domain Pfam Description: PLAT/LH2 domain
  misc_feature (67)..(895): Homolog of NCBI NO: 14589309 NR Description: lipoxygenase [Sesbania rostrata]
  misc_feature (137)..(351): Homolog of NCBI NO: 9714392 NR Description: lipoxygenase [Oryza sativa]
  misc_feature (303)..(896): Homolog of NCBI NO: 9714392 NR Description: lipoxygenase [Oryza sativa]
  misc_feature (111)..(896): Homolog of NCBI NO: 28411860 NR Description: putative lipoxygenase [Oryza sativa (japonica
  misc_feature (9)..(896): Homolog of NCBI NO: 34922538 NR Description: Lipoxygenase 2.3, chloroplast precursor
  misc_feature (67)..(895): Homolog of NCBI NO: 14589309 NR Description: lipoxygenase [Sesbania rostrata]
  misc_feature (303)..(896): Homolog of NCBI NO: 9714392 NR Description: lipoxygenase [Oryza sativa]
  misc_feature (9)..(896): Homolog of NCBI NO: 34922538 NR Description: Lipoxygenase 2.3, chloroplast precursor
  misc_feature (111)..(896): Homolog of NCBI NO: 28411860 NR Description: putative lipoxygenase [Oryza sativa (japonica
  misc_feature (303)..(896): Homolog of NCBI NO: 9714392 NR Description: lipoxygenase [Oryza sativa]
  misc_feature (137)..(351): Homolog of NCBI NO: 9714392 NR Description: lipoxygenase [Oryza sativa]
  misc_feature (67)..(895): Homolog of NCBI NO: 14589309 NR Description: lipoxygenase [Sesbania rostrata]
  misc_feature (16)..(896): Homolog of NCBI NO: 7433169 NR Description: probable lipoxygenase (EC 1.13.11.12) (clone H1)
  misc_feature (64)..(896): Homolog of NCBI NO: 7433168 NR Description: lipoxygenase (EC 1.13.11.12) loxC, chloroplast -
  misc_feature (117)..(896): Homolog of NCBI NO: 2826842 NR Description: loxc homologue [Lycopersicon pimpinellifolium]
  misc_feature (66)..(896): Homolog of NCBI NO: 7433160 NR Description: probable lipoxygenase (EC 1.13.11.12) CPRD46,
  misc_feature (95)..(896): Homolog of NCBI NO: 18461098 NR Description: lipoxygenase [Citrus jambhiri]
  misc_feature (16)..(896): Homolog of NCBI NO: 7433169 NR Description: probable lipoxygenase (EC 1.13.11.12) (clone H1)
  misc_feature (64)..(896): Homolog of NCBI NO: 7433168 NR Description: lipoxygenase (EC 1.13.11.12) loxC, chloroplast -
  misc_feature (117)..(896): Homolog of NCBI NO: 2826842 NR Description: loxc homologue [Lycopersicon pimpinellifolium]
  misc_feature (66)..(896): Homolog of NCBI NO: 7433160 NR Description: probable lipoxygenase (EC 1.13.11.12) CPRD46,
  misc_feature (95)..(896): Homolog of NCBI NO: 18461098 NR Description: lipoxygenase [Citrus jambhiri]
  misc_feature (9)..(896): Homolog of NCBI NO: 34922538 NR Description: Lipoxygenase 2.3, chloroplast precursor
  misc_feature (111)..(896): Homolog of NCBI NO: 28411860 NR Description: putative lipoxygenase [Oryza sativa (japonica
  misc_feature (137)..(351): Homolog of NCBI NO: 9714392 NR Description: lipoxygenase [Oryza sativa]
  misc_feature (95)..(896): Homolog of NCBI NO: 18461098 NR Description: lipoxygenase [Citrus jambhiri]
  misc_feature (66)..(896): Homolog of NCBI NO: 7433160 NR Description: probable lipoxygenase (EC 1.13.11.12) CPRD46,
  misc_feature (117)..(896): Homolog of NCBI NO: 2826842 NR Description: loxc homologue [Lycopersicon pimpinellifolium]
  misc_feature (64)..(896): Homolog of NCBI NO: 7433168 NR Description: lipoxygenase (EC 1.13.11.12) loxC, chloroplast -
  misc_feature (16)..(896): Homolog of NCBI NO: 7433169 NR Description: probable lipoxygenase (EC 1.13.11.12) (clone H1)
MYCRESLSSLQTLNVAKSLSSLFPKQSALINPISAGRRNNLPRPNLRRRCKVTASRANIEQEGNTVKEPIQNIKVKGYITAQEEFLEGITWSRGLDDIADIRGRSLLVELISAKTDQRITVEDYAQRVWAEAPDEKYECEFEMPEDFGPVGAIKIQNQYHRQLFLKGVELKLPGGSITFTCESWVAPKSVDPTKRIFFSDKSYLPSQTPEPLKKYRKEELETLQGKNREEVGEFTKFERIYDYDVYNDVGDPDNDPELARPVIGGLTHPYPRRCKTGRKPCETDPSSEQRYGGEFYVPRDEEFSTAKGTSFTGKAVLAALPSIFPQIESVLLSPQEPFPHFKAIQNLFEEGIQLPKDAGLLPLLPRIIKALGEAQDDILQFDAPVLINRDRFSWLRDDEFARQTLAGLNPYSIQLVEEWPLISKLDPAVYGDPTSLITWEIVEREVKGNMTVDEALKNKRLFVLDYHDLLLPYVNKVRELNNTTLYASRTLFFLSDDSTLRPVAIELTCPPNINKPQWKQVFTPGYDATSCWLWNLAKTHAISHDAGYHQLISHWLRTHACTEPYIIAANRQLSAMHPIYRLLHPHFRYTMEINARARQSLVNGGGIIETCFWPGKYALELSSAVYGKLWRFDQEGLPADLIKRGLAEEDKTAEHGVRLTIPDYPFANDGLILWDAIKEWVTDYVKHYYPDEELITSDEELQGWWSEVRNIGHGDKKDEPWWPVLKTQDDLIGVVTTIAWVTSGHHAAVNFGQYGYGGYFPNRPTTTRIRMPTEDPTDEALKEFYESPEKVLLKTYPSQKQATLVMVTLDLLSTHSPDEEYIGEQQEASWANEPVINAAFERFKGKLQYLEGVIDERNVNITLKNRAGAGVVKYELLKPTSEHGVTGMGVPYSISI

SEQ ID NO: 44963 - protein, 754 aa, Arabidopsis thaliana
  peptide (1)..(754): Ceres Seq. ID no. 12559539
  misc_feature (1)..(55): Pfam Name: PLAT/LH2 domain Pfam Description: PLAT/LH2 domain
  misc_feature (1)..(55): Pfam Name: PLAT/LH2 domain Pfam Description: PLAT/LH2 domain
  misc_feature (1)..(55): Pfam Name: PLAT/LH2 domain Pfam Description: PLAT/LH2 domain
  misc_feature (1)..(753): Homolog of NCBI NO: 14589309 NR Description: lipoxygenase [Sesbania rostrata]
  misc_feature (1)..(209): Homolog of NCBI NO: 9714392 NR Description: lipoxygenase [Oryza sativa]
  misc_feature (161)..(754): Homolog of NCBI NO: 9714392 NR Description: lipoxygenase [Oryza sativa]
  misc_feature (1)..(754): Homolog of NCBI NO: 28411860 NR Description: putative lipoxygenase [Oryza sativa (japonica
  misc_feature (1)..(754): Homolog of NCBI NO: 34922538 NR Description: Lipoxygenase 2.3, chloroplast precursor
  misc_feature (1)..(753): Homolog of NCBI NO: 14589309 NR Description: lipoxygenase [Sesbania rostrata]
  misc_feature (161)..(754): Homolog of NCBI NO: 9714392 NR Description: lipoxygenase [Oryza sativa]
  misc_feature (1)..(754): Homolog of NCBI NO: 34922538 NR Description: Lipoxygenase 2.3, chloroplast precursor
  misc_feature (1)..(754): Homolog of NCBI NO: 28411860 NR Description: putative lipoxygenase [Oryza sativa (japonica
  misc_feature (161)..(754): Homolog of NCBI NO: 9714392 NR Description: lipoxygenase [Oryza sativa]
  misc_feature (1)..(209): Homolog of NCBI NO: 9714392 NR Description: lipoxygenase [Oryza sativa]
  misc_feature (1)..(753): Homolog of NCBI NO: 14589309 NR Description: lipoxygenase [Sesbania rostrata]
  misc_feature (1)..(754): Homolog of NCBI NO: 7433169 NR Description: probable lipoxygenase (EC 1.13.11.12) (clone H1)
  misc_feature (1)..(754): Homolog of NCBI NO: 7433168 NR Description: lipoxygenase (EC 1.13.11.12) loxC, chloroplast -
  misc_feature (1)..(754): Homolog of NCBI NO: 2826842 NR Description: loxc homologue [Lycopersicon pimpinellifolium]
  misc_feature (1)..(754): Homolog of NCBI NO: 7433160 NR Description: probable lipoxygenase (EC 1.13.11.12) CPRD46,
  misc_feature (1)..(754): Homolog of NCBI NO: 18461098 NR Description: lipoxygenase [Citrus jambhiri]
  misc_feature (1)..(754): Homolog of NCBI NO: 7433169 NR Description: probable lipoxygenase (EC 1.13.11.12) (clone H1)
  misc_feature (1)..(754): Homolog of NCBI NO: 7433168 NR Description: lipoxygenase (EC 1.13.11.12) loxC, chloroplast -
  misc_feature (1)..(754): Homolog of NCBI NO: 2826842 NR Description: loxc homologue [Lycopersicon pimpinellifolium]
  misc_feature (1)..(754): Homolog of NCBI NO: 7433160 NR Description: probable lipoxygenase (EC 1.13.11.12) CPRD46,
  misc_feature (1)..(754): Homolog of NCBI NO: 18461098 NR Description: lipoxygenase [Citrus jambhiri]
  misc_feature (1)..(754): Homolog of NCBI NO: 34922538 NR Description: Lipoxygenase 2.3, chloroplast precursor
  misc_feature (1)..(754): Homolog of NCBI NO: 28411860 NR Description: putative lipoxygenase [Oryza sativa (japonica
  misc_feature (1)..(209): Homolog of NCBI NO: 9714392 NR Description: lipoxygenase [Oryza sativa]
  misc_feature (1)..(754): Homolog of NCBI NO: 18461098 NR Description: lipoxygenase [Citrus jambhiri]
  misc_feature (1)..(754): Homolog of NCBI NO: 7433160 NR Description: probable lipoxygenase (EC 1.13.11.12) CPRD46,
  misc_feature (1)..(754): Homolog of NCBI NO: 2826842 NR Description: loxc homologue [Lycopersicon pimpinellifolium]
  misc_feature (1)..(754): Homolog of NCBI NO: 7433168 NR Description: lipoxygenase (EC 1.13.11.12) loxC, chloroplast -
  misc_feature (1)..(754): Homolog of NCBI NO: 7433169 NR Description: probable lipoxygenase (EC 1.13.11.12) (clone H1)
MPEDFGPVGAIKIQNQYHRQLFLKGVELKLPGGSITFTCESWVAPKSVDPTKRIFFSDKSYLPSQTPEPLKKYRKEELETLQGKNREEVGEFTKFERIYDYDVYNDVGDPDNDPELARPVIGGLTHPYPRRCKTGRKPCETDPSSEQRYGGEFYVPRDEEFSTAKGTSFTGKAVLAALPSIFPQIESVLLSPQEPFPHFKAIQNLFEEGIQLPKDAGLLPLLPRIIKALGEAQDDILQFDAPVLINRDRFSWLRDDEFARQTLAGLNPYSIQLVEEWPLISKLDPAVYGDPTSLITWEIVEREVKGNMTVDEALKNKRLFVLDYHDLLLPYVNKVRELNNTTLYASRTLFFLSDDSTLRPVAIELTCPPNINKPQWKQVFTPGYDATSCWLWNLAKTHAISHDAGYHQLISHWLRTHACTEPYIIAANRQLSAMHPIYRLLHPHFRYTMEINARARQSLVNGGGIIETCFWPGKYALELSSAVYGKLWRFDQEGLPADLIKRGLAEEDKTAEHGVRLTIPDYPFANDGLILWDAIKEWVTDYVKHYYPDEELITSDEELQGWWSEVRNIGHGDKKDEPWWPVLKTQDDLIGVVTTIAWVTSGHHAAVNFGQYGYGGYFPNRPTTTRIRMPTEDPTDEALKEFYESPEKVLLKTYPSQKQATLVMVTLDLLSTHSPDEEYIGEQQEASWANEPVINAAFERFKGKLQYLEGVIDERNVNITLKNRAGAGVVKYELLKPTSEHGVTGMGVPYSISI

SEQ ID NO: 44964 - DNA, 2028 bp, Arabidopsis thaliana; identical to SEQ ID NO: 37075
  misc_feature (1)..(2028): Ceres Seq. ID no. 12559842
  misc_feature: MA Experiment ID: 20000171 Result: Down-regulated in Transcription
  misc_feature: MA Experiment 20000171 PARAMETER Experiment Name: At_42deg_Heat_P Parameter: Age (day) Value: 14
  misc_feature: MA Experiment 20000171 PARAMETER Experiment Name: At_42deg_Heat_P Parameter: Organism Value: A. thaliana
  misc_feature: MA Experiment 20000171 PARAMETER Experiment Name: At_42deg_Heat_P Parameter: Plant Line Value: WS
  misc_feature: MA Experiment 20000171 PARAMETER Experiment Name: At_42deg_Heat_P Parameter: Temperature (deg C) Value: 42 vs. 22
  misc_feature: MA Experiment 20000171 PARAMETER Experiment Name: At_42deg_Heat_P Parameter: Timepoint (hr) Value: 1
  misc_feature: MA Experiment 20000171 PARAMETER Experiment Name: At_42deg_Heat_P Parameter: Tissue Value: Aerial
  misc_feature: MA Experiment ID: 20000173 Result: Down-regulated in Transcription
  misc_feature: MA Experiment 20000173 PARAMETER Experiment Name: At_42deg_Heat_P Parameter: Age (day) Value: 14
  misc_feature: MA Experiment 20000173 PARAMETER Experiment Name: At_42deg_Heat_P Parameter: Organism Value: A. thaliana
  misc_feature: MA Experiment 20000173 PARAMETER Experiment Name: At_42deg_Heat_P Parameter: Plant Line Value: WS
  misc_feature: MA Experiment 20000173 PARAMETER Experiment Name: At_42deg_Heat_P Parameter: Temperature (deg C) Value: 42 vs. 22
  misc_feature: MA Experiment 20000173 PARAMETER Experiment Name: At_42deg_Heat_P Parameter: Timepoint (hr) Value: 6
  misc_feature: MA Experiment 20000173 PARAMETER Experiment Name: At_42deg_Heat_P Parameter: Tissue Value: Aerial
  misc_feature: MA Experiment ID: 20000179 Result: Up-regulated in Transcription
  misc_feature: MA Experiment 20000179 PARAMETER Experiment Name: At_Germinating_Seeds_P Parameter: Age (hr) Value: 6 vs. 0
  misc_feature: MA Experiment 20000179 PARAMETER Experiment Name: At_Germinating_Seeds_P Parameter: Tissue Value: Germinating Seeds
  misc_feature: MA Experiment ID: 20000184 Result: Up-regulated in Transcription
  misc_feature: MA Experiment 20000184 PARAMETER Experiment Name: At_Shoots__P Parameter: Age (day) Value: 7
  misc_feature: MA Experiment 20000184 PARAMETER Experiment Name: At_Shoots__P Parameter: Tissue Value: Shoots vs. Whole Plant
  misc_feature: MA Experiment ID: 20000185 Result: Down-regulated in Transcription
  misc_feature: MA Experiment 20000185 PARAMETER Experiment Name: At_Roots__P Parameter: Age (day) Value: 7 vs. 21
  misc_feature: MA Experiment 20000185 PARAMETER Experiment Name: At_Roots__P Parameter: Organism Value: A. thaliana
  misc_feature: MA Experiment 20000185 PARAMETER Experiment Name: At_Roots__P Parameter: Tissue Value: Roots vs. Whole Plant
  misc_feature: MA Experiment ID: 20000227 Result: Up-regulated in Transcription
  misc_feature: MA Experiment 20000227 PARAMETER Experiment Name: At_Root-Tips-vs-Tops_P Parameter: Tissue Value: Root Tips vs. Root Tops
  misc_feature: MA Experiment ID: 20000267 Result: Down-regulated in Transcription
  misc_feature: MA Experiment 20000267 PARAMETER Experiment Name: At_Drought_P Parameter: Age (day) Value: 7
  misc_feature: MA Experiment 20000267 PARAMETER Experiment Name: At_Drought_P Parameter: Organism Value: A. thaliana
  misc_feature: MA Experiment 20000267 PARAMETER Experiment Name: At_Drought_P Parameter: Plant Line Value: WS
  misc_feature: MA Experiment 20000267 PARAMETER Experiment Name: At_Drought_P Parameter: Timepoint (hr) Value: 6
  misc_feature: MA Experiment 20000267 PARAMETER Experiment Name: At_Drought_P Parameter: Tissue Value: Whole Plant
  misc_feature: MA Experiment 20000267 PARAMETER Experiment Name: At_Drought_P Parameter: Treatment Value: Drought vs. No Drought
  misc_feature: MA Experiment ID: 20000308 Result: Down-regulated in Transcription
  misc_feature: MA Experiment 20000308 PARAMETER Experiment Name: At_100mM_NaCl__P Parameter: Age (day) Value: 17
  misc_feature: MA Experiment 20000308 PARAMETER Experiment Name: At_100mM_NaCl__P Parameter: Organism Value: A. thaliana
  misc_feature: MA Experiment 20000308 PARAMETER Experiment Name: At_100mM_NaCl__P Parameter: Plant Line Value: WS
  misc_feature: MA Experiment 20000308 PARAMETER Experiment Name: At_100mM_NaCl__P Parameter: Timepoint (hr) Value: 72
  misc_feature: MA Experiment 20000308 PARAMETER Experiment Name: At_100mM_NaCl__P Parameter: Tissue Value: Whole Plant
  misc_feature: MA Experiment 20000308 PARAMETER Experiment Name: At_100mM_NaCl__P Parameter: Treatment Value: 100mM NaCl vs. No Treatment
  misc_feature: MA Experiment ID: 20000436 Result: Down-regulated in Transcription
  misc_feature: MA Experiment 20000436 PARAMETER Experiment Name: At_Drought_P Parameter: Age (day) Value: 7
  misc_feature: MA Experiment 20000436 PARAMETER Experiment Name: At_Drought_P Parameter: Organism Value: A. thaliana
  misc_feature: MA Experiment 20000436 PARAMETER Experiment Name: At_Drought_P Parameter: Plant Line Value: WS
  misc_feature: MA Experiment 20000436 PARAMETER Experiment Name: At_Drought_P Parameter: Timepoint (hr) Value: 12
  misc_feature: MA Experiment 20000436 PARAMETER Experiment Name: At_Drought_P Parameter: Tissue Value: Whole Plant
  misc_feature: MA Experiment 20000436 PARAMETER Experiment Name: At_Drought_P Parameter: Treatment Value: Drought vs. No Drought
  misc_feature: MA Experiment ID: 20000437 Result: Down-regulated in Transcription
  misc_feature: MA Experiment 20000437 PARAMETER Experiment Name: At_Drought_P Parameter: Age (day) Value: 8
  misc_feature: MA Experiment 20000437 PARAMETER Experiment Name: At_Drought_P Parameter: Organism Value: A. thaliana
  misc_feature: MA Experiment 20000437 PARAMETER Experiment Name: At_Drought_P Parameter: Plant Line Value: WS
  misc_feature: MA Experiment 20000437 PARAMETER Experiment Name: At_Drought_P Parameter: Timepoint (hr) Value: 24
  misc_feature: MA Experiment 20000437 PARAMETER Experiment Name: At_Drought_P Parameter: Tissue Value: Whole Plant
  misc_feature: MA Experiment 20000437 PARAMETER Experiment Name: At_Drought_P Parameter: Treatment Value: Drought vs. No Drought
  misc_feature: MA Experiment ID: 20000438 Result: Up-regulated in Transcription
  misc_feature: MA Experiment 20000438 PARAMETER Experiment Name: At_Shoots__P Parameter: Age (day) Value: 14
  misc_feature: MA Experiment 20000438 PARAMETER Experiment Name: At_Shoots__P Parameter: Tissue Value: Shoots vs. Whole Plant
  misc_feature: MA Experiment ID: 20000527 Result: Up-regulated in Transcription
  misc_feature: MA Experiment 20000527 PARAMETER Experiment Name: At_10percent_PEG_P Parameter: Age (day) Value: 20
  misc_feature: MA Experiment 20000527 PARAMETER Experiment Name: At_10percent_PEG_P Parameter: Organism Value: A. thaliana
  misc_feature: MA Experiment 20000527 PARAMETER Experiment Name: At_10percent_PEG_P Parameter: Plant Line Value: WS
  misc_feature: MA Experiment 20000527 PARAMETER Experiment Name: At_10percent_PEG_P Parameter: Timepoint (day) Value: 20
  misc_feature: MA Experiment 20000527 PARAMETER Experiment Name: At_10percent_PEG_P Parameter: Tissue Value: Whole Plant
  misc_feature: MA Experiment 20000527 PARAMETER Experiment Name: At_10percent_PEG_P Parameter: Treatment Value: 10percent PEG vs. No Treatment
  misc_feature: MA Experiment ID: 20000709 Result: Up-regulated in Transcription
  misc_feature: MA Experiment 20000709 PARAMETER Experiment Name: At_15mM_NH4NO3_L-to-H_P Parameter: Age (hr) Value: 14
  misc_feature: MA Experiment 20000709 PARAMETER Experiment Name: At_15mM_NH4NO3_L-to-H_P Parameter: Organism Value: A. thaliana
  misc_feature: MA Experiment 20000709 PARAMETER Experiment Name: At_15mM_NH4NO3_L-to-H_P Parameter: Plant Line Value: WS
  misc_feature: MA Experiment 20000709 PARAMETER Experiment Name: At_15mM_NH4NO3_L-to-H_P Parameter: Timepoint (hr) Value: 4
  misc_feature: MA Experiment 20000709 PARAMETER Experiment Name: At_15mM_NH4NO3_L-to-H_P Parameter: Tissue Value: Aerial
  misc_feature: MA Experiment 20000709 PARAMETER Experiment Name: At_15mM_NH4NO3_L-to-H_P Parameter: Treatment Value: 15mM NH4NO3 vs. 30mM Mannitol
  misc_feature: MA Experiment ID: 20000794 Result: Down-regulated in Transcription
  misc_feature: MA Experiment 20000794 PARAMETER Experiment Name: At_Petals_P Parameter: Age (day) Value: 23-25 days
  misc_feature: MA Experiment 20000794 PARAMETER Experiment Name: At_Petals_P Parameter: Plant Line Value: WS
  misc_feature: MA Experiment 20000794 PARAMETER Experiment Name: At_Petals_P Parameter: Tissue Value: Petals vs. Whole plant
  misc_feature: MA Experiment ID: 20001248 Result: Down-regulated in Transcription
  misc_feature: MA Experiment 20001248 PARAMETER Experiment Name: At_Far-red-induction_P Parameter: Age (day) Value: 7
  misc_feature: MA Experiment 20001248 PARAMETER Experiment Name: At_Far-red-induction_P Parameter: Light Value: Far-red vs. White
  misc_feature: MA Experiment 20001248 PARAMETER Experiment Name: At_Far-red-induction_P Parameter: Organism Value: A. thaliana
  misc_feature: MA Experiment 20001248 PARAMETER Experiment Name: At_Far-red-induction_P Parameter: Plant Line Value: Columbia
  misc_feature: MA Experiment 20001248 PARAMETER Experiment Name: At_Far-red-induction_P Parameter: Timepoint (hr) Value: 4
  misc_feature: MA Experiment 20001248 PARAMETER Experiment Name: At_Far-red-induction_P Parameter: Tissue Value: Whole Plant
  misc_feature: MA Experiment ID: 20001450 Result: Down-regulated in Transcription
  misc_feature: MA Experiment 20001450 PARAMETER Experiment Name: At_Far-red-induction_P Parameter: Age (day) Value: 7
  misc_feature: MA Experiment 20001450 PARAMETER Experiment Name: At_Far-red-induction_P Parameter: Light Value: Far-red vs. White
  misc_feature: MA Experiment 20001450 PARAMETER Experiment Name: At_Far-red-induction_P Parameter: Organism Value: A. thaliana
  misc_feature: MA Experiment 20001450 PARAMETER Experiment Name: At_Far-red-induction_P Parameter: Plant Line Value: Columbia
  misc_feature: MA Experiment 20001450 PARAMETER Experiment Name: At_Far-red-induction_P Parameter: Timepoint (hr) Value: 8
  misc_feature: MA Experiment 20001450 PARAMETER Experiment Name: At_Far-red-induction_P Parameter: Tissue Value: Whole Plant
  misc_feature: MA Experiment ID: 20001457 Result: Up-regulated in Transcription
  misc_feature: MA Experiment 20001457 PARAMETER Experiment Name: At_50mM_NH4NO3_L-to-H_P Parameter: Age (day) Value: Undefined
  misc_feature: MA Experiment 20001457 PARAMETER Experiment Name: At_50mM_NH4NO3_L-to-H_P Parameter: Organism Value: Undefined
  misc_feature: MA Experiment 20001457 PARAMETER Experiment Name: At_50mM_NH4NO3_L-to-H_P Parameter: Plant Line Value: Undefined
  misc_feature: MA Experiment 20001457 PARAMETER Experiment Name: At_50mM_NH4NO3_L-to-H_P Parameter: Timepoint (hr) Value: 0.5
  misc_feature: MA Experiment 20001457 PARAMETER Experiment Name: At_50mM_NH4NO3_L-to-H_P Parameter: Tissue Value: Siliques
  misc_feature: MA Experiment 20001457 PARAMETER Experiment Name: At_50mM_NH4NO3_L-to-H_P Parameter: Treatment Value: 50mM NH4NO3 vs. 100mM Manitol
  misc_feature: MA Experiment ID: 20001458 Result: Up-regulated in Transcription
  misc_feature: MA Experiment 20001458 PARAMETER Experiment Name: At_50mM_NH4NO3_L-to-H_P Parameter: Age (day) Value: Undefined
  misc_feature: MA Experiment 20001458 PARAMETER Experiment Name: At_50mM_NH4NO3_L-to-H_P Parameter: Organism Value: Undefined
  misc_feature: MA Experiment 20001458 PARAMETER Experiment Name: At_50mM_NH4NO3_L-to-H_P Parameter: Plant Line Value: Undefined
  misc_feature: MA Experiment 20001458 PARAMETER Experiment Name: At_50mM_NH4NO3_L-to-H_P Parameter: Timepoint (hr) Value: 2
  misc_feature: MA Experiment 20001458 PARAMETER Experiment Name: At_50mM_NH4NO3_L-to-H_P Parameter: Tissue Value: Siliques
  misc_feature: MA Experiment 20001458 PARAMETER Experiment Name: At_50mM_NH4NO3_L-to-H_P Parameter: Treatment Value: 50mM NH4NO3 vs. 100mM Manitol
  misc_feature: MA Experiment ID: 20001459 Result: Up-regulated in Transcription
  misc_feature: MA Experiment 20001459 PARAMETER Experiment Name: At_50mM_NH4NO3_L-to-H_P Parameter: Age (day) Value: Undefined
  misc_feature: MA Experiment 20001459 PARAMETER Experiment Name: At_50mM_NH4NO3_L-to-H_P Parameter: Organism Value: Undefined
  misc_feature: MA Experiment 20001459 PARAMETER Experiment Name: At_50mM_NH4NO3_L-to-H_P Parameter: Plant Line Value: Undefined
  misc_feature: MA Experiment 20001459 PARAMETER Experiment Name: At_50mM_NH4NO3_L-to-H_P Parameter: Timepoint (hr) Value: 4
  misc_feature: MA Experiment 20001459 PARAMETER Experiment Name: At_50mM_NH4NO3_L-to-H_P Parameter: Tissue Value: Siliques
  misc_feature: MA Experiment 20001459 PARAMETER Experiment Name: At_50mM_NH4NO3_L-to-H_P Parameter: Treatment Value: 50mM NH4NO3 vs. 100mM Manitol
  misc_feature: MA Experiment ID: 20001555 Result: Up-regulated in Transcription
  misc_feature: MA Experiment 20001555 PARAMETER Experiment Name: At_Drought_Soil_Dry_P Parameter: Age (day) Value: 24
  misc_feature: MA Experiment 20001555 PARAMETER Experiment Name: At_Drought_Soil_Dry_P Parameter: Organism Value: A. thaliana
  misc_feature: MA Experiment 20001555 PARAMETER Experiment Name: At_Drought_Soil_Dry_P Parameter: Plant Line Value: WS
  misc_feature: MA Experiment 20001555 PARAMETER Experiment Name: At_Drought_Soil_Dry_P Parameter: Post Timepoint (hr) Value: None
  misc_feature: MA Experiment 20001555 PARAMETER Experiment Name: At_Drought_Soil_Dry_P Parameter: Post-Treatment Value: None
  misc_feature: MA Experiment 20001555 PARAMETER Experiment Name: At_Drought_Soil_Dry_P Parameter: Timepoint (day) Value: 10
  misc_feature: MA Experiment 20001555 PARAMETER Experiment Name: At_Drought_Soil_Dry_P Parameter: Treatment Value: Drought vs. No Drought
  misc_feature: MA Experiment ID: 20001557 Result: Up-regulated in Transcription
  misc_feature: MA Experiment 20001557 PARAMETER Experiment Name: At_Drought_Soil_Dry_P Parameter: Age (day) Value: 27
  misc_feature: MA Experiment 20001557 PARAMETER Experiment Name: At_Drought_Soil_Dry_P Parameter: Organism Value: A. thaliana
  misc_feature: MA Experiment 20001557 PARAMETER Experiment Name: At_Drought_Soil_Dry_P Parameter: Plant Line Value: WS
  misc_feature: MA Experiment 20001557 PARAMETER Experiment Name: At_Drought_Soil_Dry_P Parameter: Post Timepoint (hr) Value: 3
  misc_feature: MA Experiment 20001557 PARAMETER Experiment Name: At_Drought_Soil_Dry_P Parameter: Post-Treatment Value: Re-Water vs. No Drought
  misc_feature: MA Experiment 20001557 PARAMETER Experiment Name: At_Drought_Soil_Dry_P Parameter: Timepoint (day) Value: 13
  misc_feature: MA Experiment 20001557 PARAMETER Experiment Name: At_Drought_Soil_Dry_P Parameter: Treatment Value: Drought vs. No Drought
  misc_feature: MA Experiment ID: 20001560 Result: Up-regulated in Transcription
  misc_feature: MA Experiment 20001560 PARAMETER Experiment Name: At_Drought_Soil_Dry_P Parameter: Age (day) Value: 28
  misc_feature: MA Experiment 20001560 PARAMETER Experiment Name: At_Drought_Soil_Dry_P Parameter: Organism Value: A. thaliana
  misc_feature: MA Experiment 20001560 PARAMETER Experiment Name: At_Drought_Soil_Dry_P Parameter: Plant Line Value: WS
  misc_feature: MA Experiment 20001560 PARAMETER Experiment Name: At_Drought_Soil_Dry_P Parameter: Post Timepoint (hr) Value: None
  misc_feature: MA Experiment 20001560 PARAMETER Experiment Name: At_Drought_Soil_Dry_P Parameter: Post-Treatment Value: None
  misc_feature: MA Experiment 20001560 PARAMETER Experiment Name: At_Drought_Soil_Dry_P Parameter: Timepoint (day) Value: 14
  misc_feature: MA Experiment 20001560 PARAMETER Experiment Name: At_Drought_Soil_Dry_P Parameter: Treatment Value: Drought vs. No Drought
  misc_feature: MA Experiment ID: 20001757 Result: Up-regulated in Transcription
  misc_feature: MA Experiment 20001757 PARAMETER Experiment Name: At_50mM_NH4NO3_L-to-H_P Parameter: Timepoint (hr) Value: 6
  misc_feature: MA Experiment 20001757 PARAMETER Experiment Name: At_50mM_NH4NO3_L-to-H_P Parameter: Tissue Value: Leaf
  misc_feature: MA Experiment 20001757 PARAMETER Experiment Name: At_50mM_NH4NO3_L-to-H_P Parameter: Treatment Value: 50mM NH4NO3 vs 100mM Mannitol
  misc_feature: MA Experiment ID: 20001759 Result: Up-regulated in Transcription
  misc_feature: MA Experiment 20001759 PARAMETER Experiment Name: At_50mM_NH4NO3_L-to-H_P Parameter: Timepoint (hr) Value: 1
  misc_feature: MA Experiment 20001759 PARAMETER Experiment Name: At_50mM_NH4NO3_L-to-H_P Parameter: Tissue Value: Siliques
  misc_feature: MA Experiment 20001759 PARAMETER Experiment Name: At_50mM_NH4NO3_L-to-H_P Parameter: Treatment Value: 50mM NH4NO3 vs 100mM Mannitol
  misc_feature: MA Experiment ID: 20001760 Result: Up-regulated in Transcription
  misc_feature: MA Experiment 20001760 PARAMETER Experiment Name: At_50mM_NH4NO3_L-to-H_P Parameter: Timepoint (hr) Value: 2
  misc_feature: MA Experiment 20001760 PARAMETER Experiment Name: At_50mM_NH4NO3_L-to-H_P Parameter: Tissue Value: Siliques
  misc_feature: MA Experiment 20001760 PARAMETER Experiment Name: At_50mM_NH4NO3_L-to-H_P Parameter: Treatment Value: 50mM NH4NO3 vs 100mM Mannitol
  misc_feature: MA Experiment ID: 20001906 Result: Down-regulated in Transcription
  misc_feature: MA Experiment 20001906 PARAMETER Experiment Name: At_Drought_Reproduction_P Parameter: Age (day) Value: 35
  misc_feature: MA Experiment 20001906 PARAMETER Experiment Name: At_Drought_Reproduction_P Parameter: Organism Value: A. thaliana
  misc_feature: MA Experiment 20001906 PARAMETER Experiment Name: At_Drought_Reproduction_P Parameter: Plant Line Value: WS
  misc_feature: MA Experiment 20001906 PARAMETER Experiment Name: At_Drought_Reproduction_P Parameter: Timepoint (day) Value: 5
  misc_feature: MA Experiment 20001906 PARAMETER Experiment Name: At_Drought_Reproduction_P Parameter: Tissue Value: Siliques
  misc_feature: MA Experiment 20001906 PARAMETER Experiment Name: At_Drought_Reproduction_P Parameter: Treatment Value: Drought vs. No Drought
  misc_feature: MA Experiment ID: 20001908 Result: Down-regulated in Transcription
  misc_feature: MA Experiment 20001908 PARAMETER Experiment Name: At_Drought_Reproduction_P Parameter: Age (day) Value: 40
  misc_feature: MA Experiment 20001908 PARAMETER Experiment Name: At_Drought_Reproduction_P Parameter: Organism Value: A. thaliana
  misc_feature: MA Experiment 20001908 PARAMETER Experiment Name: At_Drought_Reproduction_P Parameter: Plant Line Value: WS
  misc_feature: MA Experiment 20001908 PARAMETER Experiment Name: At_Drought_Reproduction_P Parameter: Timepoint (day) Value: 10
  misc_feature: MA Experiment 20001908 PARAMETER Experiment Name: At_Drought_Reproduction_P Parameter: Tissue Value: Siliques
  misc_feature: MA Experiment 20001908 PARAMETER Experiment Name: At_Drought_Reproduction_P Parameter: Treatment Value: Drought vs. No Drought
  misc_feature: MA Experiment ID: 20001911 Result: Down-regulated in Transcription
  misc_feature: MA Experiment 20001911 PARAMETER Experiment Name: At_Drought_Reproduction_P Parameter: Age (day) Value: 40
  misc_feature: MA Experiment 20001911 PARAMETER Experiment Name: At_Drought_Reproduction_P Parameter: Organism Value: A. thaliana
  misc_feature: MA Experiment 20001911 PARAMETER Experiment Name: At_Drought_Reproduction_P Parameter: Plant Line Value: WS
  misc_feature: MA Experiment 20001911 PARAMETER Experiment Name: At_Drought_Reproduction_P Parameter: Timepoint (day) Value: 10
  misc_feature: MA Experiment 20001911 PARAMETER Experiment Name: At_Drought_Reproduction_P Parameter: Tissue Value: Flowers
  misc_feature: MA Experiment 20001911 PARAMETER Experiment Name: At_Drought_Reproduction_P Parameter: Treatment Value: Drought vs. No Drought

SEQ ID NO: 44965 - protein, 589 aa, Arabidopsis thaliana; identical to SEQ ID NO: 37076
  peptide (1)..(589): Ceres Seq. ID no. 12559843
  misc_feature (204)..(527): Pfam Name: Asparagine synthase Pfam Description: Asparagine synthase
  misc_feature (204)..(527): Pfam Name: Asparagine synthase Pfam Description: Asparagine synthase
  misc_feature (204)..(527): Pfam Name: Asparagine synthase Pfam Description: Asparagine synthase
  misc_feature (6)..(566): Homolog of NCBI NO: 26246639 NR Description: Asparagine synthetase B
  misc_feature (12)..(589): Homolog of NCBI NO: 3132675 NR Description: asparagine synthetase [Elaeagnus umbellata]
  misc_feature (12)..(586): Homolog of NCBI NO: 399064 NR Description: Asparagine synthase [glutamine-hydrolyzing] (AS)
  misc_feature (12)..(586): Homolog of NCBI NO: 1617002 NR Description: asparagine synthetase [Asparagus officinalis]
  misc_feature (12)..(578): Homolog of NCBI NO: 13925886 NR Description: glutamine-dependent asparagine synthetase 1
  misc_feature (6)..(566): Homolog of NCBI NO: 26246639 NR Description: Asparagine synthetase B
  misc_feature (12)..(586): Homolog of NCBI NO: 399064 NR Description: Asparagine synthase [glutamine-hydrolyzing] (AS)
  misc_feature (12)..(578): Homolog of NCBI NO: 13925886 NR Description: glutamine-dependent asparagine synthetase 1
  misc_feature (12)..(586): Homolog of NCBI NO: 1617002 NR Description: asparagine synthetase [Asparagus officinalis]
  misc_feature (12)..(586): Homolog of NCBI NO: 399064 NR Description: Asparagine synthase [glutamine-hydrolyzing] (AS)
  misc_feature (12)..(589): Homolog of NCBI NO: 3132675 NR Description: asparagine synthetase [Elaeagnus umbellata]
  misc_feature (6)..(566): Homolog of NCBI NO: 26246639 NR Description: Asparagine synthetase B
  misc_feature (12)..(569): Homolog of NCBI NO: 15238108 NR Description: asparagine synthetase ASN3
  misc_feature (12)..(569): Homolog of NCBI NO: 25293864 NR Description: asparagine synthase (glutamine-hydrolyzing) (EC
  misc_feature (12)..(571): Homolog of NCBI NO: 22208544 NR Description: asparagine synthetase 2 [Striga hermonthica]
  misc_feature (12)..(569): Homolog of NCBI NO: 6049843 NR Description: asparagine synthetase [Helianthus annuus]
  misc_feature (12)..(574): Homolog of NCBI NO: 3182921 NR Description: Asparagine synthetase
  misc_feature (12)..(569): Homolog of NCBI NO: 15238108 NR Description: asparagine synthetase ASN3
  misc_feature (12)..(569): Homolog of NCBI NO: 25293864 NR Description: asparagine synthase (glutamine-hydrolyzing) (EC
  misc_feature (12)..(571): Homolog of NCBI NO: 22208544 NR Description: asparagine synthetase 2 [Striga hermonthica]
  misc_feature (12)..(569): Homolog of NCBI NO: 6049843 NR Description: asparagine synthetase [Helianthus annuus]
  misc_feature (12)..(574): Homolog of NCBI NO: 3182921 NR Description: Asparagine synthetase
  misc_feature (12)..(578): Homolog of NCBI NO: 13925886 NR Description: glutamine-dependent asparagine synthetase 1
  misc_feature (12)..(586): Homolog of NCBI NO: 1617002 NR Description: asparagine synthetase [Asparagus officinalis]
  misc_feature (12)..(589): Homolog of NCBI NO: 3132675 NR Description: asparagine synthetase [Elaeagnus umbellata]
  misc_feature (12)..(574): Homolog of NCBI NO: 3182921 NR Description: Asparagine synthetase
  misc_feature (12)..(569): Homolog of NCBI NO: 6049843 NR Description: asparagine synthetase [Helianthus annuus]
  misc_feature (12)..(571): Homolog of NCBI NO: 22208544 NR Description: asparagine synthetase 2 [Striga hermonthica]
  misc_feature (12)..(569): Homolog of NCBI NO: 25293864 NR Description: asparagine synthase (glutamine-hydrolyzing) (EC
  misc_feature (12)..(569): Homolog of NCBI NO: 15238108 NR Description: asparagine synthetase ASN3

SEQ ID NO: 44966 - protein, 578 aa, Arabidopsis thaliana; identical to SEQ ID NO: 37077
  peptide (1)..(578): Ceres Seq. ID no. 12559844
  misc_feature (193)..(516): Pfam Name: Asparagine synthase Pfam Description: Asparagine synthase
  misc_feature (193)..(516): Pfam Name: Asparagine synthase Pfam Description: Asparagine synthase
  misc_feature (193)..(516): Pfam Name: Asparagine synthase Pfam Description: Asparagine synthase
  misc_feature (1)..(555): Homolog of NCBI NO: 26246639 NR Description: Asparagine synthetase B
  misc_feature (1)..(578): Homolog of NCBI NO: 3132675 NR Description: asparagine synthetase [Elaeagnus umbellata]
  misc_feature (1)..(575): Homolog of NCBI NO: 399064 NR Description: Asparagine synthase [glutamine-hydrolyzing] (AS)
  misc_feature (1)..(575): Homolog of NCBI NO: 1617002 NR Description: asparagine synthetase [Asparagus officinalis]
  misc_feature (1)..(567): Homolog of NCBI NO: 13925886 NR Description: glutamine-dependent asparagine synthetase 1
  misc_feature (1)..(555): Homolog of NCBI NO: 26246639 NR Description: Asparagine synthetase B
  misc_feature (1)..(575): Homolog of NCBI NO: 399064 NR Description: Asparagine synthase [glutamine-hydrolyzing] (AS)
  misc_feature (1)..(567): Homolog of NCBI NO: 13925886 NR Description: glutamine-dependent asparagine synthetase 1
  misc_feature (1)..(575): Homolog of NCBI NO: 1617002 NR Description: asparagine synthetase [Asparagus officinalis]
  misc_feature (1)..(575): Homolog of NCBI NO: 399064 NR Description: Asparagine synthase [glutamine-hydrolyzing] (AS)
  misc_feature (1)..(578): Homolog of NCBI NO: 3132675 NR Description: asparagine synthetase [Elaeagnus umbellata]
  misc_feature (1)..(555): Homolog of NCBI NO: 26246639 NR Description: Asparagine synthetase B
  misc_feature (1)..(558): Homolog of NCBI NO: 15238108 NR Description: asparagine synthetase ASN3
  misc_feature (1)..(558): Homolog of NCBI NO: 25293864 NR Description: asparagine synthase (glutamine-hydrolyzing) (EC
  misc_feature (1)..(560): Homolog of NCBI NO: 22208544 NR Description: asparagine synthetase 2 [Striga hermonthica]
  misc_feature (1)..(558): Homolog of NCBI NO: 6049843 NR Description: asparagine synthetase [Helianthus annuus]
  misc_feature (1)..(563): Homolog of NCBI NO: 3182921 NR Description: Asparagine synthetase
  misc_feature (1)..(558): Homolog of NCBI NO: 15238108 NR Description: asparagine synthetase ASN3
  misc_feature (1)..(558): Homolog of NCBI NO: 25293864 NR Description: asparagine synthase (glutamine-hydrolyzing) (EC
  misc_feature (1)..(560): Homolog of NCBI NO: 22208544 NR Description: asparagine synthetase 2 [Striga hermonthica]
  misc_feature (1)..(558): Homolog of NCBI NO: 6049843 NR Description: asparagine synthetase [Helianthus annuus]
  misc_feature (1)..(563): Homolog of NCBI NO: 3182921 NR Description: Asparagine synthetase
  misc_feature (1)..(567): Homolog of NCBI NO: 13925886 NR Description: glutamine-dependent asparagine synthetase 1
  misc_feature (1)..(575): Homolog of NCBI NO: 1617002 NR Description: asparagine synthetase [Asparagus officinalis]
  misc_feature (1)..(578): Homolog of NCBI NO: 3132675 NR Description: asparagine synthetase [Elaeagnus umbellata]
  misc_feature (1)..(563): Homolog of NCBI NO: 3182921 NR Description: Asparagine synthetase
  misc_feature (1)..(558): Homolog of NCBI NO: 6049843 NR Description: asparagine synthetase [Helianthus annuus]
  misc_feature (1)..(560): Homolog of NCBI NO: 22208544 NR Description: asparagine synthetase 2 [Striga hermonthica]
  misc_feature (1)..(558): Homolog of NCBI NO: 25293864 NR Description: asparagine synthase (glutamine-hydrolyzing) (EC
  misc_feature (1)..(558): Homolog of NCBI NO: 15238108 NR Description: asparagine synthetase ASN3

SEQ ID NO: 44967 - protein, 463 aa, Arabidopsis thaliana; identical to SEQ ID NO: 37078
  peptide (1)..(463): Ceres Seq. ID no. 12559845
  misc_feature (78)..(401): Pfam Name: Asparagine synthase Pfam Description: Asparagine synthase
  misc_feature (78)..(401): Pfam Name: Asparagine synthase Pfam Description: Asparagine synthase
  misc_feature (78)..(401): Pfam Name: Asparagine synthase Pfam Description: Asparagine synthase
  misc_feature (1)..(440): Homolog of NCBI NO: 26246639 NR Description: Asparagine synthetase B
  misc_feature (1)..(463): Homolog of NCBI NO: 3132675 NR Description: asparagine synthetase [Elaeagnus umbellata]
  misc_feature (1)..(460): Homolog of NCBI NO: 399064 NR Description: Asparagine synthase [glutamine-hydrolyzing] (AS)
  misc_feature (1)..(460): Homolog of NCBI NO: 1617002 NR Description: asparagine synthetase [Asparagus officinalis]
  misc_feature (1)..(452): Homolog of NCBI NO: 13925886 NR Description: glutamine-dependent asparagine synthetase 1
  misc_feature (1)..(440): Homolog of NCBI NO: 26246639 NR Description: Asparagine synthetase B
  misc_feature (1)..(460): Homolog of NCBI NO: 399064 NR Description: Asparagine synthase [glutamine-hydrolyzing] (AS)
  misc_feature (1)..(452): Homolog of NCBI NO: 13925886 NR Description: glutamine-dependent asparagine synthetase 1
  misc_feature (1)..(460): Homolog of NCBI NO: 1617002 NR Description: asparagine synthetase [Asparagus officinalis]
  misc_feature (1)..(460): Homolog of NCBI NO: 399064 NR Description: Asparagine synthase [glutamine-hydrolyzing] (AS)
  misc_feature (1)..(463): Homolog of NCBI NO: 3132675 NR Description: asparagine synthetase [Elaeagnus umbellata]
  misc_feature (1)..(440): Homolog of NCBI NO: 26246639 NR Description: Asparagine synthetase B
  misc_feature (1)..(443): Homolog of NCBI NO: 15238108 NR Description: asparagine synthetase ASN3
  misc_feature (1)..(443): Homolog of NCBI NO: 25293864 NR Description: asparagine synthase (glutamine-hydrolyzing) (EC
  misc_feature (1)..(445): Homolog of NCBI NO: 22208544 NR Description: asparagine synthetase 2 [Striga hermonthica]
  misc_feature (1)..(443): Homolog of NCBI NO: 6049843 NR Description: asparagine synthetase [Helianthus annuus]
  misc_feature (1)..(448): Homolog of NCBI NO: 3182921 NR Description: Asparagine synthetase
  misc_feature (1)..(443): Homolog of NCBI NO: 15238108 NR Description: asparagine synthetase ASN3
  misc_feature (1)..(443): Homolog of NCBI NO: 25293864 NR Description: asparagine synthase (glutamine-hydrolyzing) (EC
  misc_feature (1)..(445): Homolog of NCBI NO: 22208544 NR Description: asparagine synthetase 2 [Striga hermonthica]
  misc_feature (1)..(443): Homolog of NCBI NO: 6049843 NR Description: asparagine synthetase [Helianthus annuus]
  misc_feature (1)..(448): Homolog of NCBI NO: 3182921 NR Description: Asparagine synthetase
  misc_feature (1)..(452): Homolog of NCBI NO: 13925886 NR Description: glutamine-dependent asparagine synthetase 1
  misc_feature (1)..(460): Homolog of NCBI NO: 1617002 NR Description: asparagine synthetase [Asparagus officinalis]
  misc_feature (1)..(463): Homolog of NCBI NO: 3132675 NR Description: asparagine synthetase [Elaeagnus umbellata]
  misc_feature (1)..(448): Homolog of NCBI NO: 3182921 NR Description: Asparagine synthetase
  misc_feature (1)..(443): Homolog of NCBI NO: 6049843 NR Description: asparagine synthetase [Helianthus annuus]
  misc_feature (1)..(445): Homolog of NCBI NO: 22208544 NR Description: asparagine synthetase 2 [Striga hermonthica]
  misc_feature (1)..(443): Homolog of NCBI NO: 25293864 NR Description: asparagine synthase (glutamine-hydrolyzing) (EC
  misc_feature (1)..(443): Homolog of NCBI NO: 15238108 NR Description: asparagine synthetase ASN3

SEQ ID NO: 44968 - DNA, 2486 bp, Arabidopsis thaliana
  misc_feature (1)..(2486): Ceres Seq. ID no. 12559846
  misc_feature: MA Experiment ID: 20000173 Result: Down-regulated in Transcription
  misc_feature: MA Experiment 20000173 PARAMETER Experiment Name: At_42deg_Heat_P Parameter: Age (day) Value: 14
  misc_feature: MA Experiment 20000173 PARAMETER Experiment Name: At_42deg_Heat_P Parameter: Organism Value: A. thaliana
  misc_feature: MA Experiment 20000173 PARAMETER Experiment Name: At_42deg_Heat_P Parameter: Plant Line Value: WS
  misc_feature: MA Experiment 20000173 PARAMETER Experiment Name: At_42deg_Heat_P Parameter: Temperature (deg C) Value: 42 vs. 22
  misc_feature: MA Experiment 20000173 PARAMETER Experiment Name: At_42deg_Heat_P Parameter: Timepoint (hr) Value: 6
  misc_feature: MA Experiment 20000173 PARAMETER Experiment Name: At_42deg_Heat_P Parameter: Tissue Value: Aerial
  misc_feature: MA Experiment ID: 20000184 Result: Down-regulated in Transcription
  misc_feature: MA Experiment 20000184 PARAMETER Experiment Name: At_Shoots__P Parameter: Age (day) Value: 7
  misc_feature: MA Experiment 20000184 PARAMETER Experiment Name: At_Shoots__P Parameter: Tissue Value: Shoots vs. Whole Plant
  misc_feature: MA Experiment ID: 20000794 Result: Up-regulated in Transcription
  misc_feature: MA Experiment 20000794 PARAMETER Experiment Name: At_Petals_P Parameter: Age (day) Value: 23-25 days
  misc_feature: MA Experiment 20000794 PARAMETER Experiment Name: At_Petals_P Parameter: Plant Line Value: WS
  misc_feature: MA Experiment 20000794 PARAMETER Experiment Name: At_Petals_P Parameter: Tissue Value: Petals vs. Whole plant
aaggaacatcaagttaggaaattgattggtatacttcaacttcttcttgttgcagtctgtctctgatgtggtgattgtatccgtcaggtttctatgatacagtatgcaaacccggcattagttcaccggaaccgatgtctcccggtttaggagttgaattttgctaaaaccggctaaaaagtgcgcaatttggccaagcgtactattgcagaagagggacgatggcgatgacaagctggccatcaacgggaagacaaagaagacatcaattggcttccatgttgctcctggttcttgtagttgtcggaatctatgttcctgtcttcgctcttctcccttcactgtcatatactcctcagtctctaccttctgctatacctcaggacgagaagatgatatctcgcaagttttatatcaaggatgacaatttctggaaagatgggaatcgttttcagatcattggtggtgatttgcattactttcgtgttcttccagagtactgggaggatcggcttttaagagccaatgctttaggcttgaatactattcaagtatacgttccttggaatctgcatgaaccaaagcctgggaagatggtttttgagggtattggtgatcttgtctcctttctcaagctgtgtgagaaactagattttctggttatgctacgtgctggaccttatatctgtggagaatgggatttgggaggctttcctgcttggttacttgctgtgaaaccacgtctccaactaaggacatcagatcctgtatatcttaagttggttgaaagatggtgggatgttctgttaccgaaggtatttcctctgctttacagcaacgggggtcctgttataatggttcagattgaaaatgaatatggttcatatggaaatgacaaagcttatcttcgtaagctagttagtatggctaggggacacctgggggatgacattattgtgtacacaacagatggagggacaaaagaaactcttgataaaggaactgtccctgtagctgatgtctactcagctgttgatttctctaccggtgatgatccttggccaatatttaaattgcaaaagaagtttaatgctccaggaagatcacctccactttcctcggagttctacactggttggctcacgcattggggtgagaaaattacaaaaacagatgccgaatttacggcagcttctcttgaaaaaattctgtctcgaaatggttctgctgtgctctatatggtgcatggaggaacaaactttggtttctacaatggcgcaaatactggctctgaagaatctgactataaaccagatctgacatcttatgactatgatgctcccattaaggagtctggtgacatagataatccaaaattccaagctcttcagagagtgattaagaagtacaatgcttcaccacaccccattagcccatccaataagcaacggaaagcttatggctctatcaagatgcagatgacaacatcactgtttgatttagttcgtatgacagatcctgcagatgtgatcacctccgccaacccaatttcaatggaatctgttggacagatgttcggatttcttttatatgaatcttcatacatcgcaaaaaagagtgggaatacactaagaatacccaaggttcatgacagagctcaagtgtttgtttcatgtctttcccaagatgttgatgtgggagtactgagatacattggtactactgagagatggaacaaccaacctatttctcttccaactattgagtgtaccacaaacactagcttatttattctggttgaaaacatgggtcgtgtaaattatgggccatatatctttgatgacaagggtattttgtcttcggtttatctagatggtcaaattctccatggatggaagatgataccaattccttttcacaatctaaatcaagagccaaatctcactttcgagatgcaacataccaaaaacagaagtaaaaagttcgagcttactaatgatgttggtcgaaaggaacccgctctgtttgctggtgaattctctatcaacagtgaagaagaaatcaaagacacatatctatcattcaacggttggggtaaaggagttgcttttgtcaatgaattcaacattggaagatattggccgtctgttggaccacagtgcaacctctatgttcctgcgccacttcttaagcgtggcaaaaacactttggtggtattcgagttggaatctccgcatctcgagctttcgctggaggcagtggatcaccaagacttcacatgcggttcaaatgtttccaaagttaatcagttgtagattttcagttcacggatacaaccaaaagttccagtcgtgaacaatcagcccgctataaatcatatgttggatgataaagaatttaaagttaaccaaaagatttttgtgtgtccaaaaacatgaaactatacattaaaaagtcagacccgataaaaaaagattttatggtcg

SEQ ID NO: 44969 - protein, 697 aa, Arabidopsis thaliana
  peptide (1)..(697): Ceres Seq. ID no. 12559847
  misc_feature (30)..(314): Pfam Name: Glycosyl hydrolases family 35 Pfam Description: Glycosyl hydrolases family 35
  misc_feature (45)..(490): Homolog of NCBI NO: 15451299 NR Description: hypothetical protein [Macaca fascicularis]
  misc_feature (589)..(672): Homolog of NCBI NO: 7449926 NR Description: beta-galactosidase (EC 3.2.1.23) - Bacillus
  misc_feature (67)..(484): Homolog of NCBI NO: 7449926 NR Description: beta-galactosidase (EC 3.2.1.23) - Bacillus
  misc_feature (499)..(672): Homolog of NCBI NO: 18256820 NR Description: 4833408P15Rik protein [Mus musculus]
  misc_feature (60)..(483): Homolog of NCBI NO: 18256820 NR Description: 4833408P15Rik protein [Mus musculus]
  misc_feature (499)..(672): Homolog of NCBI NO: 26325854 NR Description: unnamed protein product [Mus musculus]
  misc_feature (60)..(483): Homolog of NCBI NO: 26325854 NR Description: unnamed protein product [Mus musculus]
  misc_feature (519)..(659): Homolog of NCBI NO: 25326174 NR Description: Similar to acid beta-galactosidase
  misc_feature (340)..(495): Homolog of NCBI NO: 25326174 NR Description: Similar to acid beta-galactosidase
  misc_feature (1)..(314): Homolog of NCBI NO: 25326174 NR Description: Similar to acid beta-galactosidase
MAMTSWPSTGRQRRHQLASMLLLVLVVVGIYVPVFALLPSLSYTPQSLPSAIPQDEKMISRKFYIKDDNFWKDGNRFQIIGGDLHYFRVLPEYWEDRLLRANALGLNTIQVYVPWNLHEPKPGKMVFEGIGDLVSFLKLCEKLDFLVMLRAGPYICGEWDLGGFPAWLLAVKPRLQLRTSDPVYLKLVERWWDVLLPKVFPLLYSNGGPVIMVQIENEYGSYGNDKAYLRKLVSMARGHLGDDIIVYTTDGGTKETLDKGTVPVADVYSAVDFSTGDDPWPIFKLQKKFNAPGRSPPLSSEFYTGWLTHWGEKITKTDAEFTAASLEKILSRNGSAVLYMVHGGTNFGFYNGANTGSEESDYKPDLTSYDYDAPIKESGDIDNPKFQALQRVIKKYNASPHPISPSNKQRKAYGSIKMQMTTSLFDLVRMTDPADVITSANPISMESVGQMFGFLLYESSYIAKKSGNTLRIPKVHDRAQVFVSCLSQDVDVGVLRYIGTTERWNNQPISLPTIECTTNTSLFILVENMGRVNYGPYIFDDKGILSSVYLDGQILHGWKMIPIPFHNLNQEPNLTFEMQHTKNRSKKFELTNDVGRKEPALFAGEFSINSEEEIKDTYLSFNGWGKGVAFVNEFNIGRYWPSVGPQCNLYVPAPLLKRGKNTLVVFELESPHLELSLEAVDHQDFTCGSNVSKVNQL

SEQ ID NO: 44970 - protein, 695 aa, Arabidopsis thaliana
  peptide (1)..(695): Ceres Seq. ID no. 12559848
  misc_feature (28)..(312): Pfam Name: Glycosyl hydrolases family 35 Pfam Description: Glycosyl hydrolases family 35
  misc_feature (43)..(488): Homolog of NCBI NO: 15451299 NR Description: hypothetical protein [Macaca fascicularis]
  misc_feature (587)..(670): Homolog of NCBI NO: 7449926 NR Description: beta-galactosidase (EC 3.2.1.23) - Bacillus
  misc_feature (65)..(482): Homolog of NCBI NO: 7449926 NR Description: beta-galactosidase (EC 3.2.1.23) - Bacillus
  misc_feature (497)..(670): Homolog of NCBI NO: 18256820 NR Description: 4833408P15Rik protein [Mus musculus]
  misc_feature (58)..(481): Homolog of NCBI NO: 18256820 NR Description: 4833408P15Rik protein [Mus musculus]
  misc_feature (497)..(670): Homolog of NCBI NO: 26325854 NR Description: unnamed protein product [Mus musculus]
  misc_feature (58)..(481): Homolog of NCBI NO: 26325854 NR Description: unnamed protein product [Mus musculus]
  misc_feature (517)..(657): Homolog of NCBI NO: 25326174 NR Description: Similar to acid beta-galactosidase
  misc_feature (338)..(493): Homolog of NCBI NO: 25326174 NR Description: Similar to acid beta-galactosidase
  misc_feature (1)..(312): Homolog of NCBI NO: 25326174 NR Description: Similar to acid beta-galactosidase
MTSWPSTGRQRRHQLASMLLLVLVVVGIYVPVFALLPSLSYTPQSLPSAIPQDEKMISRKFYIKDDNFWKDGNRFQIIGGDLHYFRVLPEYWEDRLLRANALGLNTIQVYVPWNLHEPKPGKMVFEGIGDLVSFLKLCEKLDFLVMLRAGPYICGEWDLGGFPAWLLAVKPRLQLRTSDPVYLKLVERWWDVLLPKVFPLLYSNGGPVIMVQIENEYGSYGNDKAYLRKLVSMARGHLGDDIIVYTTDGGTKETLDKGTVPVADVYSAVDFSTGDDPWPIFKLQKKFNAPGRSPPLSSEFYTGWLTHWGEKITKTDAEFTAASLEKILSRNGSAVLYMVHGGTNFGFYNGANTGSEESDYKPDLTSYDYDAPIKESGDIDNPKFQALQRVIKKYNASPHPISPSNKQRKAYGSIKMQMTTSLFDLVRMTDPADVITSANPISMESVGQMFGFLLYESSYIAKKSGNTLRIPKVHDRAQVFVSCLSQDVDVGVLRYIGTTERWNNQPISLPTIECTTNTSLFILVENMGRVNYGPYIFDDKGILSSVYLDGQILHGWKMIPIPFHNLNQEPNLTFEMQHTKNRSKKFELTNDVGRKEPALFAGEFSINSEEEIKDTYLSFNGWGKGVAFVNEFNIGRYWPSVGPQCNLYVPAPLLKRGKNTLVVFELESPHLELSLEAVDHQDFTCGSNVSKVNQL

SEQ ID NO: 44971 - protein, 678 aa, Arabidopsis thaliana
  peptide (1)..(678): Ceres Seq. ID no. 12559849
  misc_feature (11)..(295): Pfam Name: Glycosyl hydrolases family 35 Pfam Description: Glycosyl hydrolases family 35
  misc_feature (26)..(471): Homolog of NCBI NO: 15451299 NR Description: hypothetical protein [Macaca fascicularis]
  misc_feature (570)..(653): Homolog of NCBI NO: 7449926 NR Description: beta-galactosidase (EC 3.2.1.23) - Bacillus
  misc_feature (48)..(465): Homolog of NCBI NO: 7449926 NR Description: beta-galactosidase (EC 3.2.1.23) - Bacillus
  misc_feature (480)..(653): Homolog of NCBI NO: 18256820 NR Description: 4833408P15Rik protein [Mus musculus]
  misc_feature (41)..(464): Homolog of NCBI NO: 18256820 NR Description: 4833408P15Rik protein [Mus musculus]
  misc_feature (480)..(653): Homolog of NCBI NO: 26325854 NR Description: unnamed protein product [Mus musculus]
  misc_feature (41)..(464): Homolog of NCBI NO: 26325854 NR Description: unnamed protein product [Mus musculus]
  misc_feature (500)..(640): Homolog of NCBI NO: 25326174 NR Description: Similar to acid beta-galactosidase
  misc_feature (321)..(476): Homolog of NCBI NO: 25326174 NR Description: Similar to acid beta-galactosidase
  misc_feature (1)..(295): Homolog of NCBI NO: 25326174 NR Description: Similar to acid beta-galactosidase
MLLLVLVVVGIYVPVFALLPSLSYTPQSLPSAIPQDEKMISRKFYIKDDNFWKDGNRFQIIGGDLHYFRVLPEYWEDRLLRANALGLNTIQVYVPWNLHEPKPGKMVFEGIGDLVSFLKLCEKLDFLVMLRAGPYICGEWDLGGFPAWLLAVKPRLQLRTSDPVYLKLVERWWDVLLPKVFPLLYSNGGPVIMVQIENEYGSYGNDKAYLRKLVSMARGHLGDDIIVYTTDGGTKETLDKGTVPVADVYSAVDFSTGDDPWPIFKLQKKFNAPGRSPPLSSEFYTGWLTHWGEKITKTDAEFTAASLEKILSRNGSAVLYMVHGGTNFGFYNGANTGSEESDYKPDLTSYDYDAPIKESGDIDNPKFQALQRVIKKYNASPHPISPSNKQRKAYGSIKMQMTTSLFDLVRMTDPADVITSANPISMESVGQMFGFLLYESSYIAKKSGNTLRIPKVHDRAQVFVSCLSQDVDVGVLRYIGTTERWNNQPISLPTIECTTNTSLFILVENMGRVNYGPYIFDDKGILSSVYLDGQILHGWKMIPIPFHNLNQEPNLTFEMQHTKNRSKKFELTNDVGRKEPALFAGEFSINSEEEIKDTYLSFNGWGKGVAFVNEFNIGRYWPSVGPQCNLYVPAPLLKRGKNTLVVFELESPHLELSLEAVDHQDFTCGSNVSKVNQL

SEQ ID NO: 44972 - DNA, 2769 bp, Arabidopsis thaliana
  misc_feature (1)..(2769): Ceres Seq. ID no. 13575705
  misc_feature: MA Experiment ID: 20000184 Result: Down-regulated in Transcription
  misc_feature: MA Experiment 20000184 PARAMETER Experiment Name: At_Shoots__P Parameter: Age (day) Value: 7
  misc_feature: MA Experiment 20000184 PARAMETER Experiment Name: At_Shoots__P Parameter: Tissue Value: Shoots vs. Whole Plant
  misc_feature: MA Experiment ID: 20000234 Result: Up-regulated in Transcription
  misc_feature: MA Experiment 20000234 PARAMETER Experiment Name: At_Siliques_P Parameter: Age (day) Value: 21
  misc_feature: MA Experiment 20000234 PARAMETER Experiment Name: At_Siliques_P Parameter: Organism Value: A. thaliana
  misc_feature: MA Experiment 20000234 PARAMETER Experiment Name: At_Siliques_P Parameter: Plant Line Value: WS
  misc_feature: MA Experiment 20000234 PARAMETER Experiment Name: At_Siliques_P Parameter: Tissue Value: Less Than 5mm Siliques vs. Whole Plant
  misc_feature: MA Experiment ID: 20000235 Result: Up-regulated in Transcription
  misc_feature: MA Experiment 20000235 PARAMETER Experiment Name: At_Siliques_P Parameter: Age (day) Value: 21
  misc_feature: MA Experiment 20000235 PARAMETER Experiment Name: At_Siliques_P Parameter: Organism Value: A. thaliana
  misc_feature: MA Experiment 20000235 PARAMETER Experiment Name: At_Siliques_P Parameter: Plant Line Value: WS
  misc_feature: MA Experiment 20000235 PARAMETER Experiment Name: At_Siliques_P Parameter: Tissue Value: 5-10mm Siliques vs. Whole Plant
  misc_feature: MA Experiment ID: 20000264 Result: Up-regulated in Transcription
  misc_feature: MA Experiment 20000264 PARAMETER Experiment Name: At_Open_Flower_P Parameter: Age (day) Value: 21
  misc_feature: MA Experiment 20000264 PARAMETER Experiment Name: At_Open_Flower_P Parameter: Plant Line Value: WS
  misc_feature: MA Experiment 20000264 PARAMETER Experiment Name: At_Open_Flower_P Parameter: Tissue Value: Open Flower vs. Whole Plant
  misc_feature: MA Experiment ID: 20000265 Result: Up-regulated in Transcription
  misc_feature: MA Experiment 20000265 PARAMETER Experiment Name: At_Open_Flower_P Parameter: Age (day) Value: 21
  misc_feature: MA Experiment 20000265 PARAMETER Experiment Name: At_Open_Flower_P Parameter: Plant Line Value: WS
  misc_feature: MA Experiment 20000265 PARAMETER Experiment Name: At_Open_Flower_P Parameter: Tissue Value: Closed Flower vs. Whole Plant
  misc_feature: MA Experiment ID: 20000286 Result: Up-regulated in Transcription
  misc_feature: MA Experiment 20000286 PARAMETER Experiment Name: At_Open_Flower_P Parameter: Age (day) Value: 21
  misc_feature: MA Experiment 20000286 PARAMETER Experiment Name: At_Open_Flower_P Parameter: Plant Line Value: WS
  misc_feature: MA Experiment 20000286 PARAMETER Experiment Name: At_Open_Flower_P Parameter: Tissue Value: Half Open vs. Whole Plant
  misc_feature: MA Experiment ID: 20000794 Result: Up-regulated in Transcription
  misc_feature: MA Experiment 20000794 PARAMETER Experiment Name: At_Petals_P Parameter: Age (day) Value: 23-25 days
  misc_feature: MA Experiment 20000794 PARAMETER Experiment Name: At_Petals_P Parameter: Plant Line Value: WS
  misc_feature: MA Experiment 20000794 PARAMETER Experiment Name: At_Petals_P Parameter: Tissue Value: Petals vs. Whole plant
atgaaaaaaaattggaaggatgaaattaatcgaaagcagctcatccgattcccctgaggcgattatggtgtctcctccttctcactctcgctcttagtagtagtctttcttctccgatcgccgactaacctccggagctttcttcggcggtctctcctctctgttttctacttgaggtttctctcttctcttactttttttattctttgtgcatatctctcttctcttactttactcaccaaatttctaggaatactttttctcctgagatttgggcttttaatttagcttaattcttctgttaagtagaaatatatcatggcgaatctatgaaattatttcttctgttaagtagacattgaaatttgttacaatggcgaatcgtgttttttttttggtctgtctccattttttggtattgtctctaagaaaataagacgtttgtggtatttagtttattaggcgaattggatttgttgaagcatggataacttgtatcttaatcccttggggttagttagatgaattgaatggtcgagggaccattttgctttttcatgggaaaccctggctgaggggaccgtgattgggatcgaaacctaacttgctgtctcattttgttagttcaatctttattgctggagatagatccctttcattggcttagcttggtgccgttttctttgacatatacttaattcaatatgtgtgtatctgtagactcaatagtaagctttagattaaccctttatttcatttaaaccttagctaagaactttctgcaagtacaaagaaggaatgggtagggaagggtttgcaattatgatggctatagggttttaattgacttgttgaagtcgtgttctttaacaagttgttgattttctgggcaatctgatttgaggagtgtgggaccagttggaataaatgccacttagtttttgtgtgatggagagcacaagagggagctaagaaaagtaataccctttctcttgccctttttgttggtctgggtgaaacatagcaaggtttctcttgctgaggttattgataaacgggtgagttaaataaaaacgttgatcagcagtgtgtggtgcttggaattcataaggtttttcttctttcttatgcttttggtagttaatggtattgtctattaggtatctgtttgggttgccagcgttatttataggcttgacaagttttctcttatttttgatgtttggctttcatttacaatcactagttctgcaaacttatggttgtttcagtttttgttactctggcttttggtgataggtctatgaaatcaacccacatcttgaatggactgcaacatggtatcttcgttcccgtgggactgggagaatttgatcatgtccaatcagtcgaagactgaaaatgaaaaaaaacagcaatctactgagtgggaatttgaaaaaggtgaaggaattgaatctatagttccagatttcttaggctttgagaaagtcagtagtggctctgctactagtttctggcacactgccgtatcaaaaagctcgcagtcgacctctatcaactcatcatctcccgaggacaaacgatgcaatcttgcatcacaaagttcccctggagattcttccagcaacatagattttctccaggtgaaaccatccacagctctcgaggtacctattgcctcagctgaatcagatctttgtttgaaactaggaaagcggacatactctgaagaattttggggtaggaacaataatgacctttcagcggtttctatgaatttgttgactccatctgttgttgctcggaagaaaaccaaatcgtgtggtcagagcatgcaagttccgcgttgccaaattgatggctgtgagctggatctctcatcttctaaggattatcatcgcaagcatagagtctgcgaaacgcattcaaagtgcccaaaagttgttgtgagtggcctggaacgtcgtttctgccaacagtgtagcaggttccatgctgtctcagaatttgatgaaaagaaacgaagctgccgcaaacgtctttctcatcataatgcaaggcgtcgcaagccacaaggagtatttccactgaattcagagagggtgttcgatcgaagacagcatacaagtatgttgtggaatgggttgtcccttaacacgagatctgaagaaaagtatacatggggtaccacttatgagacaaagcctacacagatggaaagcggctttactctgagcttccagagaggtaatggctctgaggaccaactgtttactggtagcaccctctctttctctgcgtttcaaacatctggtgggttctcagcagggaaatccaacattcaacttccagacaaaggtgtgggagaatgctcaggaggcctccatgaatctcatgatttctacagtgctctctctcttctgtcaactacttcggattcacaagggatcaaacacactcccgtggccgaaccaccgccaatatttggcactttccctagtcatttcatctgaaagagttaaaaaatgcgaagtcactccataaaaagtcgggttgcatcatccgatggagtttgacagtttgttttcaaataaaataaaaatgtgcaacatccattgctcaagctaaaccagtcactcggttagctcagcttttcttatacatttccaaacatattgtcaatttccttctggattctgttggtatgacaactttgttactctgtcaaacatgtctacgactattttaaaaccatttcagagatta

SEQ ID NO: 44973 - protein, 396 aa, Arabidopsis thaliana
  peptide (1)..(396): Ceres Seq. ID no. 13575706
  misc_feature (175)..(253): Pfam Name: SBP domain Pfam Description: SBP domain
  misc_feature (97)..(254): Homolog of NCBI NO: 30697804 NR Description: squamosa-promoter binding protein -related
  misc_feature (97)..(254): Homolog of NCBI NO: 13877707 NR Description: similar to squamosa-promoter binding protein 1
  misc_feature (97)..(254): Homolog of NCBI NO: 6730637 NR Description: F4N2.13 [Arabidopsis thaliana]
  misc_feature (1)..(287): Homolog of NCBI NO: 15239820 NR Description: squamosa promoter binding protein-related 2
  misc_feature (1)..(371): Homolog of NCBI NO: 25456646 NR Description: squamosa promoter binding protein 2
  misc_feature (5)..(378): Homolog of NCBI NO: 25403307 NR Description: protein F17L21.14 [imported] - Arabidopsis
  misc_feature (1)..(378): Homolog of NCBI NO: 18396302 NR Description: squamosa-promoter binding protein 2 -related
  misc_feature (5)..(396): Homolog of NCBI NO: 9802546 NR Description: F17L21.15 [Arabidopsis thaliana]
  misc_feature (1)..(396): Homolog of NCBI NO: 18650611 NR Description: At1g27370/F17L21_16 [Arabidopsis thaliana]
  misc_feature (1)..(396): Homolog of NCBI NO: 22329813 NR Description: squamosa-promoter binding protein 2 -related
MDCNMVSSFPWDWENLIMSNQSKTENEKKQQSTEWEFEKGEGIESIVPDFLGFEKVSSGSATSFWHTAVSKSSQSTSINSSSPEDKRCNLASQSSPGDSSSNIDFLQVKPSTALEVPIASAESDLCLKLGKRTYSEEFWGRNNNDLSAVSMNLLTPSVVARKKTKSCGQSMQVPRCQIDGCELDLSSSKDYHRKHRVCETHSKCPKVVVSGLERRFCQQCSRFHAVSEFDEKKRSCRKRLSHHNARRRKPQGVFPLNSERVFDRRQHTSMLWNGLSLNTRSEEKYTWGTTYETKPTQMESGFTLSFQRGNGSEDQLFTGSTLSFSAFQTSGGFSAGKSNIQLPDKGVGECSGGLHESHDFYSALSLLSTTSDSQGIKHTPVAEPPPIFGTFPSHFI

SEQ ID NO: 44974 - protein, 392 aa, Arabidopsis thaliana
  peptide (1)..(392): Ceres Seq. ID no. 13575707
  misc_feature (171)..(249): Pfam Name: SBP domain Pfam Description: SBP domain
  misc_feature (93)..(250): Homolog of NCBI NO: 13877707 NR Description: similar to squamosa-promoter binding protein 1
  misc_feature (93)..(250): Homolog of NCBI NO: 30697804 NR Description: squamosa-promoter binding protein -related
  misc_feature (93)..(250): Homolog of NCBI NO: 6730637 NR Description: F4N2.13 [Arabidopsis thaliana]
  misc_feature (1)..(283): Homolog of NCBI NO: 15239820 NR Description: squamosa promoter binding protein-related 2
  misc_feature (1)..(367): Homolog of NCBI NO: 25456646 NR Description: squamosa promoter binding protein 2
  misc_feature (1)..(374): Homolog of NCBI NO: 25403307 NR Description: protein F17L21.14 [imported] - Arabidopsis
  misc_feature (1)..(374): Homolog of NCBI NO: 18396302 NR Description: squamosa-promoter binding protein 2 -related
  misc_feature (1)..(392): Homolog of NCBI NO: 9802546 NR Description: F17L21.15 [Arabidopsis thaliana]
  misc_feature (1)..(392): Homolog of NCBI NO: 18650611 NR Description: At1g27370/F17L21_16 [Arabidopsis thaliana]
  misc_feature (1)..(392): Homolog of NCBI NO: 22329813 NR Description: squamosa-promoter binding protein 2 -related
MVSSFPWDWENLIMSNQSKTENEKKQQSTEWEFEKGEGIESIVPDFLGFEKVSSGSATSFWHTAVSKSSQSTSINSSSPEDKRCNLASQSSPGDSSSNIDFLQVKPSTALEVPIASAESDLCLKLGKRTYSEEFWGRNNNDLSAVSMNLLTPSVVARKKTKSCGQSMQVPRCQIDGCELDLSSSKDYHRKHRVCETHSKCPKVVVSGLERRFCQQCSRFHAVSEFDEKKRSCRKRLSHHNARRRKPQGVFPLNSERVFDRRQHTSMLWNGLSLNTRSEEKYTWGTTYETKPTQMESGFTLSFQRGNGSEDQLFTGSTLSFSAFQTSGGFSAGKSNIQLPDKGVGECSGGLHESHDFYSALSLLSTTSDSQGIKHTPVAEPPPIFGTFPSHFI

SEQ ID NO: 44975 - protein, 379 aa, Arabidopsis thaliana
  peptide (1)..(379): Ceres Seq. ID no. 13575708
  misc_feature (158)..(236): Pfam Name: SBP domain Pfam Description: SBP domain
  misc_feature (80)..(237): Homolog of NCBI NO: 13877707 NR Description: similar to squamosa-promoter binding protein 1
  misc_feature (80)..(237): Homolog of NCBI NO: 30697804 NR Description: squamosa-promoter binding protein -related
  misc_feature (80)..(237): Homolog of NCBI NO: 6730637 NR Description: F4N2.13 [Arabidopsis thaliana]
  misc_feature (1)..(270): Homolog of NCBI NO: 15239820 NR Description: squamosa promoter binding protein-related 2
  misc_feature (1)..(354): Homolog of NCBI NO: 25456646 NR Description: squamosa promoter binding protein 2
  misc_feature (1)..(361): Homolog of NCBI NO: 25403307 NR Description: protein F17L21.14 [imported] - Arabidopsis
  misc_feature (1)..(361): Homolog of NCBI NO: 18396302 NR Description: squamosa-promoter binding protein 2 -related
  misc_feature (1)..(379): Homolog of NCBI NO: 9802546 NR Description: F17L21.15 [Arabidopsis thaliana]
  misc_feature (1)..(379): Homolog of NCBI NO: 18650611 NR Description: At1g27370/F17L21_16 [Arabidopsis thaliana]
  misc_feature (1)..(379): Homolog of NCBI NO: 22329813 NR Description: squamosa-promoter binding protein 2 -related
MSNQSKTENEKKQQSTEWEFEKGEGIESIVPDFLGFEKVSSGSATSFWHTAVSKSSQSTSINSSSPEDKRCNLASQSSPGDSSSNIDFLQVKPSTALEVPIASAESDLCLKLGKRTYSEEFWGRNNNDLSAVSMNLLTPSVVARKKTKSCGQSMQVPRCQIDGCELDLSSSKDYHRKHRVCETHSKCPKVVVSGLERRFCQQCSRFHAVSEFDEKKRSCRKRLSHHNARRRKPQGVFPLNSERVFDRRQHTSMLWNGLSLNTRSEEKYTWGTTYETKPTQMESGFTLSFQRGNGSEDQLFTGSTLSFSAFQTSGGFSAGKSNIQLPDKGVGECSGGLHESHDFYSALSLLSTTSDSQGIKHTPVAEPPPIFGTFPSHFI

SEQ ID NO: 44976 - DNA, 2167 bp, Arabidopsis thaliana
  misc_feature (1)..(2167): Ceres Seq. ID no. 12600273
  misc_feature: MA Experiment ID: 108435 Result: Up-regulated in Transcription
  misc_feature: MA Experiment 108435 PARAMETER Experiment Name: At_stm_Mutants_cDNA_P Parameter: Plant Line Value: wt Landsburg vs stm
  misc_feature: MA Experiment 108435 PARAMETER Experiment Name: At_stm_Mutants_cDNA_P Parameter: Tissue Value: Shoot Apical Meristem Region
  misc_feature: MA Experiment ID: 108461 Result: Down-regulated in Transcription
  misc_feature: MA Experiment 108461 PARAMETER Experiment Name: At_Germinating_Seeds_cDNA_P Parameter: Age (day) Value: 1 vs. 0
  misc_feature: MA Experiment 108461 PARAMETER Experiment Name: At_Germinating_Seeds_cDNA_P Parameter: Tissue Value: Germinating Seeds
  misc_feature: MA Experiment ID: 108462 Result: Down-regulated in Transcription
  misc_feature: MA Experiment 108462 PARAMETER Experiment Name: At_Germinating_Seeds_cDNA_P Parameter: Age (day) Value: 2 vs. 0
  misc_feature: MA Experiment 108462 PARAMETER Experiment Name: At_Germinating_Seeds_cDNA_P Parameter: Tissue Value: Germinating Seeds
  misc_feature: MA Experiment ID: 108463 Result: Down-regulated in Transcription
  misc_feature: MA Experiment 108463 PARAMETER Experiment Name: At_Germinating_Seeds_cDNA_P Parameter: Age (day) Value: 3 vs. 0
  misc_feature: MA Experiment 108463 PARAMETER Experiment Name: At_Germinating_Seeds_cDNA_P Parameter: Tissue Value: Germinating Seeds
  misc_feature: MA Experiment ID: 108464 Result: Down-regulated in Transcription
  misc_feature: MA Experiment 108464 PARAMETER Experiment Name: At_Germinating_Seeds_cDNA_P Parameter: Age (day) Value: 4 vs. 0
  misc_feature: MA Experiment 108464 PARAMETER Experiment Name: At_Germinating_Seeds_cDNA_P Parameter: Tissue Value: Germinating Seeds
  misc_feature: MA Experiment ID: 20000111 Result: Down-regulated in Transcription
  misc_feature: MA Experiment 20000111 PARAMETER Experiment Name: At_42deg_Heat_cDNA_P Parameter: Temperature (deg C) Value: 42 vs. 22
  misc_feature: MA Experiment 20000111 PARAMETER Experiment Name: At_42deg_Heat_cDNA_P Parameter: Timepoint (hr) Value: 6
  misc_feature: MA Experiment 20000111 PARAMETER Experiment Name: At_42deg_Heat_cDNA_P Parameter: Tissue Value: Aerial
  misc_feature: MA Experiment ID: 20000112 Result: Down-regulated in Transcription
  misc_feature: MA Experiment 20000112 PARAMETER Experiment Name: At_42deg_Heat_cDNA_P Parameter: Temperature (deg C) Value: 42 vs. 22
  misc_feature: MA Experiment 20000112 PARAMETER Experiment Name: At_42deg_Heat_cDNA_P Parameter: Timepoint (hr) Value: 2
  misc_feature: MA Experiment 20000112 PARAMETER Experiment Name: At_42deg_Heat_cDNA_P Parameter: Tissue Value: Aerial
  misc_feature: MA Experiment ID: 20000113 Result: Down-regulated in Transcription
  misc_feature: MA Experiment 20000113 PARAMETER Experiment Name: At_42deg_Heat_cDNA_P Parameter: Temperature (deg C) Value: 42 vs. 22
  misc_feature: MA Experiment 20000113 PARAMETER Experiment Name: At_42deg_Heat_cDNA_P Parameter: Timepoint (hr) Value: 8
  misc_feature: MA Experiment 20000113 PARAMETER Experiment Name: At_42deg_Heat_cDNA_P Parameter: Tissue Value: Aerial
  misc_feature: MA Experiment ID: 20000144 Result: Down-regulated in Transcription
  misc_feature: MA Experiment 20000144 PARAMETER Experiment Name: At_42deg_Heat_cDNA_P Parameter: Temperature (deg C) Value: 42 vs. 22
  misc_feature: MA Experiment 20000144 PARAMETER Experiment Name: At_42deg_Heat_cDNA_P Parameter: Timepoint (hr) Value: 1
  misc_feature: MA Experiment 20000144 PARAMETER Experiment Name: At_42deg_Heat_cDNA_P Parameter: Tissue Value: Aerial
  misc_feature: MA Experiment ID: 20000179 Result: Down-regulated in Transcription
  misc_feature: MA Experiment 20000179 PARAMETER Experiment Name: At_Germinating_Seeds_P Parameter: Age (hr) Value: 6 vs. 0
  misc_feature: MA Experiment 20000179 PARAMETER Experiment Name: At_Germinating_Seeds_P Parameter: Tissue Value: Germinating Seeds
  misc_feature: MA Experiment ID: 20000180 Result: Down-regulated in Transcription
  misc_feature: MA Experiment 20000180 PARAMETER Experiment Name: At_Germinating_Seeds_P Parameter: Age (hr) Value: 24 vs. 0
  misc_feature: MA Experiment 20000180 PARAMETER Experiment Name: At_Germinating_Seeds_P Parameter: Tissue Value: Germinating Seeds
  misc_feature: MA Experiment ID: 20000227 Result: Down-regulated in Transcription
  misc_feature: MA Experiment 20000227 PARAMETER Experiment Name: At_Root-Tips-vs-Tops_P Parameter: Tissue Value: Root Tips vs. Root Tops
  misc_feature: MA Experiment ID: 20000234 Result: Up-regulated in Transcription
  misc_feature: MA Experiment 20000234 PARAMETER Experiment Name: At_Siliques_P Parameter: Age (day) Value: 21
  misc_feature: MA Experiment 20000234 PARAMETER Experiment Name: At_Siliques_P Parameter: Organism Value: A. thaliana
  misc_feature: MA Experiment 20000234 PARAMETER Experiment Name: At_Siliques_P Parameter: Plant Line Value: WS
  misc_feature: MA Experiment 20000234 PARAMETER Experiment Name: At_Siliques_P Parameter: Tissue Value: Less Than 5mm Siliques vs. Whole Plant
  misc_feature: MA Experiment ID: 20000235 Result: Up-regulated in Transcription
  misc_feature: MA Experiment 20000235 PARAMETER Experiment Name: At_Siliques_P Parameter: Age (day) Value: 21
  misc_feature: MA Experiment 20000235 PARAMETER Experiment Name: At_Siliques_P Parameter: Organism Value: A. thaliana
  misc_feature: MA Experiment 20000235 PARAMETER Experiment Name: At_Siliques_P Parameter: Plant Line Value: WS
  misc_feature: MA Experiment 20000235 PARAMETER Experiment Name: At_Siliques_P Parameter: Tissue Value: 5-10mm Siliques vs. Whole Plant
  misc_feature: MA Experiment ID: 20000264 Result: Up-regulated in Transcription
  misc_feature: MA Experiment 20000264 PARAMETER Experiment Name: At_Open_Flower_P Parameter: Age (day) Value: 21
  misc_feature: MA Experiment 20000264 PARAMETER Experiment Name: At_Open_Flower_P Parameter: Plant Line Value: WS
  misc_feature: MA Experiment 20000264 PARAMETER Experiment Name: At_Open_Flower_P Parameter: Tissue Value: Open Flower vs. Whole Plant
  misc_feature: MA Experiment ID: 20000265 Result: Up-regulated in Transcription
  misc_feature: MA Experiment 20000265 PARAMETER Experiment Name: At_Open_Flower_P Parameter: Age (day) Value: 21
  misc_feature: MA Experiment 20000265 PARAMETER Experiment Name: At_Open_Flower_P Parameter: Plant Line Value: WS
  misc_feature: MA Experiment 20000265 PARAMETER Experiment Name: At_Open_Flower_P Parameter: Tissue Value: Closed Flower vs. Whole Plant
  misc_feature: MA Experiment ID: 20000286 Result: Up-regulated in Transcription
  misc_feature: MA Experiment 20000286 PARAMETER Experiment Name: At_Open_Flower_P Parameter: Age (day) Value: 21
  misc_feature: MA Experiment 20000286 PARAMETER Experiment Name: At_Open_Flower_P Parameter: Plant Line Value: WS
  misc_feature: MA Experiment 20000286 PARAMETER Experiment Name: At_Open_Flower_P Parameter: Tissue Value: Half Open vs. Whole Plant
  misc_feature: MA Experiment ID: 20000439 Result: Up-regulated in Transcription
  misc_feature: MA Experiment 20000439 PARAMETER Experiment Name: At_Roots__P Parameter: Age (day) Value: 14 vs. 21
  misc_feature: MA Experiment 20000439 PARAMETER Experiment Name: At_Roots__P Parameter: Organism Value: A. thaliana
  misc_feature: MA Experiment 20000439 PARAMETER Experiment Name: At_Roots__P Parameter: Tissue Value: Roots vs. Whole Plant
  misc_feature: MA Experiment ID: 20000495 Result: Up-regulated in Transcription
  misc_feature: MA Experiment 20000495 PARAMETER Experiment Name: At_Guard_Cells_P Parameter: Harvest Date Value: 8/2/2002
  misc_feature: MA Experiment 20000495 PARAMETER Experiment Name: At_Guard_Cells_P Parameter: Organism Value: A. thaliana
  misc_feature: MA Experiment 20000495 PARAMETER Experiment Name: At_Guard_Cells_P Parameter: Tissue Value: Guard Cells vs. Leaves
  misc_feature: MA Experiment ID: 20001911 Result: Down-regulated in Transcription
  misc_feature: MA Experiment 20001911 PARAMETER Experiment Name: At_Drought_Reproduction_P Parameter: Age (day) Value: 40
  misc_feature: MA Experiment 20001911 PARAMETER Experiment Name: At_Drought_Reproduction_P Parameter: Organism Value: A. thaliana
  misc_feature: MA Experiment 20001911 PARAMETER Experiment Name: At_Drought_Reproduction_P Parameter: Plant Line Value: WS
  misc_feature: MA Experiment 20001911 PARAMETER Experiment Name: At_Drought_Reproduction_P Parameter: Timepoint (day) Value: 10
  misc_feature: MA Experiment 20001911 PARAMETER Experiment Name: At_Drought_Reproduction_P Parameter: Tissue Value: Flowers
  misc_feature: MA Experiment 20001911 PARAMETER Experiment Name: At_Drought_Reproduction_P Parameter: Treatment Value: Drought vs. No Drought
ttaaaccacatttctccttctggctctctctcttcctaagtttcctctctctttagaactgtagagagagaaaagcctccatttttctcaaggcaatctctctctctctgcctcatctcataaacccattacaccaaaacctcatcgtagagagagaaacacaccaaccattgttacactctaagagaagagaagagagaaggaaaaatggacggtgtatcaccaaagtttgtgttgccggagacattcgacggcgtgaggatggagatcacaggccaactaggcatgatctgggagcttgtaaaagcaccagtgattgtccctcttcttcaattagctgtttacatctgtttgcttatgtctgtcatgcttttatgtgagagggtttacatgggaatcgtcatcgtcctcgtcaaactcttctggaaaaaaccagacaaacgttacaagttcgagcccattcacgatgatgaagagcttggtagctccaatttccccgtcgtcctcgtacaaatccccatgttcaacgaacgagaggtttataagctatcaataggagcggcgtgtggactttcctggccgtccgatcgtctcgtgattcaagtgttagatgactctacagatcctactgttaagcaaatggtggaagtggagtgtcaaagatgggcaagtaaaggaatcaatattaggtatcaaataagagagaatagagttggttacaaagccggtgctttaaaggaaggactcaaacgtagttatgtcaagcattgcgagtatgttgtcatcttcgacgccgattttcagcccgaacctgattttcttcgccgtagcattcctttcctcatgcacaatcccaacattgccttggttcaggctcgatggcggttcgtaaattctgatgagtgcttattgacgagaatgcaagaaatgtcattggattaccatttcactgttgagcaagaagtgggttcatcaacacatgcttttttcggcttcaacggaaccgccggaatatggagaatagcggcgataaatgaagctggtgggtggaaagatcggaccaccgtggaagatatggatctcgccgtccgagcaagtcttcgcggctggaaatttctctacctcggtgaccttcaggtgaaaagtgagcttccaagtacttttagagccttccgttttcagcaacatagatggtcttgtggacctgcaaatctctttaggaaaatggttatggagatcgtaagaaacaagaaagtgagattctggaagaaagtgtacgtgatatacagcttcttctttgtgaggaaaatcattgcacattgggtcacattttgtttctactgcgttgttcttcctctcacaattctcgtcccggaggttaaagttccgatttggggttcggtttatatcccatccatcatcactatcctcaattccgtcggtactccaaggtcaattcatctgctgttctattggattctattcgagaatgtgatgtcgctgcaccggacaaaggccactctcattggtctgtttgaggcaggaagggctaacgagtgggtagtgactgctaagcttggaagcggtcagagcgctaaaggaaacactaaagggatcaaaaggttcccaagaatcttcaaattgcctgatcgattgaatacattggagcttggatttgcggctttcttgttcgtgtgcggatgctatgactttgtgcacgggaagaacaattacttcatctacctgtttcttcagacaatgtctttcttcatcagtgggctgggctggatcgggacttatgtcccgagttagtagttgtgttgtttcagagagaaaagagaatgttattaattttcttgagaaataaagacaattttcattgaaatgacaaaggaaaattgataggggagatagagacgtaccggtaacaacaagtaggaagaaaggagaagacttttatcaaagaccaggaaagaggagaagctccaagggttcttttgatttatttttaatttttctgtgttttatttatatagctatgggatttgtgattcagttgttgtgagattttaattttcgttctttgttttttattttggtttttgggtattttttcgttttgaaagtgttagtctttttgttttgtttttatgatttagaattcaag

SEQ ID NO: 44977 - protein, 534 aa, Arabidopsis thaliana
  peptide (1)..(534): Ceres Seq. ID no. 12600274
  misc_feature (135)..(278): Pfam Name: Glycosyl transferase Pfam Description: Glycosyl transferase
  misc_feature (24)..(85): Homolog of NCBI NO: 19071627 NR Description: putative glucosyl transferase
  misc_feature (64)..(533): Homolog of NCBI NO: 19071627 NR Description: putative glucosyl transferase
  misc_feature (20)..(534): Homolog of NCBI NO: 21536839 NR Description: putative glucosyltransferase [Arabidopsis
  misc_feature (20)..(534): Homolog of NCBI NO: 18403914 NR Description: putative glucosyltransferase
  misc_feature (12)..(534): Homolog of NCBI NO: 30688411 NR Description: glycosyltransferase family 2 [Arabidopsis
  misc_feature (24)..(533): Homolog of NCBI NO: 16519223 NR Description: cellulose synthase-like protein OsCslA9 [Oryza
  misc_feature (9)..(534): Homolog of NCBI NO: 15237519 NR Description: putative protein
  misc_feature (7)..(534): Homolog of NCBI NO: 34148021 NR Description: glycosyltransferase 1 [Ipomoea trifida]
  misc_feature (7)..(534): Homolog of NCBI NO: 34148025 NR Description: glycosyltransferase 10 [Ipomoea trifida]
  misc_feature (1)..(534): Homolog of NCBI NO: 15242959 NR Description: glucosyltransferase-like protein
MDGVSPKFVLPETFDGVRMEITGQLGMIWELVKAPVIVPLLQLAVYICLLMSVMLLCERVYMGIVIVLVKLFWKKPDKRYKFEPIHDDEELGSSNFPVVLVQIPMFNEREVYKLSIGAACGLSWPSDRLVIQVLDDSTDPTVKQMVEVECQRWASKGINIRYQIRENRVGYKAGALKEGLKRSYVKHCEYVVIFDADFQPEPDFLRRSIPFLMHNPNIALVQARWRFVNSDECLLTRMQEMSLDYHFTVEQEVGSSTHAFFGFNGTAGIWRIAAINEAGGWKDRTTVEDMDLAVRASLRGWKFLYLGDLQVKSELPSTFRAFRFQQHRWSCGPANLFRKMVMEIVRNKKVRFWKKVYVIYSFFFVRKIIAHWVTFCFYCVVLPLTILVPEVKVPIWGSVYIPSIITILNSVGTPRSIHLLFYWILFENVMSLHRTKATLIGLFEAGRANEWVVTAKLGSGQSAKGNTKGIKRFPRIFKLPDRLNTLELGFAAFLFVCGCYDFVHGKNNYFIYLFLQTMSFFISGLGWIGTYVPS

SEQ ID NO: 44978 - protein, 516 aa, Arabidopsis thaliana
  peptide (1)..(516): Ceres Seq. ID no. 12600275
  misc_feature (117)..(260): Pfam Name: Glycosyl transferase Pfam Description: Glycosyl transferase
  misc_feature (6)..(67): Homolog of NCBI NO: 19071627 NR Description: putative glucosyl transferase
  misc_feature (46)..(515): Homolog of NCBI NO: 19071627 NR Description: putative glucosyl transferase
  misc_feature (2)..(516): Homolog of NCBI NO: 21536839 NR Description: putative glucosyltransferase [Arabidopsis
  misc_feature (2)..(516): Homolog of NCBI NO: 18403914 NR Description: putative glucosyltransferase
  misc_feature (1)..(516): Homolog of NCBI NO: 30688411 NR Description: glycosyltransferase family 2 [Arabidopsis
  misc_feature (6)..(515): Homolog of NCBI NO: 16519223 NR Description: cellulose synthase-like protein OsCslA9 [Oryza
  misc_feature (1)..(516): Homolog of NCBI NO: 15237519 NR Description: putative protein
  misc_feature (1)..(516): Homolog of NCBI NO: 34148021 NR Description: glycosyltransferase 1 [Ipomoea trifida]
  misc_feature (1)..(516): Homolog of NCBI NO: 34148025 NR Description: glycosyltransferase 10 [Ipomoea trifida]
  misc_feature (1)..(516): Homolog of NCBI NO: 15242959 NR Description: glucosyltransferase-like protein
MEITGQLGMIWELVKAPVIVPLLQLAVYICLLMSVMLLCERVYMGIVIVLVKLFWKKPDKRYKFEPIHDDEELGSSNFPVVLVQIPMFNEREVYKLSIGAACGLSWPSDRLVIQVLDDSTDPTVKQMVEVECQRWASKGINIRYQIRENRVGYKAGALKEGLKRSYVKHCEYVVIFDADFQPEPDFLRRSIPFLMHNPNIALVQARWRFVNSDECLLTRMQEMSLDYHFTVEQEVGSSTHAFFGFNGTAGIWRIAAINEAGGWKDRTTVEDMDLAVRASLRGWKFLYLGDLQVKSELPSTFRAFRFQQHRWSCGPANLFRKMVMEIVRNKKVRFWKKVYVIYSFFFVRKIIAHWVTFCFYCVVLPLTILVPEVKVPIWGSVYIPSIITILNSVGTPRSIHLLFYWILFENVMSLHRTKATLIGLFEAGRANEWVVTAKLGSGQSAKGNTKGIKRFPRIFKLPDRLNTLELGFAAFLFVCGCYDFVHGKNNYFIYLFLQTMSFFISGLGWIGTYVPS

SEQ ID NO: 44979 - protein, 508 aa, Arabidopsis thaliana
  peptide (1)..(508): Ceres Seq. ID no. 12600276
  misc_feature (109)..(252): Pfam Name: Glycosyl transferase Pfam Description: Glycosyl transferase
  misc_feature (1)..(59): Homolog of NCBI NO: 19071627 NR Description: putative glucosyl transferase
  misc_feature (38)..(507): Homolog of NCBI NO: 19071627 NR Description: putative glucosyl transferase
  misc_feature (1)..(508): Homolog of NCBI NO: 21536839 NR Description: putative glucosyltransferase [Arabidopsis
  misc_feature (1)..(508): Homolog of NCBI NO: 18403914 NR Description: putative glucosyltransferase
  misc_feature (1)..(508): Homolog of NCBI NO: 30688411 NR Description: glycosyltransferase family 2 [Arabidopsis
  misc_feature (1)..(507): Homolog of NCBI NO: 16519223 NR Description: cellulose synthase-like protein OsCslA9 [Oryza
  misc_feature (1)..(508): Homolog of NCBI NO: 15237519 NR Description: putative protein
  misc_feature (1)..(508): Homolog of NCBI NO: 34148021 NR Description: glycosyltransferase 1 [Ipomoea trifida]
  misc_feature (1)..(508): Homolog of NCBI NO: 34148025 NR Description: glycosyltransferase 10 [Ipomoea trifida]
  misc_feature (1)..(508): Homolog of NCBI NO: 15242959 NR Description: glucosyltransferase-like protein
MIWELVKAPVIVPLLQLAVYICLLMSVMLLCERVYMGIVIVLVKLFWKKPDKRYKFEPIHDDEELGSSNFPVVLVQIPMFNEREVYKLSIGAACGLSWPSDRLVIQVLDDSTDPTVKQMVEVECQRWASKGINIRYQIRENRVGYKAGALKEGLKRSYVKHCEYVVIFDADFQPEPDFLRRSIPFLMHNPNIALVQARWRFVNSDECLLTRMQEMSLDYHFTVEQEVGSSTHAFFGFNGTAGIWRIAAINEAGGWKDRTTVEDMDLAVRASLRGWKFLYLGDLQVKSELPSTFRAFRFQQHRWSCGPANLFRKMVMEIVRNKKVRFWKKVYVIYSFFFVRKIIAHWVTFCFYCVVLPLTILVPEVKVPIWGSVYIPSIITILNSVGTPRSIHLLFYWILFENVMSLHRTKATLIGLFEAGRANEWVVTAKLGSGQSAKGNTKGIKRFPRIFKLPDRLNTLELGFAAFLFVCGCYDFVHGKNNYFIYLFLQTMSFFISGLGWIGTYVPS

SEQ ID NO: 44980 - DNA, 1921 bp, Arabidopsis thaliana
  misc_feature (1)..(1921): Ceres Seq. ID no. 12559858
  misc_feature: MA Experiment ID: 20000180 Result: Up-regulated in Transcription
  misc_feature: MA Experiment 20000180 PARAMETER Experiment Name: At_Germinating_Seeds_P Parameter: Age (hr) Value: 24 vs. 0
  misc_feature: MA Experiment 20000180 PARAMETER Experiment Name: At_Germinating_Seeds_P Parameter: Tissue Value: Germinating Seeds
  misc_feature: MA Experiment ID: 20000182 Result: Down-regulated in Transcription
  misc_feature: MA Experiment 20000182 PARAMETER Experiment Name: At_2mM_SA_P Parameter: Age (day) Value: 14
  misc_feature: MA Experiment 20000182 PARAMETER Experiment Name: At_2mM_SA_P Parameter: Organism Value: A. thaliana
  misc_feature: MA Experiment 20000182 PARAMETER Experiment Name: At_2mM_SA_P Parameter: Plant Line Value: WS
  misc_feature: MA Experiment 20000182 PARAMETER Experiment Name: At_2mM_SA_P Parameter: Timepoint (hr) Value: 6
  misc_feature: MA Experiment 20000182 PARAMETER Experiment Name: At_2mM_SA_P Parameter: Tissue Value: Aerial
  misc_feature: MA Experiment 20000182 PARAMETER Experiment Name: At_2mM_SA_P Parameter: Treatment Value: 2mM SA vs. No Treatment
  misc_feature: MA Experiment ID: 20000185 Result: Down-regulated in Transcription
  misc_feature: MA Experiment 20000185 PARAMETER Experiment Name: At_Roots__P Parameter: Age (day) Value: 7 vs. 21
  misc_feature: MA Experiment 20000185 PARAMETER Experiment Name: At_Roots__P Parameter: Organism Value: A. thaliana
  misc_feature: MA Experiment 20000185 PARAMETER Experiment Name: At_Roots__P Parameter: Tissue Value: Roots vs. Whole Plant
  misc_feature: MA Experiment ID: 20000227 Result: Down-regulated in Transcription
  misc_feature: MA Experiment 20000227 PARAMETER Experiment Name: At_Root-Tips-vs-Tops_P Parameter: Tissue Value: Root Tips vs. Root Tops
  misc_feature: MA Experiment ID: 20001248 Result: Down-regulated in Transcription
  misc_feature: MA Experiment 20001248 PARAMETER Experiment Name: At_Far-red-induction_P Parameter: Age (day) Value: 7
  misc_feature: MA Experiment 20001248 PARAMETER Experiment Name: At_Far-red-induction_P Parameter: Light Value: Far-red vs. White
  misc_feature: MA Experiment 20001248 PARAMETER Experiment Name: At_Far-red-induction_P Parameter: Organism Value: A. thaliana
  misc_feature: MA Experiment 20001248 PARAMETER Experiment Name: At_Far-red-induction_P Parameter: Plant Line Value: Columbia
  misc_feature: MA Experiment 20001248 PARAMETER Experiment Name: At_Far-red-induction_P Parameter: Timepoint (hr) Value: 4
  misc_feature: MA Experiment 20001248 PARAMETER Experiment Name: At_Far-red-induction_P Parameter: Tissue Value: Whole Plant
  misc_feature: MA Experiment ID: 20001450 Result: Down-regulated in Transcription
  misc_feature: MA Experiment 20001450 PARAMETER Experiment Name: At_Far-red-induction_P Parameter: Age (day) Value: 7
  misc_feature: MA Experiment 20001450 PARAMETER Experiment Name: At_Far-red-induction_P Parameter: Light Value: Far-red vs. White
  misc_feature: MA Experiment 20001450 PARAMETER Experiment Name: At_Far-red-induction_P Parameter: Organism Value: A. thaliana
  misc_feature: MA Experiment 20001450 PARAMETER Experiment Name: At_Far-red-induction_P Parameter: Plant Line Value: Columbia
  misc_feature: MA Experiment 20001450 PARAMETER Experiment Name: At_Far-red-induction_P Parameter: Timepoint (hr) Value: 8
  misc_feature: MA Experiment 20001450 PARAMETER Experiment Name: At_Far-red-induction_P Parameter: Tissue Value: Whole Plant
atctaactttagagcttctcttttcatttgaagatggtagcagccatggcttttcctgccgctgctacttatcccacccatttccaaggcggcgctcttcatctgggtaggaccgatcattgcctcttcggtttctaccctcaaaccatttcctctgtgaattctcggagagcttctgtttccatcaagtgccaatctacggagccaaagacgaatggtaacatattggacaatgcgagcaaccttttgacaaattttttaagtggtggaagtttggggtcaatgcctactgctgaaggctctgtctctgatttgtttggaaagcctctctttttatctctttacgactggttcttggagcatggaggaatttataaacttgcgtttggtccaaaagcctttgttgtcatctcagatcccattattgcaaggcatgtcctccgggaaaatgctttttcttatgacaagggagttcttgctgagatcttagagccgattatgggaaaagggttaataccggctgatctagatacgtggaagttaagaagaagagctatcactcccgcattccataaattgtatctagaggccatggtcaaagtatttagtgactgttcggagaaaatgatattgaaatctgagaaactcataagggagaaagaaacttcaagcggggaggacaccattgagttggatctggaagcagaattctcgagtctggctcttgatattataggtcttagcgtgttcaactacgattttggctctgtcacaaaagagtcccctgtgatcaaggcagtttatggaactcttttcgaggcagagcatcggtctactttctacttcccttattggaactttcctccagctagatggatagttccgaggcaacgaaagttccaaagcgatctgaagattataaacgattgccttgatggcctcattcaaaatgctaaagagacaagacaggaaacagatgttgagaagctccaggaaagggactacactaatctcaaggatgcaagtcttttgcggttcttagtcgatatgcgcggtgttgacattgatgaccggcagctgagggatgacttgatgactatgctaattgctggtcatgagacaacagcagcagttcttacttgggctgttttccttctgtcacaaaatcctgaaaaaattaggaaagctcaagctgagattgatgctgtgcttggtcaaggtccacccacttatgaatcaatgaaaaagctcgagtacatacgactgatcgttgtagaagtccttcgtctctttcctcagccacctttgctcatcagacgcactctcaaaccagaaacattacccggaggacacaaaggggaaaaagaaggtcataaagttccaaaagggactgatatcttcatttctgtgtataatctccatagatctccatacttttgggataatccccacgattttgagcctgagaggtttttaagaacaaaggagagcaatggaattgaaggatgggctggctttgatccatctcgtagccccggggcactatatccgaatgagataatagcagactttgcattcttaccatttggtggaggaccaagaaaatgcattggagaccagtttgcactaatggaatcgaccgtcgcactagctatgttgtttcagaaattcgatgtggagctgcgtggaacgccagaatctgttgaactcgtgagcggcgcaacgattcatgccaaaaatgggatgtggtgcaaactaaagagaagatcaaagtgaaatttatggataggcaaaaagactcaattttaacttgaaggaagctgagtgtaaatgagagatgatatgcttatgattcactaaacgtacattcttgagattttgaaaatgcaaaaaagctaatacagagattggatctgttggt

SEQ ID NO: 44981 - protein, 580 aa, Arabidopsis thaliana
  peptide (1)..(580): Ceres Seq. ID no. 12559859
  misc_feature (5)..(580): Homolog of NCBI NO: 7427576 NR Description: probable cytochrome P450 - Arabidopsis thaliana
  misc_feature (1)..(580): Homolog of NCBI NO: 30683137 NR Description: cytochrome p450, putative [Arabidopsis thaliana]
  misc_feature (5)..(580): Homolog of NCBI NO: 7427576 NR Description: probable cytochrome P450 - Arabidopsis thaliana
  misc_feature (1)..(580): Homolog of NCBI NO: 30683137 NR Description: cytochrome p450, putative [Arabidopsis thaliana]
MVAAMAFPAAATYPTHFQGGALHLGRTDHCLFGFYPQTISSVNSRRASVSIKCQSTEPKTNGNILDNASNLLTNFLSGGSLGSMPTAEGSVSDLFGKPLFLSLYDWFLEHGGIYKLAFGPKAFVVISDPIIARHVLRENAFSYDKGVLAEILEPIMGKGLIPADLDTWKLRRRAITPAFHKLYLEAMVKVFSDCSEKMILKSEKLIREKETSSGEDTIELDLEAEFSSLALDIIGLSVFNYDFGSVTKESPVIKAVYGTLFEAEHRSTFYFPYWNFPPARWIVPRQRKFQSDLKIINDCLDGLIQNAKETRQETDVEKLQERDYTNLKDASLLRFLVDMRGVDIDDRQLRDDLMTMLIAGHETTAAVLTWAVFLLSQNPEKIRKAQAEIDAVLGQGPPTYESMKKLEYIRLIVVEVLRLFPQPPLLIRRTLKPETLPGGHKGEKEGHKVPKGTDIFISVYNLHRSPYFWDNPHDFEPERFLRTKESNGIEGWAGFDPSRSPGALYPNEIIADFAFLPFGGGPRKCIGDQFALMESTVALAMLFQKFDVELRGTPESVELVSGATIHAKNGMWCKLKRRSK

SEQ ID NO: 44982 - protein, 576 aa, Arabidopsis thaliana
  peptide (1)..(576): Ceres Seq. ID no. 12559860
  misc_feature (1)..(576): Homolog of NCBI NO: 7427576 NR Description: probable cytochrome P450 - Arabidopsis thaliana
  misc_feature (1)..(576): Homolog of NCBI NO: 30683137 NR Description: cytochrome p450, putative [Arabidopsis thaliana]
  misc_feature (1)..(576): Homolog of NCBI NO: 7427576 NR Description: probable cytochrome P450 - Arabidopsis thaliana
  misc_feature (1)..(576): Homolog of NCBI NO: 30683137 NR Description: cytochrome p450, putative [Arabidopsis thaliana]
MAFPAAATYPTHFQGGALHLGRTDHCLFGFYPQTISSVNSRRASVSIKCQSTEPKTNGNILDNASNLLTNFLSGGSLGSMPTAEGSVSDLFGKPLFLSLYDWFLEHGGIYKLAFGPKAFVVISDPIIARHVLRENAFSYDKGVLAEILEPIMGKGLIPADLDTWKLRRRAITPAFHKLYLEAMVKVFSDCSEKMILKSEKLIREKETSSGEDTIELDLEAEFSSLALDIIGLSVFNYDFGSVTKESPVIKAVYGTLFEAEHRSTFYFPYWNFPPARWIVPRQRKFQSDLKIINDCLDGLIQNAKETRQETDVEKLQERDYTNLKDASLLRFLVDMRGVDIDDRQLRDDLMTMLIAGHETTAAVLTWAVFLLSQNPEKIRKAQAEIDAVLGQGPPTYESMKKLEYIRLIVVEVLRLFPQPPLLIRRTLKPETLPGGHKGEKEGHKVPKGTDIFISVYNLHRSPYFWDNPHDFEPERFLRTKESNGIEGWAGFDPSRSPGALYPNEIIADFAFLPFGGGPRKCIGDQFALMESTVALAMLFQKFDVELRGTPESVELVSGATIHAKNGMWCKLKRRSK

SEQ ID NO: 44983 - protein, 497 aa, Arabidopsis thaliana
  peptide (1)..(497): Ceres Seq. ID no. 12559861
  misc_feature (1)..(497): Homolog of NCBI NO: 7427576 NR Description: probable cytochrome P450 - Arabidopsis thaliana
  misc_feature (1)..(497): Homolog of NCBI NO: 30683137 NR Description: cytochrome p450, putative [Arabidopsis thaliana]
  misc_feature (1)..(497): Homolog of NCBI NO: 7427576 NR Description: probable cytochrome P450 - Arabidopsis thaliana
  misc_feature (1)..(497): Homolog of NCBI NO: 30683137 NR Description: cytochrome p450, putative [Arabidopsis thaliana]
MPTAEGSVSDLFGKPLFLSLYDWFLEHGGIYKLAFGPKAFVVISDPIIARHVLRENAFSYDKGVLAEILEPIMGKGLIPADLDTWKLRRRAITPAFHKLYLEAMVKVFSDCSEKMILKSEKLIREKETSSGEDTIELDLEAEFSSLALDIIGLSVFNYDFGSVTKESPVIKAVYGTLFEAEHRSTFYFPYWNFPPARWIVPRQRKFQSDLKIINDCLDGLIQNAKETRQETDVEKLQERDYTNLKDASLLRFLVDMRGVDIDDRQLRDDLMTMLIAGHETTAAVLTWAVFLLSQNPEKIRKAQAEIDAVLGQGPPTYESMKKLEYIRLIVVEVLRLFPQPPLLIRRTLKPETLPGGHKGEKEGHKVPKGTDIFISVYNLHRSPYFWDNPHDFEPERFLRTKESNGIEGWAGFDPSRSPGALYPNEIIADFAFLPFGGGPRKCIGDQFALMESTVALAMLFQKFDVELRGTPESVELVSGATIHAKNGMWCKLKRRSK

SEQ ID NO: 44984 - DNA, 2024 bp, Arabidopsis thaliana
  misc_feature (1)..(2024): Ceres Seq. ID no. 12600277
  misc_feature: MA Experiment ID: 20000794 Result: Down-regulated in Transcription
  misc_feature: MA Experiment 20000794 PARAMETER Experiment Name: At_Petals_P Parameter: Age (day) Value: 23-25 days
  misc_feature: MA Experiment 20000794 PARAMETER Experiment Name: At_Petals_P Parameter: Plant Line Value: WS
  misc_feature: MA Experiment 20000794 PARAMETER Experiment Name: At_Petals_P Parameter: Tissue Value: Petals vs. Whole plant
  misc_feature: MA Experiment ID: 20001557 Result: Up-regulated in Transcription
  misc_feature: MA Experiment 20001557 PARAMETER Experiment Name: At_Drought_Soil_Dry_P Parameter: Age (day) Value: 27
  misc_feature: MA Experiment 20001557 PARAMETER Experiment Name: At_Drought_Soil_Dry_P Parameter: Organism Value: A. thaliana
  misc_feature: MA Experiment 20001557 PARAMETER Experiment Name: At_Drought_Soil_Dry_P Parameter: Plant Line Value: WS
  misc_feature: MA Experiment 20001557 PARAMETER Experiment Name: At_Drought_Soil_Dry_P Parameter: Post Timepoint (hr) Value: 3
  misc_feature: MA Experiment 20001557 PARAMETER Experiment Name: At_Drought_Soil_Dry_P Parameter: Post-Treatment Value: Re-Water vs. No Drought
  misc_feature: MA Experiment 20001557 PARAMETER Experiment Name: At_Drought_Soil_Dry_P Parameter: Timepoint (day) Value: 13
  misc_feature: MA Experiment 20001557 PARAMETER Experiment Name: At_Drought_Soil_Dry_P Parameter: Treatment Value: Drought vs. No Drought
caaacttttgagaagcattttcgcttcaattcaataaaaggcgaaaaatctctcactgcactttatctcgagagctcagatctccgatctagagcctttcgcttctcctcttctgttcatataacaactgaataatgtcgatctccgcccaaaatccggatatttccggcgatagacaatccggccaagatgttcgtactcagaacgtgatggcttgtcaagctgtttctaatattgttaagacctcacttggtcccgtcggcctcgacaagatgttggtggatgatattggtgatgtgactattacaaatgatggtgctactattcttaggatgttggaggtcgagcaccctgctgctaaggttcttgtcgagttagctgaacttcaagatagagaagtcggtgatgggactacatctgttgttattgtagctgctgagttgttgaagagggcaaatgatttggtcaggaacaaaatacatccaacatcaattatcagtggatataggctagcaatgagagaatcttgcaaatacatagaagagaagttggtgaccaaggtcgaaaagcttgggaaagttccattgataaactgtgccaaaaccagcatgtcctccaaactgatatctggtgacagcgacttctttgccaatttggttgtggaagccgttctttcagtaaagatgacaaatcagcggggagagataaaataccctatcaagggcattaatattctgaaagctcatggacaaagtgcaagagacagctatttgttaaatggatatgcactcaatactggtcgtgctgcccaagggatgccattacgagtgtccccagcaaagattgcttgccttgacttcaatctgcagaagacaaaaatgcagctgggtgtccaagttgttgttaatgacccacgagaacttgaaaagatccgtcaaagagaagctgacatgacaaaagagcggatagagaaacttctcaaagctggggccaatgtaattctgaccacaaaggggattgacgacatggcacttaaatactttgtagaggcaggagctattgctgttaggcgtgtgcgcaaagaagacatgcgtcatgttgccaaggcgacaggagcgactctggtcaccacttttgctgacatggagggcgaagaaacatttgatccagctcaccttggatctgctgatgaggttgttgaagagagaatcgcagatgatgatgttatattgataaagggaaccaaaacaagtagtgcggtctcgttgatcttaagaggtgcaaatgactacatgcttgatgagatggagagagcactgcatgacgctttatgtattgtcaagaggacccttgagtccaacacggtggttgcgggtggaggtgcagttgaatcagcattgtctgtgtatctggagcaccttgctacaaccttgggctctcgcgaacaattggccatcgctgaatttgctgatgcgctattgattataccaaaggtgcttgcagtaaacgctgctaaggatgcaaccgaattggtagctaaactaagagcgtaccaccacactgcacaaaccaaggctgataagaagcactattcaagcatgggacttgacctcgtaaacggaaccatccgcaacaatttggaagctggagtgatcgaaccagctatgagcaaagtgaaaattatccagtttgcaacagaggcagccataacgattctacgaattgacgacatgatcaaactggtgaaggatgagagccaaggcgaagaataagcaaagctcagctcctctttatccgccttatcatccttagtgtgtgtttttgtccgcattttcagctcctctttagcttcttttttgcgctgtaacaatgtagcctctgaaagagctgtttctgtttatttttcaactctctcgtttcttgctcactttttacttcaagaaatttttgctttttgtcgggtaacgcatgtaatgaagttgggctttcgtctcttactgtttgaatttatggtgtagtttttg

SEQ ID NO: 44985 - protein, 545 aa, Arabidopsis thaliana
  peptide (1)..(545): Ceres Seq. ID no. 12600278
  misc_feature (31)..(538): Pfam Name: TCP-1/cpn60 chaperonin family Pfam Description: TCP-1/cpn60 chaperonin family
  misc_feature (31)..(538): Pfam Name: TCP-1/cpn60 chaperonin family Pfam Description: TCP-1/cpn60 chaperonin family
  misc_feature (31)..(538): Pfam Name: TCP-1/cpn60 chaperonin family Pfam Description: TCP-1/cpn60 chaperonin family
  misc_feature (10)..(543): Homolog of NCBI NO: 13959583 NR Description: T-complex protein 1, alpha subunit (TCP-1-alpha)
  misc_feature (10)..(545): Homolog of NCBI NO: 135538 NR Description: T-complex protein 1, alpha subunit (TCP-1-alpha)
  misc_feature (10)..(543): Homolog of NCBI NO: 135536 NR Description: T-COMPLEX PROTEIN 1, ALPHA SUBUNIT (TCP-1-ALPHA)
  misc_feature (10)..(543): Homolog of NCBI NO: 18859465 NR Description: t-complex polypeptide 1 [Danio rerio]
  misc_feature (1)..(543): Homolog of NCBI NO: 27881870 NR Description: Unknown (protein for MGC:55424) [Danio rerio]
  misc_feature (10)..(543): Homolog of NCBI NO: 13959583 NR Description: T-complex protein 1, alpha subunit (TCP-1-alpha)
  misc_feature (10)..(543): Homolog of NCBI NO: 135536 NR Description: T-COMPLEX PROTEIN 1, ALPHA SUBUNIT (TCP-1-ALPHA)
  misc_feature (1)..(543): Homolog of NCBI NO: 27881870 NR Description: Unknown (protein for MGC:55424) [Danio rerio]
  misc_feature (10)..(543): Homolog of NCBI NO: 18859465 NR Description: t-complex polypeptide 1 [Danio rerio]
  misc_feature (10)..(543): Homolog of NCBI NO: 135536 NR Description: T-COMPLEX PROTEIN 1, ALPHA SUBUNIT (TCP-1-ALPHA)
  misc_feature (10)..(545): Homolog of NCBI NO: 135538 NR Description: T-complex protein 1, alpha subunit (TCP-1-alpha)
  misc_feature (10)..(543): Homolog of NCBI NO: 13959583 NR Description: T-complex protein 1, alpha subunit (TCP-1-alpha)
  misc_feature (1)..(545): Homolog of NCBI NO: 15231024 NR Description: t-complex polypeptide 1 homologue
  misc_feature (1)..(545): Homolog of NCBI NO: 25083339 NR Description: t-complex polypeptide 1 homologue [Arabidopsis
  misc_feature (1)..(545): Homolog of NCBI NO: 9293959 NR Description: chaperonin, t-complex protein alpha subunit
  misc_feature (1)..(545): Homolog of NCBI NO: 24371053 NR Description: t-complex polypeptide 1 [Bruguiera sexangula]
  misc_feature (1)..(543): Homolog of NCBI NO: 17066720 NR Description: CCT chaperonin alpha subunit [Physarum
  misc_feature (1)..(545): Homolog of NCBI NO: 15231024 NR Description: t-complex polypeptide 1 homologue
  misc_feature (1)..(545): Homolog of NCBI NO: 25083339 NR Description: t-complex polypeptide 1 homologue [Arabidopsis
  misc_feature (1)..(545): Homolog of NCBI NO: 9293959 NR Description: chaperonin, t-complex protein alpha subunit
  misc_feature (1)..(545): Homolog of NCBI NO: 24371053 NR Description: t-complex polypeptide 1 [Bruguiera sexangula]
  misc_feature (1)..(543): Homolog of NCBI NO: 17066720 NR Description: CCT chaperonin alpha subunit [Physarum
  misc_feature (1)..(543): Homolog of NCBI NO: 27881870 NR Description: Unknown (protein for MGC:55424) [Danio rerio]
  misc_feature (10)..(543): Homolog of NCBI NO: 18859465 NR Description: t-complex polypeptide 1 [Danio rerio]
  misc_feature (10)..(545): Homolog of NCBI NO: 135538 NR Description: T-complex protein 1, alpha subunit (TCP-1-alpha)
  misc_feature (1)..(543): Homolog of NCBI NO: 17066720 NR Description: CCT chaperonin alpha subunit [Physarum
  misc_feature (1)..(545): Homolog of NCBI NO: 24371053 NR Description: t-complex polypeptide 1 [Bruguiera sexangula]
  misc_feature (1)..(545): Homolog of NCBI NO: 9293959 NR Description: chaperonin, t-complex protein alpha subunit
  misc_feature (1)..(545): Homolog of NCBI NO: 25083339 NR Description: t-complex polypeptide 1 homologue [Arabidopsis
  misc_feature (1)..(545): Homolog of NCBI NO: 15231024 NR Description: t-complex polypeptide 1 homologue
MSISAQNPDISGDRQSGQDVRTQNVMACQAVSNIVKTSLGPVGLDKMLVDDIGDVTITNDGATILRMLEVEHPAAKVLVELAELQDREVGDGTTSVVIVAAELLKRANDLVRNKIHPTSIISGYRLAMRESCKYIEEKLVTKVEKLGKVPLINCAKTSMSSKLISGDSDFFANLVVEAVLSVKMTNQRGEIKYPIKGINILKAHGQSARDSYLLNGYALNTGRAAQGMPLRVSPAKIACLDFNLQKTKMQLGVQVVVNDPRELEKIRQREADMTKERIEKLLKAGANVILTTKGIDDMALKYFVEAGAIAVRRVRKEDMRHVAKATGATLVTTFADMEGEETFDPAHLGSADEVVEERIADDDVILIKGTKTSSAVSLILRGANDYMLDEMERALHDALCIVKRTLESNTVVAGGGAVESALSVYLEHLATTLGSREQLAIAEFADALLIIPKVLAVNAAKDATELVAKLRAYHHTAQTKADKKHYSSMGLDLVNGTIRNNLEAGVIEPAMSKVKIIQFATEAAITILRIDDMIKLVKDESQGEE

SEQ ID NO: 44986 - protein, 520 aa, Arabidopsis thaliana
  peptide (1)..(520): Ceres Seq. ID no. 12600279
  misc_feature (6)..(513): Pfam Name: TCP-1/cpn60 chaperonin family Pfam Description: TCP-1/cpn60 chaperonin family
  misc_feature (6)..(513): Pfam Name: TCP-1/cpn60 chaperonin family Pfam Description: TCP-1/cpn60 chaperonin family
  misc_feature (6)..(513): Pfam Name: TCP-1/cpn60 chaperonin family Pfam Description: TCP-1/cpn60 chaperonin family
  misc_feature (1)..(518): Homolog of NCBI NO: 13959583 NR Description: T-complex protein 1, alpha subunit (TCP-1-alpha)
  misc_feature (1)..(520): Homolog of NCBI NO: 135538 NR Description: T-complex protein 1, alpha subunit (TCP-1-alpha)
  misc_feature (1)..(518): Homolog of NCBI NO: 135536 NR Description: T-COMPLEX PROTEIN 1, ALPHA SUBUNIT (TCP-1-ALPHA)
  misc_feature (1)..(518): Homolog of NCBI NO: 18859465 NR Description: t-complex polypeptide 1 [Danio rerio]
  misc_feature (1)..(518): Homolog of NCBI NO: 27881870 NR Description: Unknown (protein for MGC:55424) [Danio rerio]
  misc_feature (1)..(518): Homolog of NCBI NO: 13959583 NR Description: T-complex protein 1, alpha subunit (TCP-1-alpha)
  misc_feature (1)..(518): Homolog of NCBI NO: 135536 NR Description: T-COMPLEX PROTEIN 1, ALPHA SUBUNIT (TCP-1-ALPHA)
  misc_feature (1)..(518): Homolog of NCBI NO: 27881870 NR Description: Unknown (protein for MGC:55424) [Danio rerio]
  misc_feature (1)..(518): Homolog of NCBI NO: 18859465 NR Description: t-complex polypeptide 1 [Danio rerio]
  misc_feature (1)..(518): Homolog of NCBI NO: 135536 NR Description: T-COMPLEX PROTEIN 1, ALPHA SUBUNIT (TCP-1-ALPHA)
  misc_feature (1)..(520): Homolog of NCBI NO: 135538 NR Description: T-complex protein 1, alpha subunit (TCP-1-alpha)
  misc_feature (1)..(518): Homolog of NCBI NO: 13959583 NR Description: T-complex protein 1, alpha subunit (TCP-1-alpha)
  misc_feature (1)..(520): Homolog of NCBI NO: 15231024 NR Description: t-complex polypeptide 1 homologue
  misc_feature (1)..(520): Homolog of NCBI NO: 25083339 NR Description: t-complex polypeptide 1 homologue [Arabidopsis
  misc_feature (1)..(520): Homolog of NCBI NO: 9293959 NR Description: chaperonin, t-complex protein alpha subunit
  misc_feature (1)..(520): Homolog of NCBI NO: 24371053 NR Description: t-complex polypeptide 1 [Bruguiera sexangula]
  misc_feature (1)..(518): Homolog of NCBI NO: 17066720 NR Description: CCT chaperonin alpha subunit [Physarum
  misc_feature (1)..(520): Homolog of NCBI NO: 15231024 NR Description: t-complex polypeptide 1 homologue
  misc_feature (1)..(520): Homolog of NCBI NO: 25083339 NR Description: t-complex polypeptide 1 homologue [Arabidopsis
  misc_feature (1)..(520): Homolog of NCBI NO: 9293959 NR Description: chaperonin, t-complex protein alpha subunit
  misc_feature (1)..(520): Homolog of NCBI NO: 24371053 NR Description: t-complex polypeptide 1 [Bruguiera sexangula]
  misc_feature (1)..(518): Homolog of NCBI NO: 17066720 NR Description: CCT chaperonin alpha subunit [Physarum
  misc_feature (1)..(518): Homolog of NCBI NO: 27881870 NR Description: Unknown (protein for MGC:55424) [Danio rerio]
  misc_feature (1)..(518): Homolog of NCBI NO: 18859465 NR Description: t-complex polypeptide 1 [Danio rerio]
  misc_feature (1)..(520): Homolog of NCBI NO: 135538 NR Description: T-complex protein 1, alpha subunit (TCP-1-alpha)
  misc_feature (1)..(518): Homolog of NCBI NO: 17066720 NR Description: CCT chaperonin alpha subunit [Physarum
  misc_feature (1)..(520): Homolog of NCBI NO: 24371053 NR Description: t-complex polypeptide 1 [Bruguiera sexangula]
  misc_feature (1)..(520): Homolog of NCBI NO: 9293959 NR Description: chaperonin, t-complex protein alpha subunit
  misc_feature (1)..(520): Homolog of NCBI NO: 25083339 NR Description: t-complex polypeptide 1 homologue [Arabidopsis
  misc_feature (1)..(520): Homolog of NCBI NO: 15231024 NR Description: t-complex polypeptide 1 homologue
MACQAVSNIVKTSLGPVGLDKMLVDDIGDVTITNDGATILRMLEVEHPAAKVLVELAELQDREVGDGTTSVVIVAAELLKRANDLVRNKIHPTSIISGYRLAMRESCKYIEEKLVTKVEKLGKVPLINCAKTSMSSKLISGDSDFFANLVVEAVLSVKMTNQRGEIKYPIKGINILKAHGQSARDSYLLNGYALNTGRAAQGMPLRVSPAKIACLDFNLQKTKMQLGVQVVVNDPRELEKIRQREADMTKERIEKLLKAGANVILTTKGIDDMALKYFVEAGAIAVRRVRKEDMRHVAKATGATLVTTFADMEGEETFDPAHLGSADEVVEERIADDDVILIKGTKTSSAVSLILRGANDYMLDEMERALHDALCIVKRTLESNTVVAGGGAVESALSVYLEHLATTLGSREQLAIAEFADALLIIPKVLAVNAAKDATELVAKLRAYHHTAQTKADKKHYSSMGLDLVNGTIRNNLEAGVIEPAMSKVKIIQFATEAAITILRIDDMIKLVKDESQGEE

SEQ ID NO: 44987 - protein, 499 aa, Arabidopsis thaliana
  peptide (1)..(499): Ceres Seq. ID no. 12600280
  misc_feature (1)..(492): Pfam Name: TCP-1/cpn60 chaperonin family Pfam Description: TCP-1/cpn60 chaperonin family
  misc_feature (1)..(492): Pfam Name: TCP-1/cpn60 chaperonin family Pfam Description: TCP-1/cpn60 chaperonin family
  misc_feature (1)..(492): Pfam Name: TCP-1/cpn60 chaperonin family Pfam Description: TCP-1/cpn60 chaperonin family
  misc_feature (1)..(497): Homolog of NCBI NO: 13959583 NR Description: T-complex protein 1, alpha subunit (TCP-1-alpha)
  misc_feature (1)..(499): Homolog of NCBI NO: 135538 NR Description: T-complex protein 1, alpha subunit (TCP-1-alpha)
  misc_feature (1)..(497): Homolog of NCBI NO: 135536 NR Description: T-COMPLEX PROTEIN 1, ALPHA SUBUNIT (TCP-1-ALPHA)
  misc_feature (1)..(497): Homolog of NCBI NO: 18859465 NR Description: t-complex polypeptide 1 [Danio rerio]
  misc_feature (1)..(497): Homolog of NCBI NO: 27881870 NR Description: Unknown (protein for MGC:55424) [Danio rerio]
  misc_feature (1)..(497): Homolog of NCBI NO: 13959583 NR Description: T-complex protein 1, alpha subunit (TCP-1-alpha)
  misc_feature (1)..(497): Homolog of NCBI NO: 135536 NR Description: T-COMPLEX PROTEIN 1, ALPHA SUBUNIT (TCP-1-ALPHA)
  misc_feature (1)..(497): Homolog of NCBI NO: 27881870 NR Description: Unknown (protein for MGC:55424) [Danio rerio]
  misc_feature (1)..(497): Homolog of NCBI NO: 18859465 NR Description: t-complex polypeptide 1 [Danio rerio]
  misc_feature (1)..(497): Homolog of NCBI NO: 135536 NR Description: T-COMPLEX PROTEIN 1, ALPHA SUBUNIT (TCP-1-ALPHA)
  misc_feature (1)..(499): Homolog of NCBI NO: 135538 NR Description: T-complex protein 1, alpha subunit (TCP-1-alpha)
  misc_feature (1)..(497): Homolog of NCBI NO: 13959583 NR Description: T-complex protein 1, alpha subunit (TCP-1-alpha)
  misc_feature (1)..(499): Homolog of NCBI NO: 15231024 NR Description: t-complex polypeptide 1 homologue
  misc_feature (1)..(499): Homolog of NCBI NO: 25083339 NR Description: t-complex polypeptide 1 homologue [Arabidopsis
  misc_feature (1)..(499): Homolog of NCBI NO: 9293959 NR Description: chaperonin, t-complex protein alpha subunit
  misc_feature (1)..(499): Homolog of NCBI NO: 24371053 NR Description: t-complex polypeptide 1 [Bruguiera sexangula]
  misc_feature (1)..(497): Homolog of NCBI NO: 17066720 NR Description: CCT chaperonin alpha subunit [Physarum
  misc_feature (1)..(499): Homolog of NCBI NO: 15231024 NR Description: t-complex polypeptide 1 homologue
  misc_feature (1)..(499): Homolog of NCBI NO: 25083339 NR Description: t-complex polypeptide 1 homologue [Arabidopsis
  misc_feature (1)..(499): Homolog of NCBI NO: 9293959 NR Description: chaperonin, t-complex protein alpha subunit
  misc_feature (1)..(499): Homolog of NCBI NO: 24371053 NR Description: t-complex polypeptide 1 [Bruguiera sexangula]
  misc_feature (1)..(497): Homolog of NCBI NO: 17066720 NR Description: CCT chaperonin alpha subunit [Physarum
  misc_feature (1)..(497): Homolog of NCBI NO: 27881870 NR Description: Unknown (protein for MGC:55424) [Danio rerio]
  misc_feature (1)..(497): Homolog of NCBI NO: 18859465 NR Description: t-complex polypeptide 1 [Danio rerio]
  misc_feature (1)..(499): Homolog of NCBI NO: 135538 NR Description: T-complex protein 1, alpha subunit (TCP-1-alpha)
  misc_feature (1)..(497): Homolog of NCBI NO: 17066720 NR Description: CCT chaperonin alpha subunit [Physarum
  misc_feature (1)..(499): Homolog of NCBI NO: 24371053 NR Description: t-complex polypeptide 1 [Bruguiera sexangula]
  misc_feature (1)..(499): Homolog of NCBI NO: 9293959 NR Description: chaperonin, t-complex protein alpha subunit
  misc_feature (1)..(499): Homolog of NCBI NO: 25083339 NR Description: t-complex polypeptide 1 homologue [Arabidopsis
  misc_feature (1)..(499): Homolog of NCBI NO: 15231024 NR Description: t-complex polypeptide 1 homologue
MLVDDIGDVTITNDGATILRMLEVEHPAAKVLVELAELQDREVGDGTTSVVIVAAELLKRANDLVRNKIHPTSIISGYRLAMRESCKYIEEKLVTKVEKLGKVPLINCAKTSMSSKLISGDSDFFANLVVEAVLSVKMTNQRGEIKYPIKGINILKAHGQSARDSYLLNGYALNTGRAAQGMPLRVSPAKIACLDFNLQKTKMQLGVQVVVNDPRELEKIRQREADMTKERIEKLLKAGANVILTTKGIDDMALKYFVEAGAIAVRRVRKEDMRHVAKATGATLVTTFADMEGEETFDPAHLGSADEVVEERIADDDVILIKGTKTSSAVSLILRGANDYMLDEMERALHDALCIVKRTLESNTVVAGGGAVESALSVYLEHLATTLGSREQLAIAEFADALLIIPKVLAVNAAKDATELVAKLRAYHHTAQTKADKKHYSSMGLDLVNGTIRNNLEAGVIEPAMSKVKIIQFATEAAITILRIDDMIKLVKDESQGEE

SEQ ID NO: 44988 - DNA, 1590 bp, Arabidopsis thaliana
  misc_feature (1)..(1590): Ceres Seq. ID no. 12600281
  misc_feature: MA Experiment ID: 20000173 Result: Down-regulated in Transcription
  misc_feature: MA Experiment 20000173 PARAMETER Experiment Name: At_42deg_Heat_P Parameter: Age (day) Value: 14
  misc_feature: MA Experiment 20000173 PARAMETER Experiment Name: At_42deg_Heat_P Parameter: Organism Value: A. thaliana
  misc_feature: MA Experiment 20000173 PARAMETER Experiment Name: At_42deg_Heat_P Parameter: Plant Line Value: WS
  misc_feature: MA Experiment 20000173 PARAMETER Experiment Name: At_42deg_Heat_P Parameter: Temperature (deg C) Value: 42 vs. 22
  misc_feature: MA Experiment 20000173 PARAMETER Experiment Name: At_42deg_Heat_P Parameter: Timepoint (hr) Value: 6
  misc_feature: MA Experiment 20000173 PARAMETER Experiment Name: At_42deg_Heat_P Parameter: Tissue Value: Aerial
  misc_feature: MA Experiment ID: 20000180 Result: Up-regulated in Transcription
  misc_feature: MA Experiment 20000180 PARAMETER Experiment Name: At_Germinating_Seeds_P Parameter: Age (hr) Value: 24 vs. 0
  misc_feature: MA Experiment 20000180 PARAMETER Experiment Name: At_Germinating_Seeds_P Parameter: Tissue Value: Germinating Seeds
  misc_feature: MA Experiment ID: 20000185 Result: Down-regulated in Transcription
  misc_feature: MA Experiment 20000185 PARAMETER Experiment Name: At_Roots__P Parameter: Age (day) Value: 7 vs. 21
  misc_feature: MA Experiment 20000185 PARAMETER Experiment Name: At_Roots__P Parameter: Organism Value: A. thaliana
  misc_feature: MA Experiment 20000185 PARAMETER Experiment Name: At_Roots__P Parameter: Tissue Value: Roots vs. Whole Plant
  misc_feature: MA Experiment ID: 20000439 Result: Down-regulated in Transcription
  misc_feature: MA Experiment 20000439 PARAMETER Experiment Name: At_Roots__P Parameter: Age (day) Value: 14 vs. 21
  misc_feature: MA Experiment 20000439 PARAMETER Experiment Name: At_Roots__P Parameter: Organism Value: A. thaliana
  misc_feature: MA Experiment 20000439 PARAMETER Experiment Name: At_Roots__P Parameter: Tissue Value: Roots vs. Whole Plant
  misc_feature: MA Experiment ID: 20000495 Result: Down-regulated in Transcription
  misc_feature: MA Experiment 20000495 PARAMETER Experiment Name: At_Guard_Cells_P Parameter: Harvest Date Value: 8/2/2002
  misc_feature: MA Experiment 20000495 PARAMETER Experiment Name: At_Guard_Cells_P Parameter: Organism Value: A. thaliana
  misc_feature: MA Experiment 20000495 PARAMETER Experiment Name: At_Guard_Cells_P Parameter: Tissue Value: Guard Cells vs. Leaves
  misc_feature: MA Experiment ID: 20000794 Result: Down-regulated in Transcription
  misc_feature: MA Experiment 20000794 PARAMETER Experiment Name: At_Petals_P Parameter: Age (day) Value: 23-25 days
  misc_feature: MA Experiment 20000794 PARAMETER Experiment Name: At_Petals_P Parameter: Plant Line Value: WS
  misc_feature: MA Experiment 20000794 PARAMETER Experiment Name: At_Petals_P Parameter: Tissue Value: Petals vs. Whole plant
  misc_feature: MA Experiment ID: 20001248 Result: Down-regulated in Transcription
  misc_feature: MA Experiment 20001248 PARAMETER Experiment Name: At_Far-red-induction_P Parameter: Age (day) Value: 7
  misc_feature: MA Experiment 20001248 PARAMETER Experiment Name: At_Far-red-induction_P Parameter: Light Value: Far-red vs. White
  misc_feature: MA Experiment 20001248 PARAMETER Experiment Name: At_Far-red-induction_P Parameter: Organism Value: A. thaliana
  misc_feature: MA Experiment 20001248 PARAMETER Experiment Name: At_Far-red-induction_P Parameter: Plant Line Value: Columbia
  misc_feature: MA Experiment 20001248 PARAMETER Experiment Name: At_Far-red-induction_P Parameter: Timepoint (hr) Value: 4
  misc_feature: MA Experiment 20001248 PARAMETER Experiment Name: At_Far-red-induction_P Parameter: Tissue Value: Whole Plant
  misc_feature: MA Experiment ID: 20001450 Result: Down-regulated in Transcription
  misc_feature: MA Experiment 20001450 PARAMETER Experiment Name: At_Far-red-induction_P Parameter: Age (day) Value: 7
  misc_feature: MA Experiment 20001450 PARAMETER Experiment Name: At_Far-red-induction_P Parameter: Light Value: Far-red vs. White
  misc_feature: MA Experiment 20001450 PARAMETER Experiment Name: At_Far-red-induction_P Parameter: Organism Value: A. thaliana
  misc_feature: MA Experiment 20001450 PARAMETER Experiment Name: At_Far-red-induction_P Parameter: Plant Line Value: Columbia
  misc_feature: MA Experiment 20001450 PARAMETER Experiment Name: At_Far-red-induction_P Parameter: Timepoint (hr) Value: 8
  misc_feature: MA Experiment 20001450 PARAMETER Experiment Name: At_Far-red-induction_P Parameter: Tissue Value: Whole Plant
  misc_feature: MA Experiment ID: 20001905 Result: Down-regulated in Transcription
  misc_feature: MA Experiment 20001905 PARAMETER Experiment Name: At_Drought_Reproduction_P Parameter: Age (day) Value: 40
  misc_feature: MA Experiment 20001905 PARAMETER Experiment Name: At_Drought_Reproduction_P Parameter: Organism Value: A. thaliana
  misc_feature: MA Experiment 20001905 PARAMETER Experiment Name: At_Drought_Reproduction_P Parameter: Plant Line Value: WS
  misc_feature: MA Experiment 20001905 PARAMETER Experiment Name: At_Drought_Reproduction_P Parameter: Timepoint (day) Value: 10
  misc_feature: MA Experiment 20001905 PARAMETER Experiment Name: At_Drought_Reproduction_P Parameter: Tissue Value: Rosettes
  misc_feature: MA Experiment 20001905 PARAMETER Experiment Name: At_Drought_Reproduction_P Parameter: Treatment Value: Drought vs. No Drought
actctctcatcaccaccatgctttctctaactgcaacaactctcagttcctccattttcacacaatccaaaacccatggattcttcaatacccgacccgtttaccgaaaacccttcaccaccatcacctccgctttaatccccgcttcaaaccgtcaagctccaccaaaacaacaactctatcaaccattccgtccaccaccatcaccaatccctccaaagttccgatcactcgacaccgccggaaaaatcgaagtcctcgctgatcgtctcggtctctggttcgaatacgctccactcatttcctccttatacactgaaggattcactcctccatcaatcgaagaactcaccggaatctccggtgtcgaacagaacagtctcatcgtcggcgcgcaagttcgagactctttagttcaatccggtgccaaaccggagcttatagctgcgtttgacacaaatggagccgagcttctctacgagattcgtcttttaaacacaactcaacgtgtagctgctgctgaatacattgttgatcacggtttcgatacgaaaggagctggagatcttgcgagagcgattaaagattttccgcatcgtcgtggcgacgttggtttgggagactttgattataacttacctggagattgtttgtcttttatgctttataggaaaagtagagagcatcggagtccgtcggagattcgaactacattactcgaacaagctcttgaaaccgcggtaacagagaaggcgaaaaaggcggtgttgagggagttacatggagagagtgaagaagagagagttaaagaagaggagataaaaatcattcgtgttcctgtagtgagattaaggtttggagaagtagcgggagcgagttcggttgttgttttaccggtttgtaaagcagaagaaggagaagagaagcttcttgaagcaccaatggagtttgaaagtggaggagagtttggtgtagtggaagctgagaaagattggagtagatgggtggttttaccgggttgggatcccgtggttgcggttaggaaaggagtggcggtttcgtttagcgatgatagggaagttttgccgtggaacgggaaaggagaggcgataatggttgtgatcgatagggaaaagaagacggtggaagctgataatggatactactaccttgttgtggctgatggtgggatgaagttggatagaggattggtgttgaaggagaaaggagtgaatgagagcttaggaatggttgttttggtcgttaggccgccgagagatgatgatgatgagtggcagataaatgatgaagattgggattagaattcaattagaagaatagttaaacaaatacttatatgcttttggttttggcaaatatgtaatttttttgtttgattgctttttatctcataaatgtttctttcattgttgtgtttagtgtctagctacatcaagattctcaccgtagtttttagttgaactatgttttgtgtagttaaagaacattgtataaggactaggggatgatgatgagattgcagcttataaaagcctattcggtaacaatgcaataaacaaaatattgtac

SEQ ID NO: 44989 - protein, 439 aa, Arabidopsis thaliana
  peptide (1)..(439): Ceres Seq. ID no. 12600282
  misc_feature (72)..(358): Homolog of NCBI NO: 37521728 NR Description: hypothetical protein glr2159 [Gloeobacter
  misc_feature (79)..(438): Homolog of NCBI NO: 22299309 NR Description: ORF_ID:tlr1766~hypothetical protein
  misc_feature (72)..(390): Homolog of NCBI NO: 16331838 NR Description: unknown protein [Synechocystis sp. PCC 6803]
  misc_feature (77)..(396): Homolog of NCBI NO: 23042669 NR Description: hypothetical protein [Trichodesmium erythraeum
  misc_feature (65)..(395): Homolog of NCBI NO: 17232742 NR Description: hypothetical protein [Nostoc sp. PCC 7120]
  misc_feature (65)..(395): Homolog of NCBI NO: 23127437 NR Description: hypothetical protein [Nostoc punctiforme]
  misc_feature (53)..(439): Homolog of NCBI NO: 37534826 NR Description: unknown protein [Oryza sativa (japonica
  misc_feature (6)..(439): Homolog of NCBI NO: 18396920 NR Description: expressed protein
  misc_feature (6)..(439): Homolog of NCBI NO: 15241839 NR Description: putative protein; protein id: At5g28500.1
  misc_feature (72)..(358): Homolog of NCBI NO: 37521728 NR Description: hypothetical protein glr2159 [Gloeobacter
  misc_feature (79)..(438): Homolog of NCBI NO: 22299309 NR Description: ORF_ID:tlr1766~hypothetical protein
  misc_feature (72)..(390): Homolog of NCBI NO: 16331838 NR Description: unknown protein [Synechocystis sp. PCC 6803]
  misc_feature (77)..(396): Homolog of NCBI NO: 23042669 NR Description: hypothetical protein [Trichodesmium erythraeum
  misc_feature (65)..(395): Homolog of NCBI NO: 17232742 NR Description: hypothetical protein [Nostoc sp. PCC 7120]
  misc_feature (65)..(395): Homolog of NCBI NO: 23127437 NR Description: hypothetical protein [Nostoc punctiforme]
  misc_feature (53)..(439): Homolog of NCBI NO: 37534826 NR Description: unknown protein [Oryza sativa (japonica
  misc_feature (6)..(439): Homolog of NCBI NO: 18396920 NR Description: expressed protein
  misc_feature (6)..(439): Homolog of NCBI NO: 15241839 NR Description: putative protein; protein id: At5g28500.1
SLITTMLSLTATTLSSSIFTQSKTHGFFNTRPVYRKPFTTITSALIPASNRQAPPKQQLYQPFRPPPSPIPPKFRSLDTAGKIEVLADRLGLWFEYAPLISSLYTEGFTPPSIEELTGISGVEQNSLIVGAQVRDSLVQSGAKPELIAAFDTNGAELLYEIRLLNTTQRVAAAEYIVDHGFDTKGAGDLARAIKDFPHRRGDVGLGDFDYNLPGDCLSFMLYRKSREHRSPSEIRTTLLEQALETAVTEKAKKAVLRELHGESEEERVKEEEIKIIRVPVVRLRFGEVAGASSVVVLPVCKAEEGEEKLLEAPMEFESGGEFGVVEAEKDWSRWVVLPGWDPVVAVRKGVAVSFSDDREVLPWNGKGEAIMVVIDREKKTVEADNGYYYLVVADGGMKLDRGLVLKEKGVNESLGMVVLVVRPPRDDDDEWQINDEDWD

SEQ ID NO: 44990 - protein, 434 aa, Arabidopsis thaliana
  peptide (1)..(434): Ceres Seq. ID no. 12600283
  misc_feature (67)..(353): Homolog of NCBI NO: 37521728 NR Description: hypothetical protein glr2159 [Gloeobacter
  misc_feature (74)..(433): Homolog of NCBI NO: 22299309 NR Description: ORF_ID:tlr1766~hypothetical protein
  misc_feature (67)..(385): Homolog of NCBI NO: 16331838 NR Description: unknown protein [Synechocystis sp. PCC 6803]
  misc_feature (72)..(391): Homolog of NCBI NO: 23042669 NR Description: hypothetical protein [Trichodesmium erythraeum
  misc_feature (60)..(390): Homolog of NCBI NO: 17232742 NR Description: hypothetical protein [Nostoc sp. PCC 7120]
  misc_feature (60)..(390): Homolog of NCBI NO: 23127437 NR Description: hypothetical protein [Nostoc punctiforme]
  misc_feature (48)..(434): Homolog of NCBI NO: 37534826 NR Description: unknown protein [Oryza sativa (japonica
  misc_feature (1)..(434): Homolog of NCBI NO: 18396920 NR Description: expressed protein
  misc_feature (1)..(434): Homolog of NCBI NO: 15241839 NR Description: putative protein; protein id: At5g28500.1
  misc_feature (67)..(353): Homolog of NCBI NO: 37521728 NR Description: hypothetical protein glr2159 [Gloeobacter
  misc_feature (74)..(433): Homolog of NCBI NO: 22299309 NR Description: ORF_ID:tlr1766~hypothetical protein
  misc_feature (67)..(385): Homolog of NCBI NO: 16331838 NR Description: unknown protein [Synechocystis sp. PCC 6803]
  misc_feature (72)..(391): Homolog of NCBI NO: 23042669 NR Description: hypothetical protein [Trichodesmium erythraeum
  misc_feature (60)..(390): Homolog of NCBI NO: 17232742 NR Description: hypothetical protein [Nostoc sp. PCC 7120]
  misc_feature (60)..(390): Homolog of NCBI NO: 23127437 NR Description: hypothetical protein [Nostoc punctiforme]
  misc_feature (48)..(434): Homolog of NCBI NO: 37534826 NR Description: unknown protein [Oryza sativa (japonica
  misc_feature (1)..(434): Homolog of NCBI NO: 18396920 NR Description: expressed protein
  misc_feature (1)..(434): Homolog of NCBI NO: 15241839 NR Description: putative protein; protein id: At5g28500.1
MLSLTATTLSSSIFTQSKTHGFFNTRPVYRKPFTTITSALIPASNRQAPPKQQLYQPFRPPPSPIPPKFRSLDTAGKIEVLADRLGLWFEYAPLISSLYTEGFTPPSIEELTGISGVEQNSLIVGAQVRDSLVQSGAKPELIAAFDTNGAELLYEIRLLNTTQRVAAAEYIVDHGFDTKGAGDLARAIKDFPHRRGDVGLGDFDYNLPGDCLSFMLYRKSREHRSPSEIRTTLLEQALETAVTEKAKKAVLRELHGESEEERVKEEEIKIIRVPVVRLRFGEVAGASSVVVLPVCKAEEGEEKLLEAPMEFESGGEFGVVEAEKDWSRWVVLPGWDPVVAVRKGVAVSFSDDREVLPWNGKGEAIMVVIDREKKTVEADNGYYYLVVADGGMKLDRGLVLKEKGVNESLGMVVLVVRPPRDDDDEWQINDEDWD

SEQ ID NO: 44991 - protein, 220 aa, Arabidopsis thaliana
  peptide (1)..(220): Ceres Seq. ID no. 12600284
  misc_feature (1)..(139): Homolog of NCBI NO: 37521728 NR Description: hypothetical protein glr2159 [Gloeobacter
  misc_feature (1)..(219): Homolog of NCBI NO: 22299309 NR Description: ORF_ID:tlr1766~hypothetical protein
  misc_feature (1)..(171): Homolog of NCBI NO: 16331838 NR Description: unknown protein [Synechocystis sp. PCC 6803]
  misc_feature (1)..(177): Homolog of NCBI NO: 23042669 NR Description: hypothetical protein [Trichodesmium erythraeum
  misc_feature (1)..(176): Homolog of NCBI NO: 17232742 NR Description: hypothetical protein [Nostoc sp. PCC 7120]
  misc_feature (1)..(176): Homolog of NCBI NO: 23127437 NR Description: hypothetical protein [Nostoc punctiforme]
  misc_feature (1)..(220): Homolog of NCBI NO: 37534826 NR Description: unknown protein [Oryza sativa (japonica
  misc_feature (1)..(220): Homolog of NCBI NO: 18396920 NR Description: expressed protein
  misc_feature (1)..(220): Homolog of NCBI NO: 15241839 NR Description: putative protein; protein id: At5g28500.1
  misc_feature (1)..(139): Homolog of NCBI NO: 37521728 NR Description: hypothetical protein glr2159 [Gloeobacter
  misc_feature (1)..(219): Homolog of NCBI NO: 22299309 NR Description: ORF_ID:tlr1766~hypothetical protein
  misc_feature (1)..(171): Homolog of NCBI NO: 16331838 NR Description: unknown protein [Synechocystis sp. PCC 6803]
  misc_feature (1)..(177): Homolog of NCBI NO: 23042669 NR Description: hypothetical protein [Trichodesmium erythraeum
  misc_feature (1)..(176): Homolog of NCBI NO: 17232742 NR Description: hypothetical protein [Nostoc sp. PCC 7120]
  misc_feature (1)..(176): Homolog of NCBI NO: 23127437 NR Description: hypothetical protein [Nostoc punctiforme]
  misc_feature (1)..(220): Homolog of NCBI NO: 37534826 NR Description: unknown protein [Oryza sativa (japonica
  misc_feature (1)..(220): Homolog of NCBI NO: 18396920 NR Description: expressed protein
  misc_feature (1)..(220): Homolog of NCBI NO: 15241839 NR Description: putative protein; protein id: At5g28500.1
MLYRKSREHRSPSEIRTTLLEQALETAVTEKAKKAVLRELHGESEEERVKEEEIKIIRVPVVRLRFGEVAGASSVVVLPVCKAEEGEEKLLEAPMEFESGGEFGVVEAEKDWSRWVVLPGWDPVVAVRKGVAVSFSDDREVLPWNGKGEAIMVVIDREKKTVEADNGYYYLVVADGGMKLDRGLVLKEKGVNESLGMVVLVVRPPRDDDDEWQINDEDWD

SEQ ID NO: 44992 - DNA, 1689 bp, Arabidopsis thaliana
  misc_feature (1)..(1689): Ceres Seq. ID no. 13575713
  misc_feature: MA Experiment ID: 20000185 Result: Down-regulated in Transcription
  misc_feature: MA Experiment 20000185 PARAMETER Experiment Name: At_Roots__P Parameter: Age (day) Value: 7 vs. 21
  misc_feature: MA Experiment 20000185 PARAMETER Experiment Name: At_Roots__P Parameter: Organism Value: A. thaliana
  misc_feature: MA Experiment 20000185 PARAMETER Experiment Name: At_Roots__P Parameter: Tissue Value: Roots vs. Whole Plant
ggaacatcaacatgtggctctctttcttcctcctccgccgagatttttctccgtctctcgttctccgcaatggcggcggtcgctacctccttctgtttctctccccatcgatcgccgtcacgttttggaaaccctaattcatccattcgaagaacaatcgtctgtaaatcatctcctcgcgatgaatctccagccgtctccacttcttctcagcgaccggaaaagcagcagaatcctctgacttcacagaataaaccggatcatgatcacaaaccggatcctgggattggtaaaattggaatggagataatgtcaattgcattacctgctgcattagctttagctgctgatcctataacatctcttgtcgacactgccttcgttggccatattggttctgcggaattagctgcagtaggagtgtcagtttctgtattcaatttggtgtcgaagctcttcaatgttcctttactaaatgtcacaacatcgtttgttgcggaggagcaagcaattgctgctaaggatgataatgattctatagaaacaagcaagaaagtgctgccttcggtttcaacttcattagttcttgctgctggagttggtattgcagaggccattgcgctatctctcgggtctgatttcttgatggatgtcatggctataccttttgattcaccaatgcggataccagcagagcagttcctcagacttcgagcgtatggtgcaccaccaattgttgttgcattggctgcgcaaggagcttttcgaggtttcaaggacacaacaacgcctctatatgccgttgttgcggggaatgtacttaatgcggtattggatccaatcctgatatttgtccttggttttggtatctctggtgctgcggctgctactgtgatttctgaatacttgattgcatttattcttctatggaagttgaatgagaatgtagttttgctctctcctcaaatcaaagtgggaagagccaaccagtacctcaaatcaggtgggcttctcattggtagaacggtggctttgcttgtgccattcacattagctacttcgttagcagctcaaaatggacccactcaaatggctggccatcaaatcgtcttggaaatctggttggctgtctctttactcaccgatgctttagccattgctgcacagagtcttcttgccaccacttactctcaaggagaatacaaacaagcccgggaagttctcttcggagtccttcaagtaggtttagcaactggaactggtttggctgctgtattgttcatcactttcgaaccattttcaagcttattcacaacggattcagaagttttaaagattgctttgtcagggaccttatttgtggctggatctcaaccggtgaatgctctagcgtttgttttggatgggctctattatggtgtctctgacttcggatttgccgcttattctatggtgattgtcggattcatatcttccttgttcatgcttgtggctgcaccaacgtttggccttgccgggatctggactggtttgttcctcttcatggcgttgcggttggttgctggagcctggaggatactgcgtcatgtttcagattggggacaagaaccggtccatggaaaatgctatggtctgctccagagaagccagaatgaagcggatcactgttttttgcggtatgatgcgtga

SEQ ID NO: 44993 - protein, 562 aa, Arabidopsis thaliana
  peptide (1)..(562): Ceres Seq. ID no. 13575714
  misc_feature (112)..(309): Pfam Name: MviN-like protein Pfam Description: MviN-like protein
  misc_feature (184)..(382): Homolog of NCBI NO: 18403476 NR Description: expressed protein [Arabidopsis thaliana]
  misc_feature (96)..(526): Homolog of NCBI NO: 37532300 NR Description: putative membrane protein
  misc_feature (96)..(184): Homolog of NCBI NO: 19386721 NR Description: P0678F11.10 [Oryza sativa (japonica
  misc_feature (184)..(484): Homolog of NCBI NO: 19386721 NR Description: P0678F11.10 [Oryza sativa (japonica
  misc_feature (100)..(195): Homolog of NCBI NO: 15231918 NR Description: MATE efflux protein family [Arabidopsis thaliana]
  misc_feature (177)..(533): Homolog of NCBI NO: 15231918 NR Description: MATE efflux protein family [Arabidopsis thaliana]
  misc_feature (98)..(176): Homolog of NCBI NO: 25405456 NR Description: hypothetical protein F11M15.20 [imported] -
  misc_feature (184)..(525): Homolog of NCBI NO: 25405456 NR Description: hypothetical protein F11M15.20 [imported] -
  misc_feature (24)..(533): Homolog of NCBI NO: 30687474 NR Description: MATE efflux protein family [Arabidopsis thaliana]
  misc_feature (24)..(562): Homolog of NCBI NO: 7487160 NR Description: hypothetical protein At2g38330 [imported] -
GTSTCGSLSSSSAEIFLRLSFSAMAAVATSFCFSPHRSPSRFGNPNSSIRRTIVCKSSPRDESPAVSTSSQRPEKQQNPLTSQNKPDHDHKPDPGIGKIGMEIMSIALPAALALAADPITSLVDTAFVGHIGSAELAAVGVSVSVFNLVSKLFNVPLLNVTTSFVAEEQAIAAKDDNDSIETSKKVLPSVSTSLVLAAGVGIAEAIALSLGSDFLMDVMAIPFDSPMRIPAEQFLRLRAYGAPPIVVALAAQGAFRGFKDTTTPLYAVVAGNVLNAVLDPILIFVLGFGISGAAAATVISEYLIAFILLWKLNENVVLLSPQIKVGRANQYLKSGGLLIGRTVALLVPFTLATSLAAQNGPTQMAGHQIVLEIWLAVSLLTDALAIAAQSLLATTYSQGEYKQAREVLFGVLQVGLATGTGLAAVLFITFEPFSSLFTTDSEVLKIALSGTLFVAGSQPVNALAFVLDGLYYGVSDFGFAAYSMVIVGFISSLFMLVAAPTFGLAGIWTGLFLFMALRLVAGAWRILRHVSDWGQEPVHGKCYGLLQRSQNEADHCFLRYDA

SEQ ID NO: 44994 - protein, 539 aa, Arabidopsis thaliana
  peptide (1)..(539): Ceres Seq. ID no. 13575715
  misc_feature (89)..(286): Pfam Name: MviN-like protein Pfam Description: MviN-like protein
  misc_feature (161)..(359): Homolog of NCBI NO: 18403476 NR Description: expressed protein [Arabidopsis thaliana]
  misc_feature (73)..(503): Homolog of NCBI NO: 37532300 NR Description: putative membrane protein
  misc_feature (73)..(161): Homolog of NCBI NO: 19386721 NR Description: P0678F11.10 [Oryza sativa (japonica
  misc_feature (161)..(461): Homolog of NCBI NO: 19386721 NR Description: P0678F11.10 [Oryza sativa (japonica
  misc_feature (77)..(172): Homolog of NCBI NO: 15231918 NR Description: MATE efflux protein family [Arabidopsis thaliana]
  misc_feature (154)..(510): Homolog of NCBI NO: 15231918 NR Description: MATE efflux protein family [Arabidopsis thaliana]
  misc_feature (75)..(153): Homolog of NCBI NO: 25405456 NR Description: hypothetical protein F11M15.20 [imported] -
  misc_feature (161)..(502): Homolog of NCBI NO: 25405456 NR Description: hypothetical protein F11M15.20 [imported] -
  misc_feature (1)..(510): Homolog of NCBI NO: 30687474 NR Description: MATE efflux protein family [Arabidopsis thaliana]
  misc_feature (1)..(539): Homolog of NCBI NO: 7487160 NR Description: hypothetical protein At2g38330 [imported] -
MAAVATSFCFSPHRSPSRFGNPNSSIRRTIVCKSSPRDESPAVSTSSQRPEKQQNPLTSQNKPDHDHKPDPGIGKIGMEIMSIALPAALALAADPITSLVDTAFVGHIGSAELAAVGVSVSVFNLVSKLFNVPLLNVTTSFVAEEQAIAAKDDNDSIETSKKVLPSVSTSLVLAAGVGIAEAIALSLGSDFLMDVMAIPFDSPMRIPAEQFLRLRAYGAPPIVVALAAQGAFRGFKDTTTPLYAVVAGNVLNAVLDPILIFVLGFGISGAAAATVISEYLIAFILLWKLNENVVLLSPQIKVGRANQYLKSGGLLIGRTVALLVPFTLATSLAAQNGPTQMAGHQIVLEIWLAVSLLTDALAIAAQSLLATTYSQGEYKQAREVLFGVLQVGLATGTGLAAVLFITFEPFSSLFTTDSEVLKIALSGTLFVAGSQPVNALAFVLDGLYYGVSDFGFAAYSMVIVGFISSLFMLVAAPTFGLAGIWTGLFLFMALRLVAGAWRILRHVSDWGQEPVHGKCYGLLQRSQNEADHCFLRYDA

SEQ ID NO: 44995 - protein, 462 aa, Arabidopsis thaliana
  peptide (1)..(462): Ceres Seq. ID no. 13575716
  misc_feature (12)..(209): Pfam Name: MviN-like protein Pfam Description: MviN-like protein
  misc_feature (84)..(282): Homolog of NCBI NO: 18403476 NR Description: expressed protein [Arabidopsis thaliana]
  misc_feature (1)..(426): Homolog of NCBI NO: 37532300 NR Description: putative membrane protein
  misc_feature (1)..(84): Homolog of NCBI NO: 19386721 NR Description: P0678F11.10 [Oryza sativa (japonica
  misc_feature (84)..(384): Homolog of NCBI NO: 19386721 NR Description: P0678F11.10 [Oryza sativa (japonica
  misc_feature (1)..(95): Homolog of NCBI NO: 15231918 NR Description: MATE efflux protein family [Arabidopsis thaliana]
  misc_feature (77)..(433): Homolog of NCBI NO: 15231918 NR Description: MATE efflux protein family [Arabidopsis thaliana]
  misc_feature (1)..(76): Homolog of NCBI NO: 25405456 NR Description: hypothetical protein F11M15.20 [imported] -
  misc_feature (84)..(425): Homolog of NCBI NO: 25405456 NR Description: hypothetical protein F11M15.20 [imported] -
  misc_feature (1)..(433): Homolog of NCBI NO: 30687474 NR Description: MATE efflux protein family [Arabidopsis thaliana]
  misc_feature (1)..(462): Homolog of NCBI NO: 7487160 NR Description: hypothetical protein At2g38330 [imported] -
MEIMSIALPAALALAADPITSLVDTAFVGHIGSAELAAVGVSVSVFNLVSKLFNVPLLNVTTSFVAEEQAIAAKDDNDSIETSKKVLPSVSTSLVLAAGVGIAEAIALSLGSDFLMDVMAIPFDSPMRIPAEQFLRLRAYGAPPIVVALAAQGAFRGFKDTTTPLYAVVAGNVLNAVLDPILIFVLGFGISGAAAATVISEYLIAFILLWKLNENVVLLSPQIKVGRANQYLKSGGLLIGRTVALLVPFTLATSLAAQNGPTQMAGHQIVLEIWLAVSLLTDALAIAAQSLLATTYSQGEYKQAREVLFGVLQVGLATGTGLAAVLFITFEPFSSLFTTDSEVLKIALSGTLFVAGSQPVNALAFVLDGLYYGVSDFGFAAYSMVIVGFISSLFMLVAAPTFGLAGIWTGLFLFMALRLVAGAWRILRHVSDWGQEPVHGKCYGLLQRSQNEADHCFLRYDA

SEQ ID NO: 44996 - DNA, 2263 bp, Arabidopsis thaliana
  misc_feature (1)..(2263): Ceres Seq. ID no. 13591573
  misc_feature: MA Experiment ID: 20000180 Result: Up-regulated in Transcription
  misc_feature: MA Experiment 20000180 PARAMETER Experiment Name: At_Germinating_Seeds_P Parameter: Age (hr) Value: 24 vs. 0
  misc_feature: MA Experiment 20000180 PARAMETER Experiment Name: At_Germinating_Seeds_P Parameter: Tissue Value: Germinating Seeds
  misc_feature: MA Experiment ID: 20000185 Result: Down-regulated in Transcription
  misc_feature: MA Experiment 20000185 PARAMETER Experiment Name: At_Roots__P Parameter: Age (day) Value: 7 vs. 21
  misc_feature: MA Experiment 20000185 PARAMETER Experiment Name: At_Roots__P Parameter: Organism Value: A. thaliana
  misc_feature: MA Experiment 20000185 PARAMETER Experiment Name: At_Roots__P Parameter: Tissue Value: Roots vs. Whole Plant
  misc_feature: MA Experiment ID: 20000438 Result: Up-regulated in Transcription
  misc_feature: MA Experiment 20000438 PARAMETER Experiment Name: At_Shoots__P Parameter: Age (day) Value: 14
  misc_feature: MA Experiment 20000438 PARAMETER Experiment Name: At_Shoots__P Parameter: Tissue Value: Shoots vs. Whole Plant
  misc_feature: MA Experiment ID: 20000439 Result: Down-regulated in Transcription
  misc_feature: MA Experiment 20000439 PARAMETER Experiment Name: At_Roots__P Parameter: Age (day) Value: 14 vs. 21
  misc_feature: MA Experiment 20000439 PARAMETER Experiment Name: At_Roots__P Parameter: Organism Value: A. thaliana
  misc_feature: MA Experiment 20000439 PARAMETER Experiment Name: At_Roots__P Parameter: Tissue Value: Roots vs. Whole Plant
tcctccatatttgcagagctcgagattctccttccctatacaactctcatctgtaatcgatacagatggcagcttcatcagcttgtcttgtgggaaatggtttgtcagtgaacacaacaaccaaacagaggttaagtaaacatttttccggcagacagacaagcttttcttcagtgattaggacatctaaggttaatgtagtgaaggcttctttggatgggaagaagaagcaagaaggaagaagagattttctcaaaatcttgttaggaaatgctggggtcggtttggttgcaagtgggaaagcaaatgctgatgaacaaggtgtttcttcgtcgaggatgtcgtattctaggtttctagagtacttggataaggatagggtgaataaagttgatttgtatgagaatgggactatagctattgtggaagctgtttctcctgaattgggtaaccgggttgagagagtacgtgttcagctaccgggtttaagtcaagagcttctacagaagcttagggctaagaatattgattttgcagcacataatgctcaggaagatcaaggttctgtgttattcaacttgattggtaatcttgctttcccggcgcttttgattggtggtttgttccttctttcgagacggtctggtggtggaatgggtggacctggtggtcctggtaacccacttcagtttggtcagtccaaagcaaagttccaaatggaacctaacactggtgtaacatttgatgatgttgctggagttgatgaagcaaagcaagatttcatggaagtggtggagtttttgaagaaacctgagagattcactgcggttggtgccaagatcccgaaaggtgttcttcttattggtcctcctggtaccgggaaaacccttttggcaaaagccattgctggtgaagctggtgtgcctttcttctccatctctggttctgagtttgttgagatgtttgtcggtgttggtgcctcgagagtccgtgatcttttcaagaaagccaaggagaacgctccttgcattgtctttgtagatgaaatagatgctgttggtaggcaaagaggaaccggaattggtggaggtaatgatgaaagagaacagaccctcaatcagctcctaactgagatggatggttttgaaggtaacactggtgttatcgtagttgctgcaaccaatagagcagacattcttgactctgctttgttgaggccaggacggtttgaccggcaggtaagtgttgacgttcctgacgttaaggggagaacagatattctcaaggttcatgccggcaataagaagttcgacaatgatgtttcacttgaaataatagcaatgagaacacctggatttagcggagcagatctcgctaacctcttgaatgaggctgctatattggccggaaggcgagcacggacatcgatatcatctaaagagattgatgactccattgatagaatcgttgctggcatggaaggaacagtgatgaccgatggcaagagcaaaagcttggtagcttaccatgaagttggtcatgcagtgtgtggaacattgactccaggacatgatgctgtgcaaaaggtaacgttgataccaagaggccaagcaagaggtctgacttggttcattccatcagatgacccgacactcatctccaagcagcaactctttgcaagaattgttggtggactcggtggtagggccgctgaagaaatcatctttggtgattccgaggtgactactggcgcagttggtgacttacaacagatcaccggtttggctagacagatggtaacaacatttggaatgtctgatattggaccatggtctttgatggattcttcggcacaaagcgatgtcatcatgagaatgatggcaagaaactccatgtctgagaagcttgcagaagacattgattctgcggtgaagaaactatcagacagtgcatatgagatagctctaagccacataaagaacaatcgtgaagccatggataagctcgttgaagtgcttctcgagaaagaaactattggcggtgacgaattcagggcaattctttccgagtttactgagatccccccggaaaaccgagttccttcttcaacaacgacaactccagcatcagcaccaacaccagctgctgtctaagtaatcaatctgtatacttgtgatacttataatttttctgtaaatttatcttcaaacttacactctagaaatgtgatactatctcaaaatttagtaacaagtaaatgttt

SEQ ID NO: 44997 - protein, 695 aa, Arabidopsis thaliana
  peptide (1)..(695): Ceres Seq. ID no. 13591574
  misc_feature (455)..(665): Pfam Name: Peptidase family M41 Pfam Description: Peptidase family M41
  misc_feature (455)..(665): Pfam Name: Peptidase family M41 Pfam Description: Peptidase family M41
  misc_feature (455)..(665): Pfam Name: Peptidase family M41 Pfam Description: Peptidase family M41
  misc_feature (81)..(671): Homolog of NCBI NO: 16329797 NR Description: cell division protein; FtsH [Synechocystis sp.
  misc_feature (85)..(668): Homolog of NCBI NO: 17232268 NR Description: cell division protein [Nostoc sp. PCC 7120]
  misc_feature (88)..(679): Homolog of NCBI NO: 22298276 NR Description: cell division protein [Thermosynechococcus
  misc_feature (85)..(685): Homolog of NCBI NO: 11467752 NR Description: hypothetical chloroplast RF25 [Guillardia theta]
  misc_feature (87)..(676): Homolog of NCBI NO: 11465793 NR Description: ORF25 [Porphyra purpurea]
  misc_feature (81)..(671): Homolog of NCBI NO: 16329797 NR Description: cell division protein; FtsH [Synechocystis sp.
  misc_feature (88)..(679): Homolog of NCBI NO: 22298276 NR Description: cell division protein [Thermosynechococcus
  misc_feature (87)..(676): Homolog of NCBI NO: 11465793 NR Description: ORF25 [Porphyra purpurea]
  misc_feature (85)..(685): Homolog of NCBI NO: 11467752 NR Description: hypothetical chloroplast RF25 [Guillardia theta]
  misc_feature (88)..(679): Homolog of NCBI NO: 22298276 NR Description: cell division protein [Thermosynechococcus
  misc_feature (85)..(668): Homolog of NCBI NO: 17232268 NR Description: cell division protein [Nostoc sp. PCC 7120]
  misc_feature (81)..(671): Homolog of NCBI NO: 16329797 NR Description: cell division protein; FtsH [Synechocystis sp.
  misc_feature (1)..(669): Homolog of NCBI NO: 6692685 NR Description: F12K11.22 [Arabidopsis thaliana]
  misc_feature (1)..(688): Homolog of NCBI NO: 4325041 NR Description: FtsH-like protein Pftf precursor [Nicotiana
  misc_feature (1)..(695): Homolog of NCBI NO: 3808101 NR Description: chloroplast protease [Capsicum annuum]
  misc_feature (192)..(695): Homolog of NCBI NO: 21954076 NR Description: putative FtsH protease [Arabidopsis thaliana]
  misc_feature (1)..(673): Homolog of NCBI NO: 18417611 NR Description: FtsH protease, putative [Arabidopsis thaliana]
  misc_feature (1)..(669): Homolog of NCBI NO: 6692685 NR Description: F12K11.22 [Arabidopsis thaliana]
  misc_feature (1)..(688): Homolog of NCBI NO: 4325041 NR Description: FtsH-like protein Pftf precursor [Nicotiana
  misc_feature (1)..(695): Homolog of NCBI NO: 3808101 NR Description: chloroplast protease [Capsicum annuum]
  misc_feature (192)..(695): Homolog of NCBI NO: 21954076 NR Description: putative FtsH protease [Arabidopsis thaliana]
  misc_feature (1)..(673): Homolog of NCBI NO: 18417611 NR Description: FtsH protease, putative [Arabidopsis thaliana]
  misc_feature (87)..(676): Homolog of NCBI NO: 11465793 NR Description: ORF25 [Porphyra purpurea]
  misc_feature (85)..(685): Homolog of NCBI NO: 11467752 NR Description: hypothetical chloroplast RF25 [Guillardia theta]
  misc_feature (85)..(668): Homolog of NCBI NO: 17232268 NR Description: cell division protein [Nostoc sp. PCC 7120]
  misc_feature (1)..(673): Homolog of NCBI NO: 18417611 NR Description: FtsH protease, putative [Arabidopsis thaliana]
  misc_feature (192)..(695): Homolog of NCBI NO: 21954076 NR Description: putative FtsH protease [Arabidopsis thaliana]
  misc_feature (1)..(695): Homolog of NCBI NO: 3808101 NR Description: chloroplast protease [Capsicum annuum]
  misc_feature (1)..(688): Homolog of NCBI NO: 4325041 NR Description: FtsH-like protein Pftf precursor [Nicotiana
  misc_feature (1)..(669): Homolog of NCBI NO: 6692685 NR Description: F12K11.22 [Arabidopsis thaliana]
MAASSACLVGNGLSVNTTTKQRLSKHFSGRQTSFSSVIRTSKVNVVKASLDGKKKQEGRRDFLKILLGNAGVGLVASGKANADEQGVSSSRMSYSRFLEYLDKDRVNKVDLYENGTIAIVEAVSPELGNRVERVRVQLPGLSQELLQKLRAKNIDFAAHNAQEDQGSVLFNLIGNLAFPALLIGGLFLLSRRSGGGMGGPGGPGNPLQFGQSKAKFQMEPNTGVTFDDVAGVDEAKQDFMEVVEFLKKPERFTAVGAKIPKGVLLIGPPGTGKTLLAKAIAGEAGVPFFSISGSEFVEMFVGVGASRVRDLFKKAKENAPCIVFVDEIDAVGRQRGTGIGGGNDEREQTLNQLLTEMDGFEGNTGVIVVAATNRADILDSALLRPGRFDRQVSVDVPDVKGRTDILKVHAGNKKFDNDVSLEIIAMRTPGFSGADLANLLNEAAILAGRRARTSISSKEIDDSIDRIVAGMEGTVMTDGKSKSLVAYHEVGHAVCGTLTPGHDAVQKVTLIPRGQARGLTWFIPSDDPTLISKQQLFARIVGGLGGRAAEEIIFGDSEVTTGAVGDLQQITGLARQMVTTFGMSDIGPWSLMDSSAQSDVIMRMMARNSMSEKLAEDIDSAVKKLSDSAYEIALSHIKNNREAMDKLVEVLLEKETIGGDEFRAILSEFTEIPPENRVPSSTTTTPASAPTPAAV

SEQ ID NO: 44998 - protein, 604 aa, Arabidopsis thaliana
  peptide (1)..(604): Ceres Seq. ID no. 13591575
  misc_feature (364)..(574): Pfam Name: Peptidase family M41 Pfam Description: Peptidase family M41
  misc_feature (364)..(574): Pfam Name: Peptidase family M41 Pfam Description: Peptidase family M41
  misc_feature (364)..(574): Pfam Name: Peptidase family M41 Pfam Description: Peptidase family M41
  misc_feature (1)..(580): Homolog of NCBI NO: 16329797 NR Description: cell division protein; FtsH [Synechocystis sp.
  misc_feature (1)..(577): Homolog of NCBI NO: 17232268 NR Description: cell division protein [Nostoc sp. PCC 7120]
  misc_feature (1)..(588): Homolog of NCBI NO: 22298276 NR Description: cell division protein [Thermosynechococcus
  misc_feature (1)..(594): Homolog of NCBI NO: 11467752 NR Description: hypothetical chloroplast RF25 [Guillardia theta]
  misc_feature (1)..(585): Homolog of NCBI NO: 11465793 NR Description: ORF25 [Porphyra purpurea]
  misc_feature (1)..(580): Homolog of NCBI NO: 16329797 NR Description: cell division protein; FtsH [Synechocystis sp.
  misc_feature (1)..(588): Homolog of NCBI NO: 22298276 NR Description: cell division protein [Thermosynechococcus
  misc_feature (1)..(585): Homolog of NCBI NO: 11465793 NR Description: ORF25 [Porphyra purpurea]
  misc_feature (1)..(594): Homolog of NCBI NO: 11467752 NR Description: hypothetical chloroplast RF25 [Guillardia theta]
  misc_feature (1)..(588): Homolog of NCBI NO: 22298276 NR Description: cell division protein [Thermosynechococcus
  misc_feature (1)..(577): Homolog of NCBI NO: 17232268 NR Description: cell division protein [Nostoc sp. PCC 7120]
  misc_feature (1)..(580): Homolog of NCBI NO: 16329797 NR Description: cell division protein; FtsH [Synechocystis sp.
  misc_feature (1)..(578): Homolog of NCBI NO: 6692685 NR Description: F12K11.22 [Arabidopsis thaliana]
  misc_feature (1)..(597): Homolog of NCBI NO: 4325041 NR Description: FtsH-like protein Pftf precursor [Nicotiana
  misc_feature (1)..(604): Homolog of NCBI NO: 3808101 NR Description: chloroplast protease [Capsicum annuum]
  misc_feature (101)..(604): Homolog of NCBI NO: 21954076 NR Description: putative FtsH protease [Arabidopsis thaliana]
  misc_feature (1)..(582): Homolog of NCBI NO: 18417611 NR Description: FtsH protease, putative [Arabidopsis thaliana]
  misc_feature (1)..(578): Homolog of NCBI NO: 6692685 NR Description: F12K11.22 [Arabidopsis thaliana]
  misc_feature (1)..(597): Homolog of NCBI NO: 4325041 NR Description: FtsH-like protein Pftf precursor [Nicotiana
  misc_feature (1)..(604): Homolog of NCBI NO: 3808101 NR Description: chloroplast protease [Capsicum annuum]
  misc_feature (101)..(604): Homolog of NCBI NO: 21954076 NR Description: putative FtsH protease [Arabidopsis thaliana]
  misc_feature (1)..(582): Homolog of NCBI NO: 18417611 NR Description: FtsH protease, putative [Arabidopsis thaliana]
  misc_feature (1)..(585): Homolog of NCBI NO: 11465793 NR Description: ORF25 [Porphyra purpurea]
  misc_feature (1)..(594): Homolog of NCBI NO: 11467752 NR Description: hypothetical chloroplast RF25 [Guillardia theta]
  misc_feature (1)..(577): Homolog of NCBI NO: 17232268 NR Description: cell division protein [Nostoc sp. PCC 7120]
  misc_feature (1)..(582): Homolog of NCBI NO: 18417611 NR Description: FtsH protease, putative [Arabidopsis thaliana]
  misc_feature (101)..(604): Homolog of NCBI NO: 21954076 NR Description: putative FtsH protease [Arabidopsis thaliana]
  misc_feature (1)..(604): Homolog of NCBI NO: 3808101 NR Description: chloroplast protease [Capsicum annuum]
  misc_feature (1)..(597): Homolog of NCBI NO: 4325041 NR Description: FtsH-like protein Pftf precursor [Nicotiana
  misc_feature (1)..(578): Homolog of NCBI NO: 6692685 NR Description: F12K11.22 [Arabidopsis thaliana]
MSYSRFLEYLDKDRVNKVDLYENGTIAIVEAVSPELGNRVERVRVQLPGLSQELLQKLRAKNIDFAAHNAQEDQGSVLFNLIGNLAFPALLIGGLFLLSRRSGGGMGGPGGPGNPLQFGQSKAKFQMEPNTGVTFDDVAGVDEAKQDFMEVVEFLKKPERFTAVGAKIPKGVLLIGPPGTGKTLLAKAIAGEAGVPFFSISGSEFVEMFVGVGASRVRDLFKKAKENAPCIVFVDEIDAVGRQRGTGIGGGNDEREQTLNQLLTEMDGFEGNTGVIVVAATNRADILDSALLRPGRFDRQVSVDVPDVKGRTDILKVHAGNKKFDNDVSLEIIAMRTPGFSGADLANLLNEAAILAGRRARTSISSKEIDDSIDRIVAGMEGTVMTDGKSKSLVAYHEVGHAVCGTLTPGHDAVQKVTLIPRGQARGLTWFIPSDDPTLISKQQLFARIVGGLGGRAAEEIIFGDSEVTTGAVGDLQQITGLARQMVTTFGMSDIGPWSLMDSSAQSDVIMRMMARNSMSEKLAEDIDSAVKKLSDSAYEIALSHIKNNREAMDKLVEVLLEKETIGGDEFRAILSEFTEIPPENRVPSSTTTTPASAPTPAAV

SEQ ID NO: 44999 - protein, 499 aa, Arabidopsis thaliana
  peptide (1)..(499): Ceres Seq. ID no. 13591576
  misc_feature (259)..(469): Pfam Name: Peptidase family M41 Pfam Description: Peptidase family M41
  misc_feature (259)..(469): Pfam Name: Peptidase family M41 Pfam Description: Peptidase family M41
  misc_feature (259)..(469): Pfam Name: Peptidase family M41 Pfam Description: Peptidase family M41
  misc_feature (1)..(475): Homolog of NCBI NO: 16329797 NR Description: cell division protein; FtsH [Synechocystis sp.
  misc_feature (1)..(472): Homolog of NCBI NO: 17232268 NR Description: cell division protein [Nostoc sp. PCC 7120]
  misc_feature (1)..(483): Homolog of NCBI NO: 22298276 NR Description: cell division protein [Thermosynechococcus
  misc_feature (1)..(489): Homolog of NCBI NO: 11467752 NR Description: hypothetical chloroplast RF25 [Guillardia theta]
  misc_feature (1)..(480): Homolog of NCBI NO: 11465793 NR Description: ORF25 [Porphyra purpurea]
  misc_feature (1)..(475): Homolog of NCBI NO: 16329797 NR Description: cell division protein; FtsH [Synechocystis sp.
  misc_feature (1)..(483): Homolog of NCBI NO: 22298276 NR Description: cell division protein [Thermosynechococcus
  misc_feature (1)..(480): Homolog of NCBI NO: 11465793 NR Description: ORF25 [Porphyra purpurea]
  misc_feature (1)..(489): Homolog of NCBI NO: 11467752 NR Description: hypothetical chloroplast RF25 [Guillardia theta]
  misc_feature (1)..(483): Homolog of NCBI NO: 22298276 NR Description: cell division protein [Thermosynechococcus
  misc_feature (1)..(472): Homolog of NCBI NO: 17232268 NR Description: cell division protein [Nostoc sp. PCC 7120]
  misc_feature (1)..(475): Homolog of NCBI NO: 16329797 NR Description: cell division protein; FtsH [Synechocystis sp.
  misc_feature (1)..(473): Homolog of NCBI NO: 6692685 NR Description: F12K11.22 [Arabidopsis thaliana]
  misc_feature (1)..(492): Homolog of NCBI NO: 4325041 NR Description: FtsH-like protein Pftf precursor [Nicotiana
  misc_feature (1)..(499): Homolog of NCBI NO: 3808101 NR Description: chloroplast protease [Capsicum annuum]
  misc_feature (1)..(499): Homolog of NCBI NO: 21954076 NR Description: putative FtsH protease [Arabidopsis thaliana]
  misc_feature (1)..(477): Homolog of NCBI NO: 18417611 NR Description: FtsH protease, putative [Arabidopsis thaliana]
  misc_feature (1)..(473): Homolog of NCBI NO: 6692685 NR Description: F12K11.22 [Arabidopsis thaliana]
  misc_feature (1)..(492): Homolog of NCBI NO: 4325041 NR Description: FtsH-like protein Pftf precursor [Nicotiana
  misc_feature (1)..(499): Homolog of NCBI NO: 3808101 NR Description: chloroplast protease [Capsicum annuum]
  misc_feature (1)..(499): Homolog of NCBI NO: 21954076 NR Description: putative FtsH protease [Arabidopsis thaliana]
  misc_feature (1)..(477): Homolog of NCBI NO: 18417611 NR Description: FtsH protease, putative [Arabidopsis thaliana]
  misc_feature (1)..(480): Homolog of NCBI NO: 11465793 NR Description: ORF25 [Porphyra purpurea]
  misc_feature (1)..(489): Homolog of NCBI NO: 11467752 NR Description: hypothetical chloroplast RF25 [Guillardia theta]
  misc_feature (1)..(472): Homolog of NCBI NO: 17232268 NR Description: cell division protein [Nostoc sp. PCC 7120]
  misc_feature (1)..(477): Homolog of NCBI NO: 18417611 NR Description: FtsH protease, putative [Arabidopsis thaliana]
  misc_feature (1)..(499): Homolog of NCBI NO: 21954076 NR Description: putative FtsH protease [Arabidopsis thaliana]
  misc_feature (1)..(499): Homolog of NCBI NO: 3808101 NR Description: chloroplast protease [Capsicum annuum]
  misc_feature (1)..(492): Homolog of NCBI NO: 4325041 NR Description: FtsH-like protein Pftf precursor [Nicotiana
  misc_feature (1)..(473): Homolog of NCBI NO: 6692685 NR Description: F12K11.22 [Arabidopsis thaliana]
MGGPGGPGNPLQFGQSKAKFQMEPNTGVTFDDVAGVDEAKQDFMEVVEFLKKPERFTAVGAKIPKGVLLIGPPGTGKTLLAKAIAGEAGVPFFSISGSEFVEMFVGVGASRVRDLFKKAKENAPCIVFVDEIDAVGRQRGTGIGGGNDEREQTLNQLLTEMDGFEGNTGVIVVAATNRADILDSALLRPGRFDRQVSVDVPDVKGRTDILKVHAGNKKFDNDVSLEIIAMRTPGFSGADLANLLNEAAILAGRRARTSISSKEIDDSIDRIVAGMEGTVMTDGKSKSLVAYHEVGHAVCGTLTPGHDAVQKVTLIPRGQARGLTWFIPSDDPTLISKQQLFARIVGGLGGRAAEEIIFGDSEVTTGAVGDLQQITGLARQMVTTFGMSDIGPWSLMDSSAQSDVIMRMMARNSMSEKLAEDIDSAVKKLSDSAYEIALSHIKNNREAMDKLVEVLLEKETIGGDEFRAILSEFTEIPPENRVPSSTTTTPASAPTPAAV

SEQ ID NO: 45000 - DNA, 1519 bp, Arabidopsis thaliana
  misc_feature (1)..(1519): Ceres Seq. ID no. 12600301
  misc_feature: MA Experiment ID: 20000307 Result: Down-regulated in Transcription
  misc_feature: MA Experiment 20000307 PARAMETER Experiment Name: At_Germinating_Seeds_Sub_P Parameter: Age (hr) Value: 24 vs. 0
  misc_feature: MA Experiment 20000307 PARAMETER Experiment Name: At_Germinating_Seeds_Sub_P Parameter: Organism Value: A. thaliana
  misc_feature: MA Experiment 20000307 PARAMETER Experiment Name: At_Germinating_Seeds_Sub_P Parameter: Plant Line Value: WS
  misc_feature: MA Experiment 20000307 PARAMETER Experiment Name: At_Germinating_Seeds_Sub_P Parameter: Tissue Value: Germinating Seeds
ggttttttttctctcatagtcgctctccctctcctctccctttgagaaatccctaactctttgctcttctcttcccggcgatctatctctccgatttgggtattgaaatggcaactcctatggttgaagatacgtcaagcttcgaagaggatcagcttgcttccatgtccaccgaagatatcactagagctactcgtcttctcgacaacgagattcgaattctcaaggaagacgcgcaaagaacaaatctagaatgtgattcttacaaggagaagattaaggagaatcaggagaagattaaactcaacaagcagctgccttacttggttggcaacattgtcgagattttggagatgaatccagaagatgatgctgaggaagatggtgcaaatattgatcttgactcgcaacggaaaggaaaatgtgttgtgttgaaaacgtctacacggcagaccatctttctaccagttgttggactcgtggatcctgatagtttgaaacctggtgacttggttggagttaacaaagatagctacttgattttggataccttgccatccgagtatgactctagggttaaagccatggaggtcgatgaaaaaccaactgaagattacaatgacattggaggactagagaagcagatccaagagcttgtagaggcaattgtgcttcccatgacgcacaaggaacgttttgagaagctgggtgttcgtccaccaaagggagtgctcttgtatggtcccccagggactggtaaaactttaatggctcgtgcctgcgcagcacagaccaatgccaccttccttaaattggcaggccctcaattggtccagatgttcattggagacggagcaaagcttgtccgtgatgcctttcaacttgccaaagagaaagctccgtgcattatcttcatagatgaaatcgatgccattggtacaaagcgtttcgacagtgaagtcagcggagacagggaagtgcagaggactatgttggagttgctcaatcaacttgacggattcagtagcgatgaacgtattaaggtgattgcagctactaaccgtgcagatattctggacccagcactcatgcgttctggtcgattagacagaaagattgagttcccacacccaaccgaagaagcgagagcaagaatcttgcagattcactcaaggaagatgaatgtccacccagacgtcaactttgaggagcttgcacgatcaacagatgatttcaatggagctcagctgaaagcagtgtgtgtagaggcaggcatgttagctcttcgccgtgatgccacagaggtgaaccatgaagacttcaatgaaggtatcatccaagtccaggccaagaagaaagcaagcttgaactactacgcctgatctctctctctcatcatttatttttatcaatgccgtttatctttcaactagttttacttgtaccctcattccgatttggatctttttaagttttcgaatcaggatcatctattatatcaaaatacatttaattgtgt

SEQ ID NO: 45001 - protein, 424 aa, Arabidopsis thaliana
  peptide (1)..(424): Ceres Seq. ID no. 12600302
  misc_feature (207)..(394): Pfam Name: ATPase family associated with various cellular Pfam Description: ATPase family associated with various cellular
  misc_feature (207)..(394): Pfam Name: ATPase family associated with various cellular Pfam Description: ATPase family associated with various cellular
  misc_feature (2)..(424): Homolog of NCBI NO: 1174613 NR Description: 26S PROTEASE REGULATORY SUBUNIT 6A HOMOLOG
  misc_feature (5)..(424): Homolog of NCBI NO: 3024431 NR Description: 26S protease regulatory subunit 6A homolog
  misc_feature (2)..(424): Homolog of NCBI NO: 17297989 NR Description: 26S proteasome regulatory particle triple-A
  misc_feature (1)..(424): Homolog of NCBI NO: 15217431 NR Description: 26S protease regulatory subunit 6A
  misc_feature (1)..(424): Homolog of NCBI NO: 1729860 NR Description: 26S PROTEASE REGULATORY SUBUNIT 6A HOMOLOG
  misc_feature (2)..(424): Homolog of NCBI NO: 1174613 NR Description: 26S PROTEASE REGULATORY SUBUNIT 6A HOMOLOG
  misc_feature (2)..(424): Homolog of NCBI NO: 17297989 NR Description: 26S proteasome regulatory particle triple-A
  misc_feature (1)..(424): Homolog of NCBI NO: 1729860 NR Description: 26S PROTEASE REGULATORY SUBUNIT 6A HOMOLOG
  misc_feature (1)..(424): Homolog of NCBI NO: 15230005 NR Description: 26S proteasome AAA-ATPase subunit RPT5a
  misc_feature (1)..(424): Homolog of NCBI NO: 12697589 NR Description: Tat binding protein like protein [Brassica rapa]
  misc_feature (1)..(424): Homolog of NCBI NO: 3024434 NR Description: 26S PROTEASE REGULATORY SUBUNIT 6A HOMOLOG
  misc_feature (1)..(424): Homolog of NCBI NO: 23197864 NR Description: 26S proteasome AAA-ATPase subunit RPT5a
  misc_feature (1)..(424): Homolog of NCBI NO: 5669047 NR Description: 19S proteasome regulatory complex subunit S6A
  misc_feature (1)..(424): Homolog of NCBI NO: 15217431 NR Description: 26S protease regulatory subunit 6A
  misc_feature (5)..(424): Homolog of NCBI NO: 3024431 NR Description: 26S protease regulatory subunit 6A homolog
  misc_feature (1)..(424): Homolog of NCBI NO: 5669047 NR Description: 19S proteasome regulatory complex subunit S6A
  misc_feature (1)..(424): Homolog of NCBI NO: 23197864 NR Description: 26S proteasome AAA-ATPase subunit RPT5a
  misc_feature (1)..(424): Homolog of NCBI NO: 3024434 NR Description: 26S PROTEASE REGULATORY SUBUNIT 6A HOMOLOG
  misc_feature (1)..(424): Homolog of NCBI NO: 12697589 NR Description: Tat binding protein like protein [Brassica rapa]
  misc_feature (1)..(424): Homolog of NCBI NO: 15230005 NR Description: 26S proteasome AAA-ATPase subunit RPT5a
MATPMVEDTSSFEEDQLASMSTEDITRATRLLDNEIRILKEDAQRTNLECDSYKEKIKENQEKIKLNKQLPYLVGNIVEILEMNPEDDAEEDGANIDLDSQRKGKCVVLKTSTRQTIFLPVVGLVDPDSLKPGDLVGVNKDSYLILDTLPSEYDSRVKAMEVDEKPTEDYNDIGGLEKQIQELVEAIVLPMTHKERFEKLGVRPPKGVLLYGPPGTGKTLMARACAAQTNATFLKLAGPQLVQMFIGDGAKLVRDAFQLAKEKAPCIIFIDEIDAIGTKRFDSEVSGDREVQRTMLELLNQLDGFSSDERIKVIAATNRADILDPALMRSGRLDRKIEFPHPTEEARARILQIHSRKMNVHPDVNFEELARSTDDFNGAQLKAVCVEAGMLALRRDATEVNHEDFNEGIIQVQAKKKASLNYYA

SEQ ID NO: 45002 - protein, 420 aa, Arabidopsis thaliana
  peptide (1)..(420): Ceres Seq. ID no. 12600303
  misc_feature (203)..(390): Pfam Name: ATPase family associated with various cellular Pfam Description: ATPase family associated with various cellular
  misc_feature (203)..(390): Pfam Name: ATPase family associated with various cellular Pfam Description: ATPase family associated with various cellular
  misc_feature (1)..(420): Homolog of NCBI NO: 1174613 NR Description: 26S PROTEASE REGULATORY SUBUNIT 6A HOMOLOG
  misc_feature (1)..(420): Homolog of NCBI NO: 3024431 NR Description: 26S protease regulatory subunit 6A homolog
  misc_feature (1)..(420): Homolog of NCBI NO: 17297989 NR Description: 26S proteasome regulatory particle triple-A
  misc_feature (1)..(420): Homolog of NCBI NO: 15217431 NR Description: 26S protease regulatory subunit 6A
  misc_feature (1)..(420): Homolog of NCBI NO: 1729860 NR Description: 26S PROTEASE REGULATORY SUBUNIT 6A HOMOLOG
  misc_feature (1)..(420): Homolog of NCBI NO: 1174613 NR Description: 26S PROTEASE REGULATORY SUBUNIT 6A HOMOLOG
  misc_feature (1)..(420): Homolog of NCBI NO: 17297989 NR Description: 26S proteasome regulatory particle triple-A
  misc_feature (1)..(420): Homolog of NCBI NO: 1729860 NR Description: 26S PROTEASE REGULATORY SUBUNIT 6A HOMOLOG
  misc_feature (1)..(420): Homolog of NCBI NO: 15230005 NR Description: 26S proteasome AAA-ATPase subunit RPT5a
  misc_feature (1)..(420): Homolog of NCBI NO: 12697589 NR Description: Tat binding protein like protein [Brassica rapa]
  misc_feature (1)..(420): Homolog of NCBI NO: 3024434 NR Description: 26S PROTEASE REGULATORY SUBUNIT 6A HOMOLOG
  misc_feature (1)..(420): Homolog of NCBI NO: 23197864 NR Description: 26S proteasome AAA-ATPase subunit RPT5a
  misc_feature (1)..(420): Homolog of NCBI NO: 5669047 NR Description: 19S proteasome regulatory complex subunit S6A
  misc_feature (1)..(420): Homolog of NCBI NO: 15217431 NR Description: 26S protease regulatory subunit 6A
  misc_feature (1)..(420): Homolog of NCBI NO: 3024431 NR Description: 26S protease regulatory subunit 6A homolog
  misc_feature (1)..(420): Homolog of NCBI NO: 5669047 NR Description: 19S proteasome regulatory complex subunit S6A
  misc_feature (1)..(420): Homolog of NCBI NO: 23197864 NR Description: 26S proteasome AAA-ATPase subunit RPT5a
  misc_feature (1)..(420): Homolog of NCBI NO: 3024434 NR Description: 26S PROTEASE REGULATORY SUBUNIT 6A HOMOLOG
  misc_feature (1)..(420): Homolog of NCBI NO: 12697589 NR Description: Tat binding protein like protein [Brassica rapa]
  misc_feature (1)..(420): Homolog of NCBI NO: 15230005 NR Description: 26S proteasome AAA-ATPase subunit RPT5a
MVEDTSSFEEDQLASMSTEDITRATRLLDNEIRILKEDAQRTNLECDSYKEKIKENQEKIKLNKQLPYLVGNIVEILEMNPEDDAEEDGANIDLDSQRKGKCVVLKTSTRQTIFLPVVGLVDPDSLKPGDLVGVNKDSYLILDTLPSEYDSRVKAMEVDEKPTEDYNDIGGLEKQIQELVEAIVLPMTHKERFEKLGVRPPKGVLLYGPPGTGKTLMARACAAQTNATFLKLAGPQLVQMFIGDGAKLVRDAFQLAKEKAPCIIFIDEIDAIGTKRFDSEVSGDREVQRTMLELLNQLDGFSSDERIKVIAATNRADILDPALMRSGRLDRKIEFPHPTEEARARILQIHSRKMNVHPDVNFEELARSTDDFNGAQLKAVCVEAGMLALRRDATEVNHEDFNEGIIQVQAKKKASLNYYA

SEQ ID NO: 45003 - protein, 405 aa, Arabidopsis thaliana
  peptide (1)..(405): Ceres Seq. ID no. 12600304
  misc_feature (188)..(375): Pfam Name: ATPase family associated with various cellular Pfam Description: ATPase family associated with various cellular
  misc_feature (188)..(375): Pfam Name: ATPase family associated with various cellular Pfam Description: ATPase family associated with various cellular
  misc_feature (1)..(405): Homolog of NCBI NO: 1174613 NR Description: 26S PROTEASE REGULATORY SUBUNIT 6A HOMOLOG
  misc_feature (1)..(405): Homolog of NCBI NO: 3024431 NR Description: 26S protease regulatory subunit 6A homolog
  misc_feature (1)..(405): Homolog of NCBI NO: 17297989 NR Description: 26S proteasome regulatory particle triple-A
  misc_feature (1)..(405): Homolog of NCBI NO: 15217431 NR Description: 26S protease regulatory subunit 6A
  misc_feature (1)..(405): Homolog of NCBI NO: 1729860 NR Description: 26S PROTEASE REGULATORY SUBUNIT 6A HOMOLOG
  misc_feature (1)..(405): Homolog of NCBI NO: 1174613 NR Description: 26S PROTEASE REGULATORY SUBUNIT 6A HOMOLOG
  misc_feature (1)..(405): Homolog of NCBI NO: 17297989 NR Description: 26S proteasome regulatory particle triple-A
  misc_feature (1)..(405): Homolog of NCBI NO: 1729860 NR Description: 26S PROTEASE REGULATORY SUBUNIT 6A HOMOLOG
  misc_feature (1)..(405): Homolog of NCBI NO: 15230005 NR Description: 26S proteasome AAA-ATPase subunit RPT5a
  misc_feature (1)..(405): Homolog of NCBI NO: 12697589 NR Description: Tat binding protein like protein [Brassica rapa]
  misc_feature (1)..(405): Homolog of NCBI NO: 3024434 NR Description: 26S PROTEASE REGULATORY SUBUNIT 6A HOMOLOG
  misc_feature (1)..(405): Homolog of NCBI NO: 23197864 NR Description: 26S proteasome AAA-ATPase subunit RPT5a
  misc_feature (1)..(405): Homolog of NCBI NO: 5669047 NR Description: 19S proteasome regulatory complex subunit S6A
  misc_feature (1)..(405): Homolog of NCBI NO: 15217431 NR Description: 26S protease regulatory subunit 6A
  misc_feature (1)..(405): Homolog of NCBI NO: 3024431 NR Description: 26S protease regulatory subunit 6A homolog
  misc_feature (1)..(405): Homolog of NCBI NO: 5669047 NR Description: 19S proteasome regulatory complex subunit S6A
  misc_feature (1)..(405): Homolog of NCBI NO: 23197864 NR Description: 26S proteasome AAA-ATPase subunit RPT5a
  misc_feature (1)..(405): Homolog of NCBI NO: 3024434 NR Description: 26S PROTEASE REGULATORY SUBUNIT 6A HOMOLOG
  misc_feature (1)..(405): Homolog of NCBI NO: 12697589 NR Description: Tat binding protein like protein [Brassica rapa]
  misc_feature (1)..(405): Homolog of NCBI NO: 15230005 NR Description: 26S proteasome AAA-ATPase subunit RPT5a
MSTEDITRATRLLDNEIRILKEDAQRTNLECDSYKEKIKENQEKIKLNKQLPYLVGNIVEILEMNPEDDAEEDGANIDLDSQRKGKCVVLKTSTRQTIFLPVVGLVDPDSLKPGDLVGVNKDSYLILDTLPSEYDSRVKAMEVDEKPTEDYNDIGGLEKQIQELVEAIVLPMTHKERFEKLGVRPPKGVLLYGPPGTGKTLMARACAAQTNATFLKLAGPQLVQMFIGDGAKLVRDAFQLAKEKAPCIIFIDEIDAIGTKRFDSEVSGDREVQRTMLELLNQLDGFSSDERIKVIAATNRADILDPALMRSGRLDRKIEFPHPTEEARARILQIHSRKMNVHPDVNFEELARSTDDFNGAQLKAVCVEAGMLALRRDATEVNHEDFNEGIIQVQAKKKASLNYYA

SEQ ID NO: 45004 - DNA, 2158 bp, Arabidopsis thaliana
  misc_feature (1)..(2158): Ceres Seq. ID no. 12559890
  misc_feature: MA Experiment ID: 20000184 Result: Down-regulated in Transcription
  misc_feature: MA Experiment 20000184 PARAMETER Experiment Name: At_Shoots__P Parameter: Age (day) Value: 7
  misc_feature: MA Experiment 20000184 PARAMETER Experiment Name: At_Shoots__P Parameter: Tissue Value: Shoots vs. Whole Plant
  misc_feature: MA Experiment ID: 20000234 Result: Up-regulated in Transcription
  misc_feature: MA Experiment 20000234 PARAMETER Experiment Name: At_Siliques_P Parameter: Age (day) Value: 21
  misc_feature: MA Experiment 20000234 PARAMETER Experiment Name: At_Siliques_P Parameter: Organism Value: A. thaliana
  misc_feature: MA Experiment 20000234 PARAMETER Experiment Name: At_Siliques_P Parameter: Plant Line Value: WS
  misc_feature: MA Experiment 20000234 PARAMETER Experiment Name: At_Siliques_P Parameter: Tissue Value: Less Than 5mm Siliques vs. Whole Plant
  misc_feature: MA Experiment ID: 20000264 Result: Up-regulated in Transcription
  misc_feature: MA Experiment 20000264 PARAMETER Experiment Name: At_Open_Flower_P Parameter: Age (day) Value: 21
  misc_feature: MA Experiment 20000264 PARAMETER Experiment Name: At_Open_Flower_P Parameter: Plant Line Value: WS
  misc_feature: MA Experiment 20000264 PARAMETER Experiment Name: At_Open_Flower_P Parameter: Tissue Value: Open Flower vs. Whole Plant
  misc_feature: MA Experiment ID: 20000265 Result: Up-regulated in Transcription
  misc_feature: MA Experiment 20000265 PARAMETER Experiment Name: At_Open_Flower_P Parameter: Age (day) Value: 21
  misc_feature: MA Experiment 20000265 PARAMETER Experiment Name: At_Open_Flower_P Parameter: Plant Line Value: WS
  misc_feature: MA Experiment 20000265 PARAMETER Experiment Name: At_Open_Flower_P Parameter: Tissue Value: Closed Flower vs. Whole Plant
  misc_feature: MA Experiment ID: 20000286 Result: Up-regulated in Transcription
  misc_feature: MA Experiment 20000286 PARAMETER Experiment Name: At_Open_Flower_P Parameter: Age (day) Value: 21
  misc_feature: MA Experiment 20000286 PARAMETER Experiment Name: At_Open_Flower_P Parameter: Plant Line Value: WS
  misc_feature: MA Experiment 20000286 PARAMETER Experiment Name: At_Open_Flower_P Parameter: Tissue Value: Half Open vs. Whole Plant
  misc_feature: MA Experiment ID: 20000794 Result: Up-regulated in Transcription
  misc_feature: MA Experiment 20000794 PARAMETER Experiment Name: At_Petals_P Parameter: Age (day) Value: 23-25 days
  misc_feature: MA Experiment 20000794 PARAMETER Experiment Name: At_Petals_P Parameter: Plant Line Value: WS
  misc_feature: MA Experiment 20000794 PARAMETER Experiment Name: At_Petals_P Parameter: Tissue Value: Petals vs. Whole plant
  misc_feature: MA Experiment ID: 20001757 Result: Down-regulated in Transcription
  misc_feature: MA Experiment 20001757 PARAMETER Experiment Name: At_50mM_NH4NO3_L-to-H_P Parameter: Timepoint (hr) Value: 6
  misc_feature: MA Experiment 20001757 PARAMETER Experiment Name: At_50mM_NH4NO3_L-to-H_P Parameter: Tissue Value: Leaf
  misc_feature: MA Experiment 20001757 PARAMETER Experiment Name: At_50mM_NH4NO3_L-to-H_P Parameter: Treatment Value: 50mM NH4NO3 vs 100mM Mannitol
  misc_feature: MA Experiment ID: 20001910 Result: Up-regulated in Transcription
  misc_feature: MA Experiment 20001910 PARAMETER Experiment Name: At_Drought_Reproduction_P Parameter: Age (day) Value: 37
  misc_feature: MA Experiment 20001910 PARAMETER Experiment Name: At_Drought_Reproduction_P Parameter: Organism Value: A. thaliana
  misc_feature: MA Experiment 20001910 PARAMETER Experiment Name: At_Drought_Reproduction_P Parameter: Plant Line Value: WS
  misc_feature: MA Experiment 20001910 PARAMETER Experiment Name: At_Drought_Reproduction_P Parameter: Timepoint (day) Value: 7
  misc_feature: MA Experiment 20001910 PARAMETER Experiment Name: At_Drought_Reproduction_P Parameter: Tissue Value: Flowers
  misc_feature: MA Experiment 20001910 PARAMETER Experiment Name: At_Drought_Reproduction_P Parameter: Treatment Value: Drought vs. No Drought
ggcgtaacagattaaaaatatctacagtttctgttctaacgtaacgacgcctccctgcatttggattaagtggtaggttctttaaaagggaacccttttcaccactagttcttgaatccacatacaagccgaggcgtttcaatattaaatgtaaattttacccttaaaaccatttgatttctccttcaaaattcctgcaacgacattaatttgaaaaaaaaaaaacagagacgtaagatcaaagatgaggagcaagagcggttttagtttcttctctaaaatgacttcttcaaggaagaggccttctctctcactacctagcaagagtcacgagtccacggatgttaacaagaccatcgacaatgcagccgagattatcgagaaatggaacacagagtatgtttccgataagaaattttattctctgttttgcgagagcaagcgagacgcgaagaagtttgttaaacgcgtgaaggaactgcagaacgccatggatttgttgattagagaagatccaaattcggagaaactccttagagctcagaatctgatgcagatcgctatgaaacgacttcagaaagagtttctccagattctttcaatgaaccgtgcgcatttggatcctgaatccatctcctctagatctcctacatctgtcgtatcgaacgatgatgatgtttggcacgagtctcgttcagctggtgactccatcatcgaagttgaggaggtgtcaaagaactctaggacagagctgaaatccatagcagattgcatgatcgctgcgggttgtgcgaaagagtgtgcgactacttataaatccattcgaaaatcgatagttgatgaatcgatttaccgtctcggagtagagaatataagctcatccaaggcgaaaaagatgccatgtgaggttgttgagttgaagatgaataggtggatagaggcggttaaggtctcgatgaagactctcttcaatggcgaaaagactctatgcgatgaaatcttcgaatcctctgtttctcttagagagttttgtttccgagacatctccaaggaaggagctcttcttctgtttggattcccggaaactatcaccttaagagacaagaaaaatccacatccggagaagattttcccgttgctagatatgtattgcacgatcacagataacttgcttgcgattgaagcaatcttctcgtttccatcaatttcgaatgttcgaactcaagctcacagctcacttagccgactaagcgagtcaattcttgctcacttgatggattttgaatctcaaatacgtaaagactcgtccaagacagtggttcgtggtggaggagttcatccgatgactatctccgccatgaatcacatctctcgactcgcggaatacagtaacgctctcattaatatactcaagggatcatcatcatcatcttccgctaaagcattgcttcctaaatcttacttcaatgtctcagaatctgaagaatctccagtgtcggagctaaaagcacgattcgcgtggatgattctcgtcctcctctgtaaaatcgacggcaaagctgaaatgtacaaggacttctcaatgcagtatctcttcttagccaacaatctccaacacgttgtctcacgtgctcgatccacgaacgtgaagcatgttctcggcaacgattggatagcgaaaaactcagagaaagttagacagttcgcaagaagctacgagcggttggcatggggtccattggcgtcgatgtgtccggcgattagtacttcggaggcggtggagatgtcgcccgaagaagcgatgatgcaattcaaaaagttcaacgagactttcgagagcacgtgcgaggcacagagtgagtgcatcgtactagatccgaagctgttggacgagatgagaatttcgatcgggagaaaactgttaccggtttaccgcgatttttacaacgctcatagaaatgccgttatgttagcgggaacggaaggccagtggaatgtccgatataaccctgaagatattggaaaccacttgtcggagctgtttagcggaaagggtatttcggagaaaggatatgtctgtacgccagatttttgtgttacaacacctactccaactcctgtacgaaagactcgatctttgtcatgcagaagattttga

SEQ ID NO: 45005 - protein, 637 aa, Arabidopsis thaliana
  peptide (1)..(637): Ceres Seq. ID no. 12559891
  misc_feature (26)..(601): Pfam Name: Exo70 exocyst complex subunit Pfam Description: Exo70 exocyst complex subunit
  misc_feature (149)..(602): Homolog of NCBI NO: 15218495 NR Description: unknown protein; protein id: At1g72470.1
  misc_feature (19)..(606): Homolog of NCBI NO: 15226917 NR Description: unknown protein; protein id: At2g28640.1
  misc_feature (34)..(614): Homolog of NCBI NO: 25308573 NR Description: hypothetical protein [imported] - Arabidopsis
  misc_feature (34)..(562): Homolog of NCBI NO: 23397289 NR Description: unknown protein [Arabidopsis thaliana]
  misc_feature (34)..(602): Homolog of NCBI NO: 23397263 NR Description: unknown protein [Arabidopsis thaliana]
  misc_feature (34)..(602): Homolog of NCBI NO: 15238510 NR Description: putative protein
  misc_feature (34)..(605): Homolog of NCBI NO: 11278980 NR Description: hypothetical protein T26I12.30 - Arabidopsis
  misc_feature (1)..(605): Homolog of NCBI NO: 22331801 NR Description: putative protein
  misc_feature (1)..(605): Homolog of NCBI NO: 15225082 NR Description: hypothetical protein; protein id: At2g39380.1
  misc_feature (20)..(617): Homolog of NCBI NO: 15232697 NR Description: hypothetical protein; protein id: At3g09520.1
MRSKSGFSFFSKMTSSRKRPSLSLPSKSHESTDVNKTIDNAAEIIEKWNTEYVSDKKFYSLFCESKRDAKKFVKRVKELQNAMDLLIREDPNSEKLLRAQNLMQIAMKRLQKEFLQILSMNRAHLDPESISSRSPTSVVSNDDDVWHESRSAGDSIIEVEEVSKNSRTELKSIADCMIAAGCAKECATTYKSIRKSIVDESIYRLGVENISSSKAKKMPCEVVELKMNRWIEAVKVSMKTLFNGEKTLCDEIFESSVSLREFCFRDISKEGALLLFGFPETITLRDKKNPHPEKIFPLLDMYCTITDNLLAIEAIFSFPSISNVRTQAHSSLSRLSESILAHLMDFESQIRKDSSKTVVRGGGVHPMTISAMNHISRLAEYSNALINILKGSSSSSSAKALLPKSYFNVSESEESPVSELKARFAWMILVLLCKIDGKAEMYKDFSMQYLFLANNLQHVVSRARSTNVKHVLGNDWIAKNSEKVRQFARSYERLAWGPLASMCPAISTSEAVEMSPEEAMMQFKKFNETFESTCEAQSECIVLDPKLLDEMRISIGRKLLPVYRDFYNAHRNAVMLAGTEGQWNVRYNPEDIGNHLSELFSGKGISEKGYVCTPDFCVTTPTPTPVRKTRSLSCRRF

SEQ ID NO: 45006 - protein, 625 aa, Arabidopsis thaliana
  peptide (1)..(625): Ceres Seq. ID no. 12559892
  misc_feature (14)..(589): Pfam Name: Exo70 exocyst complex subunit Pfam Description: Exo70 exocyst complex subunit
  misc_feature (137)..(590): Homolog of NCBI NO: 15218495 NR Description: unknown protein; protein id: At1g72470.1
  misc_feature (7)..(594): Homolog of NCBI NO: 15226917 NR Description: unknown protein; protein id: At2g28640.1
  misc_feature (22)..(602): Homolog of NCBI NO: 25308573 NR Description: hypothetical protein [imported] - Arabidopsis
  misc_feature (22)..(550): Homolog of NCBI NO: 23397289 NR Description: unknown protein [Arabidopsis thaliana]
  misc_feature (22)..(590): Homolog of NCBI NO: 23397263 NR Description: unknown protein [Arabidopsis thaliana]
  misc_feature (22)..(590): Homolog of NCBI NO: 15238510 NR Description: putative protein
  misc_feature (22)..(593): Homolog of NCBI NO: 11278980 NR Description: hypothetical protein T26I12.30 - Arabidopsis
  misc_feature (1)..(593): Homolog of NCBI NO: 22331801 NR Description: putative protein
  misc_feature (1)..(593): Homolog of NCBI NO: 15225082 NR Description: hypothetical protein; protein id: At2g39380.1
  misc_feature (8)..(605): Homolog of NCBI NO: 15232697 NR Description: hypothetical protein; protein id: At3g09520.1
MTSSRKRPSLSLPSKSHESTDVNKTIDNAAEIIEKWNTEYVSDKKFYSLFCESKRDAKKFVKRVKELQNAMDLLIREDPNSEKLLRAQNLMQIAMKRLQKEFLQILSMNRAHLDPESISSRSPTSVVSNDDDVWHESRSAGDSIIEVEEVSKNSRTELKSIADCMIAAGCAKECATTYKSIRKSIVDESIYRLGVENISSSKAKKMPCEVVELKMNRWIEAVKVSMKTLFNGEKTLCDEIFESSVSLREFCFRDISKEGALLLFGFPETITLRDKKNPHPEKIFPLLDMYCTITDNLLAIEAIFSFPSISNVRTQAHSSLSRLSESILAHLMDFESQIRKDSSKTVVRGGGVHPMTISAMNHISRLAEYSNALINILKGSSSSSSAKALLPKSYFNVSESEESPVSELKARFAWMILVLLCKIDGKAEMYKDFSMQYLFLANNLQHVVSRARSTNVKHVLGNDWIAKNSEKVRQFARSYERLAWGPLASMCPAISTSEAVEMSPEEAMMQFKKFNETFESTCEAQSECIVLDPKLLDEMRISIGRKLLPVYRDFYNAHRNAVMLAGTEGQWNVRYNPEDIGNHLSELFSGKGISEKGYVCTPDFCVTTPTPTPVRKTRSLSCRRF

SEQ ID NO: 45007 - protein, 555 aa, Arabidopsis thaliana
  peptide (1)..(555): Ceres Seq. ID no. 12559893
  misc_feature (1)..(519): Pfam Name: Exo70 exocyst complex subunit Pfam Description: Exo70 exocyst complex subunit
  misc_feature (67)..(520): Homolog of NCBI NO: 15218495 NR Description: unknown protein; protein id: At1g72470.1
  misc_feature (1)..(524): Homolog of NCBI NO: 15226917 NR Description: unknown protein; protein id: At2g28640.1
  misc_feature (1)..(532): Homolog of NCBI NO: 25308573 NR Description: hypothetical protein [imported] - Arabidopsis
  misc_feature (1)..(480): Homolog of NCBI NO: 23397289 NR Description: unknown protein [Arabidopsis thaliana]
  misc_feature (1)..(520): Homolog of NCBI NO: 23397263 NR Description: unknown protein [Arabidopsis thaliana]
  misc_feature (1)..(520): Homolog of NCBI NO: 15238510 NR Description: putative protein
  misc_feature (1)..(523): Homolog of NCBI NO: 11278980 NR Description: hypothetical protein T26I12.30 - Arabidopsis
  misc_feature (1)..(523): Homolog of NCBI NO: 22331801 NR Description: putative protein
  misc_feature (1)..(523): Homolog of NCBI NO: 15225082 NR Description: hypothetical protein; protein id: At2g39380.1
  misc_feature (1)..(535): Homolog of NCBI NO: 15232697 NR Description: hypothetical protein; protein id: At3g09520.1
MDLLIREDPNSEKLLRAQNLMQIAMKRLQKEFLQILSMNRAHLDPESISSRSPTSVVSNDDDVWHESRSAGDSIIEVEEVSKNSRTELKSIADCMIAAGCAKECATTYKSIRKSIVDESIYRLGVENISSSKAKKMPCEVVELKMNRWIEAVKVSMKTLFNGEKTLCDEIFESSVSLREFCFRDISKEGALLLFGFPETITLRDKKNPHPEKIFPLLDMYCTITDNLLAIEAIFSFPSISNVRTQAHSSLSRLSESILAHLMDFESQIRKDSSKTVVRGGGVHPMTISAMNHISRLAEYSNALINILKGSSSSSSAKALLPKSYFNVSESEESPVSELKARFAWMILVLLCKIDGKAEMYKDFSMQYLFLANNLQHVVSRARSTNVKHVLGNDWIAKNSEKVRQFARSYERLAWGPLASMCPAISTSEAVEMSPEEAMMQFKKFNETFESTCEAQSECIVLDPKLLDEMRISIGRKLLPVYRDFYNAHRNAVMLAGTEGQWNVRYNPEDIGNHLSELFSGKGISEKGYVCTPDFCVTTPTPTPVRKTRSLSCRRF

SEQ ID NO: 45008 - DNA, 1777 bp, Arabidopsis thaliana
  misc_feature (1)..(1777): Ceres Seq. ID no. 12559910
  misc_feature: MA Experiment ID: 108435 Result: Down-regulated in Transcription
  misc_feature: MA Experiment 108435 PARAMETER Experiment Name: At_stm_Mutants_cDNA_P Parameter: Plant Line Value: wt Landsburg vs stm
  misc_feature: MA Experiment 108435 PARAMETER Experiment Name: At_stm_Mutants_cDNA_P Parameter: Tissue Value: Shoot Apical Meristem Region
  misc_feature: MA Experiment ID: 108462 Result: Up-regulated in Transcription
  misc_feature: MA Experiment 108462 PARAMETER Experiment Name: At_Germinating_Seeds_cDNA_P Parameter: Age (day) Value: 2 vs. 0
  misc_feature: MA Experiment 108462 PARAMETER Experiment Name: At_Germinating_Seeds_cDNA_P Parameter: Tissue Value: Germinating Seeds
  misc_feature: MA Experiment ID: 108463 Result: Up-regulated in Transcription
  misc_feature: MA Experiment 108463 PARAMETER Experiment Name: At_Germinating_Seeds_cDNA_P Parameter: Age (day) Value: 3 vs. 0
  misc_feature: MA Experiment 108463 PARAMETER Experiment Name: At_Germinating_Seeds_cDNA_P Parameter: Tissue Value: Germinating Seeds
  misc_feature: MA Experiment ID: 108464 Result: Up-regulated in Transcription
  misc_feature: MA Experiment 108464 PARAMETER Experiment Name: At_Germinating_Seeds_cDNA_P Parameter: Age (day) Value: 4 vs. 0
  misc_feature: MA Experiment 108464 PARAMETER Experiment Name: At_Germinating_Seeds_cDNA_P Parameter: Tissue Value: Germinating Seeds
  misc_feature: MA Experiment ID: 108488 Result: Up-regulated in Transcription
  misc_feature: MA Experiment ID: 108569 Result: Up-regulated in Transcription
  misc_feature: MA Experiment 108569 PARAMETER Experiment Name: At_0.001%_MeJA__cDNA_P Parameter: Timepoint (hr) Value: 6
  misc_feature: MA Experiment 108569 PARAMETER Experiment Name: At_0.001%_MeJA__cDNA_P Parameter: Tissue Value: Aerial
  misc_feature: MA Experiment 108569 PARAMETER Experiment Name: At_0.001%_MeJA__cDNA_P Parameter: Treatment Value: 0.001% MeJA vs. No Treatment
  misc_feature: MA Experiment ID: 108573 Result: Up-regulated in Transcription
  misc_feature: MA Experiment 108573 PARAMETER Experiment Name: At_Drought_cDNA_P Parameter: Timepoint (hr) Value: 6
  misc_feature: MA Experiment 108573 PARAMETER Experiment Name: At_Drought_cDNA_P Parameter: Tissue Value: Aerial
  misc_feature: MA Experiment 108573 PARAMETER Experiment Name: At_Drought_cDNA_P Parameter: Treatment Value: Drought vs. No Drought
  misc_feature: MA Experiment ID: 108579 Result: Up-regulated in Transcription
  misc_feature: MA Experiment 108579 PARAMETER Experiment Name: At_4deg_Cold_cDNA_P Parameter: Temperature (deg C) Value: 4 vs. 22
  misc_feature: MA Experiment 108579 PARAMETER Experiment Name: At_4deg_Cold_cDNA_P Parameter: Timepoint (hr) Value: 6
  misc_feature: MA Experiment 108579 PARAMETER Experiment Name: At_4deg_Cold_cDNA_P Parameter: Tissue Value: Aerial
  misc_feature: MA Experiment ID: 108594 Result: Down-regulated in Transcription
  misc_feature: MA Experiment 108594 PARAMETER Experiment Name: At_Ler-rhl_Root_cDNA_P Parameter: Plant Line Value: null
  misc_feature: MA Experiment ID: 108595 Result: Down-regulated in Transcription
  misc_feature: MA Experiment 108595 PARAMETER Experiment Name: At_Ler-pi_Ovule_cDNA_P Parameter: Plant Line Value: null
  misc_feature: MA Experiment ID: 108668 Result: Down-regulated in Transcription
  misc_feature: MA Experiment 108668 PARAMETER Experiment Name: At_2mM_SA_cDNA_P Parameter: Plant Line Value: WS
  misc_feature: MA Experiment 108668 PARAMETER Experiment Name: At_2mM_SA_cDNA_P Parameter: Timepoint (hr) Value: 6
  misc_feature: MA Experiment 108668 PARAMETER Experiment Name: At_2mM_SA_cDNA_P Parameter: Treatment Value: 2mM SA vs. No Treatment
  misc_feature: MA Experiment ID: 20000087 Result: Down-regulated in Transcription
  misc_feature: MA Experiment 20000087 PARAMETER Experiment Name: At_100uM_ABA_Mutants_cDNA_P Parameter: Plant Line Value: WS
  misc_feature: MA Experiment 20000087 PARAMETER Experiment Name: At_100uM_ABA_Mutants_cDNA_P Parameter: Timepoint (hr) Value: 6
  misc_feature: MA Experiment 20000087 PARAMETER Experiment Name: At_100uM_ABA_Mutants_cDNA_P Parameter: Tissue Value: Aerial
  misc_feature: MA Experiment 20000087 PARAMETER Experiment Name: At_100uM_ABA_Mutants_cDNA_P Parameter: Treatment Value: 100uM ABA vs. No Treatment
  misc_feature: MA Experiment ID: 20000089 Result: Down-regulated in Transcription
  misc_feature: MA Experiment ID: 20000173 Result: Down-regulated in Transcription
  misc_feature: MA Experiment 20000173 PARAMETER Experiment Name: At_42deg_Heat_P Parameter: Age (day) Value: 14
  misc_feature: MA Experiment 20000173 PARAMETER Experiment Name: At_42deg_Heat_P Parameter: Organism Value: A. thaliana
  misc_feature: MA Experiment 20000173 PARAMETER Experiment Name: At_42deg_Heat_P Parameter: Plant Line Value: WS
  misc_feature: MA Experiment 20000173 PARAMETER Experiment Name: At_42deg_Heat_P Parameter: Temperature (deg C) Value: 42 vs. 22
  misc_feature: MA Experiment 20000173 PARAMETER Experiment Name: At_42deg_Heat_P Parameter: Timepoint (hr) Value: 6
  misc_feature: MA Experiment 20000173 PARAMETER Experiment Name: At_42deg_Heat_P Parameter: Tissue Value: Aerial
  misc_feature: MA Experiment ID: 20000184 Result: Down-regulated in Transcription
  misc_feature: MA Experiment 20000184 PARAMETER Experiment Name: At_Shoots__P Parameter: Age (day) Value: 7
  misc_feature: MA Experiment 20000184 PARAMETER Experiment Name: At_Shoots__P Parameter: Tissue Value: Shoots vs. Whole Plant
  misc_feature: MA Experiment ID: 20000185 Result: Down-regulated in Transcription
  misc_feature: MA Experiment 20000185 PARAMETER Experiment Name: At_Roots__P Parameter: Age (day) Value: 7 vs. 21
  misc_feature: MA Experiment 20000185 PARAMETER Experiment Name: At_Roots__P Parameter: Organism Value: A. thaliana
  misc_feature: MA Experiment 20000185 PARAMETER Experiment Name: At_Roots__P Parameter: Tissue Value: Roots vs. Whole Plant
  misc_feature: MA Experiment ID: 20000224 Result: Up-regulated in Transcription
  misc_feature: MA Experiment ID: 20000234 Result: Down-regulated in Transcription
  misc_feature: MA Experiment 20000234 PARAMETER Experiment Name: At_Siliques_P Parameter: Age (day) Value: 21
  misc_feature: MA Experiment 20000234 PARAMETER Experiment Name: At_Siliques_P Parameter: Organism Value: A. thaliana
  misc_feature: MA Experiment 20000234 PARAMETER Experiment Name: At_Siliques_P Parameter: Plant Line Value: WS
  misc_feature: MA Experiment 20000234 PARAMETER Experiment Name: At_Siliques_P Parameter: Tissue Value: Less Than 5mm Siliques vs. Whole Plant
  misc_feature: MA Experiment ID: 20000235 Result: Down-regulated in Transcription
  misc_feature: MA Experiment 20000235 PARAMETER Experiment Name: At_Siliques_P Parameter: Age (day) Value: 21
  misc_feature: MA Experiment 20000235 PARAMETER Experiment Name: At_Siliques_P Parameter: Organism Value: A. thaliana
  misc_feature: MA Experiment 20000235 PARAMETER Experiment Name: At_Siliques_P Parameter: Plant Line Value: WS
  misc_feature: MA Experiment 20000235 PARAMETER Experiment Name: At_Siliques_P Parameter: Tissue Value: 5-10mm Siliques vs. Whole Plant
  misc_feature: MA Experiment ID: 20000264 Result: Down-regulated in Transcription
  misc_feature: MA Experiment 20000264 PARAMETER Experiment Name: At_Open_Flower_P Parameter: Age (day) Value: 21
  misc_feature: MA Experiment 20000264 PARAMETER Experiment Name: At_Open_Flower_P Parameter: Plant Line Value: WS
  misc_feature: MA Experiment 20000264 PARAMETER Experiment Name: At_Open_Flower_P Parameter: Tissue Value: Open Flower vs. Whole Plant
  misc_feature: MA Experiment ID: 20000265 Result: Down-regulated in Transcription
  misc_feature: MA Experiment 20000265 PARAMETER Experiment Name: At_Open_Flower_P Parameter: Age (day) Value: 21
  misc_feature: MA Experiment 20000265 PARAMETER Experiment Name: At_Open_Flower_P Parameter: Plant Line Value: WS
  misc_feature: MA Experiment 20000265 PARAMETER Experiment Name: At_Open_Flower_P Parameter: Tissue Value: Closed Flower vs. Whole Plant
  misc_feature: MA Experiment ID: 20000286 Result: Down-regulated in Transcription
  misc_feature: MA Experiment 20000286 PARAMETER Experiment Name: At_Open_Flower_P Parameter: Age (day) Value: 21
  misc_feature: MA Experiment 20000286 PARAMETER Experiment Name: At_Open_Flower_P Parameter: Plant Line Value: WS
  misc_feature: MA Experiment 20000286 PARAMETER Experiment Name: At_Open_Flower_P Parameter: Tissue Value: Half Open vs. Whole Plant
  misc_feature: MA Experiment ID: 20000439 Result: Down-regulated in Transcription
  misc_feature: MA Experiment 20000439 PARAMETER Experiment Name: At_Roots__P Parameter: Age (day) Value: 14 vs. 21
  misc_feature: MA Experiment 20000439 PARAMETER Experiment Name: At_Roots__P Parameter: Organism Value: A. thaliana
  misc_feature: MA Experiment 20000439 PARAMETER Experiment Name: At_Roots__P Parameter: Tissue Value: Roots vs. Whole Plant
  misc_feature: MA Experiment ID: 20000441 Result: Up-regulated in Transcription
  misc_feature: MA Experiment 20000441 PARAMETER Experiment Name: At_1uM_BR-BRZ__P Parameter: Tissue Value: Shoot Apices
  misc_feature: MA Experiment 20000441 PARAMETER Experiment Name: At_1uM_BR-BRZ__P Parameter: Treatment Value: 1uM BR vs. No Treatment
  misc_feature: MA Experiment ID: 20000443 Result: Up-regulated in Transcription
  misc_feature: MA Experiment 20000443 PARAMETER Experiment Name: At_1uM_BR-BRZ__P Parameter: Tissue Value: Shoot Apices
  misc_feature: MA Experiment 20000443 PARAMETER Experiment Name: At_1uM_BR-BRZ__P Parameter: Treatment Value: 1uM BRZ vs. No Treatment
  misc_feature: MA Experiment ID: 20000452 Result: Up-regulated in Transcription
  misc_feature: MA Experiment 20000452 PARAMETER Experiment Name: At_CS6879_Shoots-Roots_P Parameter: Age (day) Value: 14
  misc_feature: MA Experiment 20000452 PARAMETER Experiment Name: At_CS6879_Shoots-Roots_P Parameter: Organism Value: A. thaliana
  misc_feature: MA Experiment 20000452 PARAMETER Experiment Name: At_CS6879_Shoots-Roots_P Parameter: Plant Line Value: CS6879 vs. WS
  misc_feature: MA Experiment 20000452 PARAMETER Experiment Name: At_CS6879_Shoots-Roots_P Parameter: Tissue Value: Shoots
  misc_feature: MA Experiment ID: 20000456 Result: Down-regulated in Transcription
  misc_feature: MA Experiment 20000456 PARAMETER Experiment Name: At_100uM_BA_P Parameter: Age (day) Value: 14
  misc_feature: MA Experiment 20000456 PARAMETER Experiment Name: At_100uM_BA_P Parameter: Organism Value: A. thaliana
  misc_feature: MA Experiment 20000456 PARAMETER Experiment Name: At_100uM_BA_P Parameter: Plant Line Value: WS
  misc_feature: MA Experiment 20000456 PARAMETER Experiment Name: At_100uM_BA_P Parameter: Timepoint (hr) Value: 6
  misc_feature: MA Experiment 20000456 PARAMETER Experiment Name: At_100uM_BA_P Parameter: Tissue Value: Aerial
  misc_feature: MA Experiment 20000456 PARAMETER Experiment Name: At_100uM_BA_P Parameter: Treatment Value: 100uM BA vs. No Treatment
  misc_feature: MA Experiment ID: 20000527 Result: Up-regulated in Transcription
  misc_feature: MA Experiment 20000527 PARAMETER Experiment Name: At_10percent_PEG_P Parameter: Age (day) Value: 20
  misc_feature: MA Experiment 20000527 PARAMETER Experiment Name: At_10percent_PEG_P Parameter: Organism Value: A. thaliana
  misc_feature: MA Experiment 20000527 PARAMETER Experiment Name: At_10percent_PEG_P Parameter: Plant Line Value: WS
  misc_feature: MA Experiment 20000527 PARAMETER Experiment Name: At_10percent_PEG_P Parameter: Timepoint (day) Value: 20
  misc_feature: MA Experiment 20000527 PARAMETER Experiment Name: At_10percent_PEG_P Parameter: Tissue Value: Whole Plant
  misc_feature: MA Experiment 20000527 PARAMETER Experiment Name: At_10percent_PEG_P Parameter: Treatment Value: 10percent PEG vs. No Treatment
  misc_feature: MA Experiment ID: 20000573 Result: Up-regulated in Transcription
  misc_feature: MA Experiment 20000573 PARAMETER Experiment Name: At_100uM_ABA_Mutants__P Parameter: Organism Value: A. thaliana
  misc_feature: MA Experiment 20000573 PARAMETER Experiment Name: At_100uM_ABA_Mutants__P Parameter: Plant Line Value: CS22 vs. Ler wt
  misc_feature: MA Experiment 20000573 PARAMETER Experiment Name: At_100uM_ABA_Mutants__P Parameter: Timepoint (hr) Value: N/A
  misc_feature: MA Experiment 20000573 PARAMETER Experiment Name: At_100uM_ABA_Mutants__P Parameter: Tissue Value: Whole Plant
  misc_feature: MA Experiment 20000573 PARAMETER Experiment Name: At_100uM_ABA_Mutants__P Parameter: Treatment Value: None
  misc_feature: MA Experiment ID: 20000574 Result: Up-regulated in Transcription
  misc_feature: MA Experiment 20000574 PARAMETER Experiment Name: At_100uM_ABA_Mutants__P Parameter: Organism Value: A. thaliana
  misc_feature: MA Experiment 20000574 PARAMETER Experiment Name: At_100uM_ABA_Mutants__P Parameter: Plant Line Value: CS23 vs. Ler wt
  misc_feature: MA Experiment 20000574 PARAMETER Experiment Name: At_100uM_ABA_Mutants__P Parameter: Timepoint (hr) Value: N/A
  misc_feature: MA Experiment 20000574 PARAMETER Experiment Name: At_100uM_ABA_Mutants__P Parameter: Tissue Value: Whole Plant
  misc_feature: MA Experiment 20000574 PARAMETER Experiment Name: At_100uM_ABA_Mutants__P Parameter: Treatment Value: None
  misc_feature: MA Experiment ID: 20000794 Result: Down-regulated in Transcription
  misc_feature: MA Experiment 20000794 PARAMETER Experiment Name: At_Petals_P Parameter: Age (day) Value: 23-25 days
  misc_feature: MA Experiment 20000794 PARAMETER Experiment Name: At_Petals_P Parameter: Plant Line Value: WS
  misc_feature: MA Experiment 20000794 PARAMETER Experiment Name: At_Petals_P Parameter: Tissue Value: Petals vs. Whole plant
  misc_feature: MA Experiment ID: 20001247 Result: Down-regulated in Transcription
  misc_feature: MA Experiment 20001247 PARAMETER Experiment Name: At_Far-red-induction_P Parameter: Age (day) Value: 7
  misc_feature: MA Experiment 20001247 PARAMETER Experiment Name: At_Far-red-induction_P Parameter: Light Value: Far-red vs. White
  misc_feature: MA Experiment 20001247 PARAMETER Experiment Name: At_Far-red-induction_P Parameter: Organism Value: A. thaliana
  misc_feature: MA Experiment 20001247 PARAMETER Experiment Name: At_Far-red-induction_P Parameter: Plant Line Value: Columbia
  misc_feature: MA Experiment 20001247 PARAMETER Experiment Name: At_Far-red-induction_P Parameter: Timepoint (hr) Value: 1
  misc_feature: MA Experiment 20001247 PARAMETER Experiment Name: At_Far-red-induction_P Parameter: Tissue Value: Whole Plant
  misc_feature: MA Experiment ID: 20001248 Result: Down-regulated in Transcription
  misc_feature: MA Experiment 20001248 PARAMETER Experiment Name: At_Far-red-induction_P Parameter: Age (day) Value: 7
  misc_feature: MA Experiment 20001248 PARAMETER Experiment Name: At_Far-red-induction_P Parameter: Light Value: Far-red vs. White
  misc_feature: MA Experiment 20001248 PARAMETER Experiment Name: At_Far-red-induction_P Parameter: Organism Value: A. thaliana
  misc_feature: MA Experiment 20001248 PARAMETER Experiment Name: At_Far-red-induction_P Parameter: Plant Line Value: Columbia
  misc_feature: MA Experiment 20001248 PARAMETER Experiment Name: At_Far-red-induction_P Parameter: Timepoint (hr) Value: 4
  misc_feature: MA Experiment 20001248 PARAMETER Experiment Name: At_Far-red-induction_P Parameter: Tissue Value: Whole Plant
  misc_feature: MA Experiment ID: 20001450 Result: Down-regulated in Transcription
  misc_feature: MA Experiment 20001450 PARAMETER Experiment Name: At_Far-red-induction_P Parameter: Age (day) Value: 7
  misc_feature: MA Experiment 20001450 PARAMETER Experiment Name: At_Far-red-induction_P Parameter: Light Value: Far-red vs. White
  misc_feature: MA Experiment 20001450 PARAMETER Experiment Name: At_Far-red-induction_P Parameter: Organism Value: A. thaliana
  misc_feature: MA Experiment 20001450 PARAMETER Experiment Name: At_Far-red-induction_P Parameter: Plant Line Value: Columbia
  misc_feature: MA Experiment 20001450 PARAMETER Experiment Name: At_Far-red-induction_P Parameter: Timepoint (hr) Value: 8
  misc_feature: MA Experiment 20001450 PARAMETER Experiment Name: At_Far-red-induction_P Parameter: Tissue Value: Whole Plant
  misc_feature: MA Experiment ID: 20001451 Result: Down-regulated in Transcription
  misc_feature: MA Experiment 20001451 PARAMETER Experiment Name: At_Far-red-induction_P Parameter: Age (day) Value: 7
  misc_feature: MA Experiment 20001451 PARAMETER Experiment Name: At_Far-red-induction_P Parameter: Light Value: Far-red vs. White
  misc_feature: MA Experiment 20001451 PARAMETER Experiment Name: At_Far-red-induction_P Parameter: Organism Value: A. thaliana
  misc_feature: MA Experiment 20001451 PARAMETER Experiment Name: At_Far-red-induction_P Parameter: Plant Line Value: Columbia
  misc_feature: MA Experiment 20001451 PARAMETER Experiment Name: At_Far-red-induction_P Parameter: Timepoint (hr) Value: 24
  misc_feature: MA Experiment 20001451 PARAMETER Experiment Name: At_Far-red-induction_P Parameter: Tissue Value: Whole Plant
  misc_feature: MA Experiment ID: 20001905 Result: Up-regulated in Transcription
  misc_feature: MA Experiment 20001905 PARAMETER Experiment Name: At_Drought_Reproduction_P Parameter: Age (day) Value: 40
  misc_feature: MA Experiment 20001905 PARAMETER Experiment Name: At_Drought_Reproduction_P Parameter: Organism Value: A. thaliana
  misc_feature: MA Experiment 20001905 PARAMETER Experiment Name: At_Drought_Reproduction_P Parameter: Plant Line Value: WS
  misc_feature: MA Experiment 20001905 PARAMETER Experiment Name: At_Drought_Reproduction_P Parameter: Timepoint (day) Value: 10
  misc_feature: MA Experiment 20001905 PARAMETER Experiment Name: At_Drought_Reproduction_P Parameter: Tissue Value: Rosettes
  misc_feature: MA Experiment 20001905 PARAMETER Experiment Name: At_Drought_Reproduction_P Parameter: Treatment Value: Drought vs. No Drought
aaatcatattgagaacaaatagatttggttatatatggcttttacgcacgtttgtttatggacgttagtcgccttcgtgctgacgtggacggtgttctaccttaccaacatgaagaagaaggcgacggatttggctgatacggtggctgaggatcaaaaagacggtgctgctgacgtcattatcgtcggggctggtgtaggtggttcggctctcgcatatgctcttgctaaggatgggcgtcgagtacatgtgatcgagagggacatgagagaaccagaaagaatgatgggtgagtttatgcaacctggcggacgactcatgctttctaaacttggccttcaagattgcttggaagacatagatgcacagaaagccacgggtttggcagtttataaagatggaaaagaagcagacgcaccttttccagtggataacaacaatttttcttatgaaccttctgctcgatcttttcacaatggccgattcgtccaacaactgcgtcgaaaggctttttctctttccaatgtgcgcctggaagaaggaacggtgaagtctttactagaagaaaaaggagtggtcaaaggagtgacatacaagaataaagaaggcgaagaaacaacagccttggcacctctcactgtggtatgcgacggttgctactcaaaccttcgtcggtctcttaatgatgacaacaatgctgagattatgtcgtacatagttggttacatctcaaagaattgtcggcttgaagaacccgaaaagctacacttgatattgtctaaaccatctttcaccatggtataccaaataagcagcactgacgttcgttgtggttttgaggttctccccgaaaattttccttctattgcaaatggtgaaatgtctactttcatgaagaatactatagttcctcaggtacctccaaaactccgcaaaatatttttgaaaggtatagatgagggagcacacataaaagtggtgccggcaaagcgcatgacatctactttaagcaagaagaaaggtgtgattgtattgggagatgcattcaatatgcgtcatccagttgttgcatctggaatgatggttttactgtcggacattctcattctacgccgtcttcttcagccattaagcaacctcggcgatgcaaacaaagtctcagaagttatcaattccttttatgatatccgcaagccaatgtcggcgacggttaacacattgggaaatgcattttctcaagtactaattggatcaacggatgaagcaaaagaggcaatgagacagggtgtctatgattacctttgtagtggcgggtttcgtacgtcagggatgatggctctgctcggcggcatgaatcctcgtcctctctctctcgtctatcatctttgtgccatcactctatcctccattggccaactgctctctccatttccctctccccttcgcatttggcatagcctcaagctttttggtttggccatgaaaatgttggttcccaatctcaaagctgaaggagttagccaaatgttgtttccagcaaatgcagccgcgtatcacaaaagctatatggctgcaaccactctctaaactttgatgctctcaatcgcaatatatatggagcacgaatctatgtgattgtgcatttggtaaacgtgtattgcagtgcttataattattagtatgtaacggggaaaagttctaaacacaaaaaaataaacttttgaatgttatatgtgtgaattatttttgttgttacaagtaatgctcttttttttt

SEQ ID NO: 45009 - protein, 517 aa, Arabidopsis thaliana
  peptide (1)..(517): Ceres Seq. ID no. 12559911
  misc_feature (198)..(398): Pfam Name: Monooxygenase Pfam Description: Monooxygenase
  misc_feature (43)..(510): Homolog of NCBI NO: 27475612 NR Description: squalene monooxygenase 1 [Medicago truncatula]
  misc_feature (43)..(510): Homolog of NCBI NO: 27311240 NR Description: Putative Squalene monooxygenase
  misc_feature (43)..(510): Homolog of NCBI NO: 27311241 NR Description: Putative Squalene monooxygenase
  misc_feature (30)..(510): Homolog of NCBI NO: 27475610 NR Description: squalene monooxygenase 2 [Medicago truncatula]
  misc_feature (4)..(517): Homolog of NCBI NO: 15237900 NR Description: squalene monooxygenase 2 (squalene epoxidase 2)
  misc_feature (1)..(517): Homolog of NCBI NO: 6685411 NR Description: Squalene monooxygenase 1,1 (Squalene epoxidase
  misc_feature (1)..(517): Homolog of NCBI NO: 6685410 NR Description: Squalene monooxygenase 1,2 (Squalene epoxidase
  misc_feature (3)..(517): Homolog of NCBI NO: 11358675 NR Description: probable squalene monooxygenase (EC 1.14.99.7)
  misc_feature (1)..(517): Homolog of NCBI NO: 15237902 NR Description: squalene monooxygenase 1,1 (squalene epoxidase
  misc_feature (1)..(517): Homolog of NCBI NO: 15237903 NR Description: squalene monooxygenase 1,2 (squalene epoxidase
MAFTHVCLWTLVAFVLTWTVFYLTNMKKKATDLADTVAEDQKDGAADVIIVGAGVGGSALAYALAKDGRRVHVIERDMREPERMMGEFMQPGGRLMLSKLGLQDCLEDIDAQKATGLAVYKDGKEADAPFPVDNNNFSYEPSARSFHNGRFVQQLRRKAFSLSNVRLEEGTVKSLLEEKGVVKGVTYKNKEGEETTALAPLTVVCDGCYSNLRRSLNDDNNAEIMSYIVGYISKNCRLEEPEKLHLILSKPSFTMVYQISSTDVRCGFEVLPENFPSIANGEMSTFMKNTIVPQVPPKLRKIFLKGIDEGAHIKVVPAKRMTSTLSKKKGVIVLGDAFNMRHPVVASGMMVLLSDILILRRLLQPLSNLGDANKVSEVINSFYDIRKPMSATVNTLGNAFSQVLIGSTDEAKEAMRQGVYDYLCSGGFRTSGMMALLGGMNPRPLSLVYHLCAITLSSIGQLLSPFPSPLRIWHSLKLFGLAMKMLVPNLKAEGVSQMLFPANAAAYHKSYMAATTL

SEQ ID NO: 45010 - protein, 492 aa, Arabidopsis thaliana
  peptide (1)..(492): Ceres Seq. ID no. 12559912
  misc_feature (173)..(373): Pfam Name: Monooxygenase Pfam Description: Monooxygenase
  misc_feature (18)..(485): Homolog of NCBI NO: 27475612 NR Description: squalene monooxygenase 1 [Medicago truncatula]
  misc_feature (18)..(485): Homolog of NCBI NO: 27311240 NR Description: Putative Squalene monooxygenase
  misc_feature (18)..(485): Homolog of NCBI NO: 27311241 NR Description: Putative Squalene monooxygenase
  misc_feature (5)..(485): Homolog of NCBI NO: 27475610 NR Description: squalene monooxygenase 2 [Medicago truncatula]
  misc_feature (1)..(492): Homolog of NCBI NO: 15237900 NR Description: squalene monooxygenase 2 (squalene epoxidase 2)
  misc_feature (1)..(492): Homolog of NCBI NO: 6685411 NR Description: Squalene monooxygenase 1,1 (Squalene epoxidase
  misc_feature (1)..(492): Homolog of NCBI NO: 6685410 NR Description: Squalene monooxygenase 1,2 (Squalene epoxidase
  misc_feature (1)..(492): Homolog of NCBI NO: 11358675 NR Description: probable squalene monooxygenase (EC 1.14.99.7)
  misc_feature (1)..(492): Homolog of NCBI NO: 15237902 NR Description: squalene monooxygenase 1,1 (squalene epoxidase
  misc_feature (1)..(492): Homolog of NCBI NO: 15237903 NR Description: squalene monooxygenase 1,2 (squalene epoxidase
MKKKATDLADTVAEDQKDGAADVIIVGAGVGGSALAYALAKDGRRVHVIERDMREPERMMGEFMQPGGRLMLSKLGLQDCLEDIDAQKATGLAVYKDGKEADAPFPVDNNNFSYEPSARSFHNGRFVQQLRRKAFSLSNVRLEEGTVKSLLEEKGVVKGVTYKNKEGEETTALAPLTVVCDGCYSNLRRSLNDDNNAEIMSYIVGYISKNCRLEEPEKLHLILSKPSFTMVYQISSTDVRCGFEVLPENFPSIANGEMSTFMKNTIVPQVPPKLRKIFLKGIDEGAHIKVVPAKRMTSTLSKKKGVIVLGDAFNMRHPVVASGMMVLLSDILILRRLLQPLSNLGDANKVSEVINSFYDIRKPMSATVNTLGNAFSQVLIGSTDEAKEAMRQGVYDYLCSGGFRTSGMMALLGGMNPRPLSLVYHLCAITLSSIGQLLSPFPSPLRIWHSLKLFGLAMKMLVPNLKAEGVSQMLFPANAAAYHKSYMAATTL

SEQ ID NO: 45011 - protein, 440 aa, Arabidopsis thaliana
  peptide (1)..(440): Ceres Seq. ID no. 12559913
  misc_feature (121)..(321): Pfam Name: Monooxygenase Pfam Description: Monooxygenase
  misc_feature (1)..(433): Homolog of NCBI NO: 27475612 NR Description: squalene monooxygenase 1 [Medicago truncatula]
  misc_feature (1)..(433): Homolog of NCBI NO: 27311240 NR Description: Putative Squalene monooxygenase
  misc_feature (1)..(433): Homolog of NCBI NO: 27311241 NR Description: Putative Squalene monooxygenase
  misc_feature (1)..(433): Homolog of NCBI NO: 27475610 NR Description: squalene monooxygenase 2 [Medicago truncatula]
  misc_feature (1)..(440): Homolog of NCBI NO: 15237900 NR Description: squalene monooxygenase 2 (squalene epoxidase 2)
  misc_feature (1)..(440): Homolog of NCBI NO: 6685411 NR Description: Squalene monooxygenase 1,1 (Squalene epoxidase
  misc_feature (1)..(440): Homolog of NCBI NO: 6685410 NR Description: Squalene monooxygenase 1,2 (Squalene epoxidase
  misc_feature (1)..(440): Homolog of NCBI NO: 11358675 NR Description: probable squalene monooxygenase (EC 1.14.99.7)
  misc_feature (1)..(440): Homolog of NCBI NO: 15237902 NR Description: squalene monooxygenase 1,1 (squalene epoxidase
  misc_feature (1)..(440): Homolog of NCBI NO: 15237903 NR Description: squalene monooxygenase 1,2 (squalene epoxidase
MREPERMMGEFMQPGGRLMLSKLGLQDCLEDIDAQKATGLAVYKDGKEADAPFPVDNNNFSYEPSARSFHNGRFVQQLRRKAFSLSNVRLEEGTVKSLLEEKGVVKGVTYKNKEGEETTALAPLTVVCDGCYSNLRRSLNDDNNAEIMSYIVGYISKNCRLEEPEKLHLILSKPSFTMVYQISSTDVRCGFEVLPENFPSIANGEMSTFMKNTIVPQVPPKLRKIFLKGIDEGAHIKVVPAKRMTSTLSKKKGVIVLGDAFNMRHPVVASGMMVLLSDILILRRLLQPLSNLGDANKVSEVINSFYDIRKPMSATVNTLGNAFSQVLIGSTDEAKEAMRQGVYDYLCSGGFRTSGMMALLGGMNPRPLSLVYHLCAITLSSIGQLLSPFPSPLRIWHSLKLFGLAMKMLVPNLKAEGVSQMLFPANAAAYHKSYMAATTL

SEQ ID NO: 45012 - DNA, 1702 bp, Arabidopsis thaliana
  misc_feature (1)..(1702): Ceres Seq. ID no. 12600391
  misc_feature: MA Experiment ID: 20000179 Result: Up-regulated in Transcription
  misc_feature: MA Experiment 20000179 PARAMETER Experiment Name: At_Germinating_Seeds_P Parameter: Age (hr) Value: 6 vs. 0
  misc_feature: MA Experiment 20000179 PARAMETER Experiment Name: At_Germinating_Seeds_P Parameter: Tissue Value: Germinating Seeds
  misc_feature: MA Experiment ID: 20000180 Result: Up-regulated in Transcription
  misc_feature: MA Experiment 20000180 PARAMETER Experiment Name: At_Germinating_Seeds_P Parameter: Age (hr) Value: 24 vs. 0
  misc_feature: MA Experiment 20000180 PARAMETER Experiment Name: At_Germinating_Seeds_P Parameter: Tissue Value: Germinating Seeds
  misc_feature: MA Experiment ID: 20000265 Result: Up-regulated in Transcription
  misc_feature: MA Experiment 20000265 PARAMETER Experiment Name: At_Open_Flower_P Parameter: Age (day) Value: 21
  misc_feature: MA Experiment 20000265 PARAMETER Experiment Name: At_Open_Flower_P Parameter: Plant Line Value: WS
  misc_feature: MA Experiment 20000265 PARAMETER Experiment Name: At_Open_Flower_P Parameter: Tissue Value: Closed Flower vs. Whole Plant
  misc_feature: MA Experiment ID: 20000437 Result: Down-regulated in Transcription
  misc_feature: MA Experiment 20000437 PARAMETER Experiment Name: At_Drought_P Parameter: Age (day) Value: 8
  misc_feature: MA Experiment 20000437 PARAMETER Experiment Name: At_Drought_P Parameter: Organism Value: A. thaliana
  misc_feature: MA Experiment 20000437 PARAMETER Experiment Name: At_Drought_P Parameter: Plant Line Value: WS
  misc_feature: MA Experiment 20000437 PARAMETER Experiment Name: At_Drought_P Parameter: Timepoint (hr) Value: 24
  misc_feature: MA Experiment 20000437 PARAMETER Experiment Name: At_Drought_P Parameter: Tissue Value: Whole Plant
  misc_feature: MA Experiment 20000437 PARAMETER Experiment Name: At_Drought_P Parameter: Treatment Value: Drought vs. No Drought
  misc_feature: MA Experiment ID: 20000495 Result: Up-regulated in Transcription
  misc_feature: MA Experiment 20000495 PARAMETER Experiment Name: At_Guard_Cells_P Parameter: Harvest Date Value: 8/2/2002
  misc_feature: MA Experiment 20000495 PARAMETER Experiment Name: At_Guard_Cells_P Parameter: Organism Value: A. thaliana
  misc_feature: MA Experiment 20000495 PARAMETER Experiment Name: At_Guard_Cells_P Parameter: Tissue Value: Guard Cells vs. Leaves
  misc_feature: MA Experiment ID: 20000496 Result: Up-regulated in Transcription
  misc_feature: MA Experiment 20000496 PARAMETER Experiment Name: At_Guard_Cells_P Parameter: Harvest Date Value: 7/19/2002
  misc_feature: MA Experiment 20000496 PARAMETER Experiment Name: At_Guard_Cells_P Parameter: Organism Value: Canola
  misc_feature: MA Experiment 20000496 PARAMETER Experiment Name: At_Guard_Cells_P Parameter: Tissue Value: Guard Cells vs. Leaves
  misc_feature: MA Experiment ID: 20000794 Result: Down-regulated in Transcription
  misc_feature: MA Experiment 20000794 PARAMETER Experiment Name: At_Petals_P Parameter: Age (day) Value: 23-25 days
  misc_feature: MA Experiment 20000794 PARAMETER Experiment Name: At_Petals_P Parameter: Plant Line Value: WS
  misc_feature: MA Experiment 20000794 PARAMETER Experiment Name: At_Petals_P Parameter: Tissue Value: Petals vs. Whole plant
  misc_feature: MA Experiment ID: 20001248 Result: Down-regulated in Transcription
  misc_feature: MA Experiment 20001248 PARAMETER Experiment Name: At_Far-red-induction_P Parameter: Age (day) Value: 7
  misc_feature: MA Experiment 20001248 PARAMETER Experiment Name: At_Far-red-induction_P Parameter: Light Value: Far-red vs. White
  misc_feature: MA Experiment 20001248 PARAMETER Experiment Name: At_Far-red-induction_P Parameter: Organism Value: A. thaliana
  misc_feature: MA Experiment 20001248 PARAMETER Experiment Name: At_Far-red-induction_P Parameter: Plant Line Value: Columbia
  misc_feature: MA Experiment 20001248 PARAMETER Experiment Name: At_Far-red-induction_P Parameter: Timepoint (hr) Value: 4
  misc_feature: MA Experiment 20001248 PARAMETER Experiment Name: At_Far-red-induction_P Parameter: Tissue Value: Whole Plant
  misc_feature: MA Experiment ID: 20001556 Result: Down-regulated in Transcription
  misc_feature: MA Experiment 20001556 PARAMETER Experiment Name: At_Drought_Soil_Dry_P Parameter: Age (day) Value: 26
  misc_feature: MA Experiment 20001556 PARAMETER Experiment Name: At_Drought_Soil_Dry_P Parameter: Organism Value: A. thaliana
  misc_feature: MA Experiment 20001556 PARAMETER Experiment Name: At_Drought_Soil_Dry_P Parameter: Plant Line Value: WS
  misc_feature: MA Experiment 20001556 PARAMETER Experiment Name: At_Drought_Soil_Dry_P Parameter: Post Timepoint (hr) Value: None
  misc_feature: MA Experiment 20001556 PARAMETER Experiment Name: At_Drought_Soil_Dry_P Parameter: Post-Treatment Value: None
  misc_feature: MA Experiment 20001556 PARAMETER Experiment Name: At_Drought_Soil_Dry_P Parameter: Timepoint (day) Value: 12
  misc_feature: MA Experiment 20001556 PARAMETER Experiment Name: At_Drought_Soil_Dry_P Parameter: Treatment Value: Drought vs. No Drought
  misc_feature: MA Experiment ID: 20001558 Result: Up-regulated in Transcription
  misc_feature: MA Experiment 20001558 PARAMETER Experiment Name: At_Drought_Soil_Dry_P Parameter: Age (day) Value: 27
  misc_feature: MA Experiment 20001558 PARAMETER Experiment Name: At_Drought_Soil_Dry_P Parameter: Organism Value: A. thaliana
  misc_feature: MA Experiment 20001558 PARAMETER Experiment Name: At_Drought_Soil_Dry_P Parameter: Plant Line Value: WS
  misc_feature: MA Experiment 20001558 PARAMETER Experiment Name: At_Drought_Soil_Dry_P Parameter: Post Timepoint (hr) Value: 6
  misc_feature: MA Experiment 20001558 PARAMETER Experiment Name: At_Drought_Soil_Dry_P Parameter: Post-Treatment Value: Re-Water vs. No Drought
  misc_feature: MA Experiment 20001558 PARAMETER Experiment Name: At_Drought_Soil_Dry_P Parameter: Timepoint (day) Value: 13
  misc_feature: MA Experiment 20001558 PARAMETER Experiment Name: At_Drought_Soil_Dry_P Parameter: Treatment Value: Drought vs. No Drought
  misc_feature: MA Experiment ID: 20001911 Result: Down-regulated in Transcription
  misc_feature: MA Experiment 20001911 PARAMETER Experiment Name: At_Drought_Reproduction_P Parameter: Age (day) Value: 40
  misc_feature: MA Experiment 20001911 PARAMETER Experiment Name: At_Drought_Reproduction_P Parameter: Organism Value: A. thaliana
  misc_feature: MA Experiment 20001911 PARAMETER Experiment Name: At_Drought_Reproduction_P Parameter: Plant Line Value: WS
  misc_feature: MA Experiment 20001911 PARAMETER Experiment Name: At_Drought_Reproduction_P Parameter: Timepoint (day) Value: 10
  misc_feature: MA Experiment 20001911 PARAMETER Experiment Name: At_Drought_Reproduction_P Parameter: Tissue Value: Flowers
  misc_feature: MA Experiment 20001911 PARAMETER Experiment Name: At_Drought_Reproduction_P Parameter: Treatment Value: Drought vs. No Drought
gacaacaagaaaaacaaataatatattagtaaaagacaaacgtaaaaaccatctctcggcctcctctcataaatcaatctctcttcttatcactctccgaaacccacttccagctttttcctctctctttctctctctagtctctcttttgtagctctcccctgctaagctaaccactgcacgtttccatagagaggaaagatgagtctctctccgagagattttctctctatcatcttatcttcttccgtgtaatgctctgagccaaaacccaataactaaatcaacaacaatatagaagagaagagaaagatcttatctttcttctcattcttgagtttagtcccccacaatggcgattcggaaggaggaagaaagtagagaagaacagagcaattcgtttcttcttgatgctctctactgcgaagaagagaaatgggacgatgaaggagaagaagttgaagaaaactcttccttgtcttcttcttcttctccattcgttgttttgcaacaagatttgttctgggaagatgaagatctggttacactcttctccaaagaagaagaacaaggactcagctgtctcgatgatgtttatctttccacggatcgaaaagaagctgttggttggattctgagagtcaacgctcattatggcttctctactttagcagctgttttagccataacttatctcgataagttcatctgtagctacagcttacagagagacaaaccatggatgcttcagctcgtttctgtcgcgtgtctctcattagctgctaaagtcgaagaaacccaagtccctcttcttctagactttcaagtggaggagacaaagtatgtgtttgaagcaaaaaccatacagagaatggagctactgattctgtctactctcgagtggaagatgcatctcattactccaatttcgttcgtagaccacattatcaggagattgggacttaagaacaatgctcactgggatttcctcaacaaatgccaccgtctcctcctctctgtaatctccgattcaagatttgtcgggtacctcccatcagtagttgccgcagctaccatgatgcgaattatagagcaagttgatccctttgaccctctttcataccaaactaatctcctcggtgtccttaacttaaccaaggaaaaggtgaaaacttgctacgatctaatcctccaactaccagtggaccgcatcggtttacagatccaaatccaatcttccaagaaacgcaagagtcacgattcatcatcatcgttgaacagtccaagctgcgtgattgatgcaaaccctttcaatagcgacgaaagctcaaacgattcgtggtcagcgagttcgtgcaacccaccaacgtcgtcgtcgtccccgcagcaacaacctccattgaagaagatgagaggagctgaagagaatgagaagaagaagccgattttgcatctgccatgggcaatcgtagccactccataatcgaaagctcgatttcgtttatatgatatttactgtttttttaaactttgagaacaatctttgttgtattaagctttacccgtttgcatatacgaaatgtcgcgaatgcccttacgtgccatggcttgatagagttaatgggtaaagggtattcatgacatttgactgcatgggatgtgacgaaggagagaattagaaataataataataatattgcgt

SEQ ID NO: 45013 - protein, 376 aa, Arabidopsis thaliana
  peptide (1)..(376): Ceres Seq. ID no. 12600392
  misc_feature (61)..(187): Pfam Name: Cyclin, N-terminal domain Pfam Description: Cyclin, N-terminal domain
  misc_feature (61)..(187): Pfam Name: Cyclin, N-terminal domain Pfam Description: Cyclin, N-terminal domain
  misc_feature (31)..(375): Homolog of NCBI NO: 7488731 NR Description: cyclin 4, D-type - alfalfa
  misc_feature (31)..(375): Homolog of NCBI NO: 4583990 NR Description: cyclin D3 [Medicago sativa]
  misc_feature (25)..(375): Homolog of NCBI NO: 3608179 NR Description: cyclin D [Pisum sativum]
  misc_feature (16)..(344): Homolog of NCBI NO: 33517432 NR Description: cyclin D3-2 [Euphorbia esula]
  misc_feature (1)..(369): Homolog of NCBI NO: 29374148 NR Description: cyclin D [Populus alba]
  misc_feature (31)..(375): Homolog of NCBI NO: 7488731 NR Description: cyclin 4, D-type - alfalfa
  misc_feature (25)..(375): Homolog of NCBI NO: 3608179 NR Description: cyclin D [Pisum sativum]
  misc_feature (1)..(369): Homolog of NCBI NO: 29374148 NR Description: cyclin D [Populus alba]
  misc_feature (1)..(376): Homolog of NCBI NO: 15235254 NR Description: Cyclin D3;1; protein id: At4g34160.1 [Arabidopsis
  misc_feature (1)..(376): Homolog of NCBI NO: 3915637 NR Description: Cyclin delta-3
  misc_feature (1)..(358): Homolog of NCBI NO: 4586801 NR Description: NtcycD3-1 [Nicotiana tabacum]
  misc_feature (1)..(347): Homolog of NCBI NO: 4160300 NR Description: cyclin D3.1 protein [Nicotiana tabacum]
  misc_feature (25)..(347): Homolog of NCBI NO: 6434199 NR Description: CycD3;2 [Lycopersicon esculentum]
  misc_feature (16)..(344): Homolog of NCBI NO: 33517432 NR Description: cyclin D3-2 [Euphorbia esula]
  misc_feature (31)..(375): Homolog of NCBI NO: 4583990 NR Description: cyclin D3 [Medicago sativa]
  misc_feature (25)..(347): Homolog of NCBI NO: 6434199 NR Description: CycD3;2 [Lycopersicon esculentum]
  misc_feature (1)..(347): Homolog of NCBI NO: 4160300 NR Description: cyclin D3.1 protein [Nicotiana tabacum]
  misc_feature (1)..(358): Homolog of NCBI NO: 4586801 NR Description: NtcycD3-1 [Nicotiana tabacum]
  misc_feature (1)..(376): Homolog of NCBI NO: 3915637 NR Description: Cyclin delta-3
  misc_feature (1)..(376): Homolog of NCBI NO: 15235254 NR Description: Cyclin D3;1; protein id: At4g34160.1 [Arabidopsis
MAIRKEEESREEQSNSFLLDALYCEEEKWDDEGEEVEENSSLSSSSSPFVVLQQDLFWEDEDLVTLFSKEEEQGLSCLDDVYLSTDRKEAVGWILRVNAHYGFSTLAAVLAITYLDKFICSYSLQRDKPWMLQLVSVACLSLAAKVEETQVPLLLDFQVEETKYVFEAKTIQRMELLILSTLEWKMHLITPISFVDHIIRRLGLKNNAHWDFLNKCHRLLLSVISDSRFVGYLPSVVAAATMMRIIEQVDPFDPLSYQTNLLGVLNLTKEKVKTCYDLILQLPVDRIGLQIQIQSSKKRKSHDSSSSLNSPSCVIDANPFNSDESSNDSWSASSCNPPTSSSSPQQQPPLKKMRGAEENEKKKPILHLPWAIVATP

SEQ ID NO: 45014 - protein, 246 aa, Arabidopsis thaliana
  peptide (1)..(246): Ceres Seq. ID no. 12600393
  misc_feature (1)..(57): Pfam Name: Cyclin, N-terminal domain Pfam Description: Cyclin, N-terminal domain
  misc_feature (1)..(57): Pfam Name: Cyclin, N-terminal domain Pfam Description: Cyclin, N-terminal domain
  misc_feature (1)..(245): Homolog of NCBI NO: 7488731 NR Description: cyclin 4, D-type - alfalfa
  misc_feature (1)..(245): Homolog of NCBI NO: 4583990 NR Description: cyclin D3 [Medicago sativa]
  misc_feature (1)..(245): Homolog of NCBI NO: 3608179 NR Description: cyclin D [Pisum sativum]
  misc_feature (1)..(214): Homolog of NCBI NO: 33517432 NR Description: cyclin D3-2 [Euphorbia esula]
  misc_feature (1)..(239): Homolog of NCBI NO: 29374148 NR Description: cyclin D [Populus alba]
  misc_feature (1)..(245): Homolog of NCBI NO: 7488731 NR Description: cyclin 4, D-type - alfalfa
  misc_feature (1)..(245): Homolog of NCBI NO: 3608179 NR Description: cyclin D [Pisum sativum]
  misc_feature (1)..(239): Homolog of NCBI NO: 29374148 NR Description: cyclin D [Populus alba]
  misc_feature (1)..(246): Homolog of NCBI NO: 15235254 NR Description: Cyclin D3;1; protein id: At4g34160.1 [Arabidopsis
  misc_feature (1)..(246): Homolog of NCBI NO: 3915637 NR Description: Cyclin delta-3
  misc_feature (1)..(228): Homolog of NCBI NO: 4586801 NR Description: NtcycD3-1 [Nicotiana tabacum]
  misc_feature (1)..(217): Homolog of NCBI NO: 4160300 NR Description: cyclin D3.1 protein [Nicotiana tabacum]
  misc_feature (1)..(217): Homolog of NCBI NO: 6434199 NR Description: CycD3;2 [Lycopersicon esculentum]
  misc_feature (1)..(214): Homolog of NCBI NO: 33517432 NR Description: cyclin D3-2 [Euphorbia esula]
  misc_feature (1)..(245): Homolog of NCBI NO: 4583990 NR Description: cyclin D3 [Medicago sativa]
  misc_feature (1)..(217): Homolog of NCBI NO: 6434199 NR Description: CycD3;2 [Lycopersicon esculentum]
  misc_feature (1)..(217): Homolog of NCBI NO: 4160300 NR Description: cyclin D3.1 protein [Nicotiana tabacum]
  misc_feature (1)..(228): Homolog of NCBI NO: 4586801 NR Description: NtcycD3-1 [Nicotiana tabacum]
  misc_feature (1)..(246): Homolog of NCBI NO: 3915637 NR Description: Cyclin delta-3
  misc_feature (1)..(246): Homolog of NCBI NO: 15235254 NR Description: Cyclin D3;1; protein id: At4g34160.1 [Arabidopsis
MLQLVSVACLSLAAKVEETQVPLLLDFQVEETKYVFEAKTIQRMELLILSTLEWKMHLITPISFVDHIIRRLGLKNNAHWDFLNKCHRLLLSVISDSRFVGYLPSVVAAATMMRIIEQVDPFDPLSYQTNLLGVLNLTKEKVKTCYDLILQLPVDRIGLQIQIQSSKKRKSHDSSSSLNSPSCVIDANPFNSDESSNDSWSASSCNPPTSSSSPQQQPPLKKMRGAEENEKKKPILHLPWAIVATP

SEQ ID NO: 45015 - protein, 203 aa, Arabidopsis thaliana
  peptide (1)..(203): Ceres Seq. ID no. 12600394
  misc_feature (16)..(139): Pfam Name: Cyclin, C-terminal domain Pfam Description: Cyclin, C-terminal domain
  misc_feature (16)..(139): Pfam Name: Cyclin, C-terminal domain Pfam Description: Cyclin, C-terminal domain
  misc_feature (1)..(202): Homolog of NCBI NO: 7488731 NR Description: cyclin 4, D-type - alfalfa
  misc_feature (1)..(202): Homolog of NCBI NO: 4583990 NR Description: cyclin D3 [Medicago sativa]
  misc_feature (1)..(202): Homolog of NCBI NO: 3608179 NR Description: cyclin D [Pisum sativum]
  misc_feature (1)..(171): Homolog of NCBI NO: 33517432 NR Description: cyclin D3-2 [Euphorbia esula]
  misc_feature (1)..(196): Homolog of NCBI NO: 29374148 NR Description: cyclin D [Populus alba]
  misc_feature (1)..(202): Homolog of NCBI NO: 7488731 NR Description: cyclin 4, D-type - alfalfa
  misc_feature (1)..(202): Homolog of NCBI NO: 3608179 NR Description: cyclin D [Pisum sativum]
  misc_feature (1)..(196): Homolog of NCBI NO: 29374148 NR Description: cyclin D [Populus alba]
  misc_feature (1)..(203): Homolog of NCBI NO: 15235254 NR Description: Cyclin D3;1; protein id: At4g34160.1 [Arabidopsis
  misc_feature (1)..(203): Homolog of NCBI NO: 3915637 NR Description: Cyclin delta-3
  misc_feature (1)..(185): Homolog of NCBI NO: 4586801 NR Description: NtcycD3-1 [Nicotiana tabacum]
  misc_feature (1)..(174): Homolog of NCBI NO: 4160300 NR Description: cyclin D3.1 protein [Nicotiana tabacum]
  misc_feature (1)..(174): Homolog of NCBI NO: 6434199 NR Description: CycD3;2 [Lycopersicon esculentum]
  misc_feature (1)..(171): Homolog of NCBI NO: 33517432 NR Description: cyclin D3-2 [Euphorbia esula]
  misc_feature (1)..(202): Homolog of NCBI NO: 4583990 NR Description: cyclin D3 [Medicago sativa]
  misc_feature (1)..(174): Homolog of NCBI NO: 6434199 NR Description: CycD3;2 [Lycopersicon esculentum]
  misc_feature (1)..(174): Homolog of NCBI NO: 4160300 NR Description: cyclin D3.1 protein [Nicotiana tabacum]
  misc_feature (1)..(185): Homolog of NCBI NO: 4586801 NR Description: NtcycD3-1 [Nicotiana tabacum]
  misc_feature (1)..(203): Homolog of NCBI NO: 3915637 NR Description: Cyclin delta-3
  misc_feature (1)..(203): Homolog of NCBI NO: 15235254 NR Description: Cyclin D3;1; protein id: At4g34160.1 [Arabidopsis
MELLILSTLEWKMHLITPISFVDHIIRRLGLKNNAHWDFLNKCHRLLLSVISDSRFVGYLPSVVAAATMMRIIEQVDPFDPLSYQTNLLGVLNLTKEKVKTCYDLILQLPVDRIGLQIQIQSSKKRKSHDSSSSLNSPSCVIDANPFNSDESSNDSWSASSCNPPTSSSSPQQQPPLKKMRGAEENEKKKPILHLPWAIVATP

SEQ ID NO: 45016 - DNA, 2254 bp, Arabidopsis thaliana
  misc_feature (1)..(2254): Ceres Seq. ID no. 13591474
  misc_feature: MA Experiment ID: 20000171 Result: Down-regulated in Transcription
  misc_feature: MA Experiment 20000171 PARAMETER Experiment Name: At_42deg_Heat_P Parameter: Age (day) Value: 14
  misc_feature: MA Experiment 20000171 PARAMETER Experiment Name: At_42deg_Heat_P Parameter: Organism Value: A. thaliana
  misc_feature: MA Experiment 20000171 PARAMETER Experiment Name: At_42deg_Heat_P Parameter: Plant Line Value: WS
  misc_feature: MA Experiment 20000171 PARAMETER Experiment Name: At_42deg_Heat_P Parameter: Temperature (deg C) Value: 42 vs. 22
  misc_feature: MA Experiment 20000171 PARAMETER Experiment Name: At_42deg_Heat_P Parameter: Timepoint (hr) Value: 1
  misc_feature: MA Experiment 20000171 PARAMETER Experiment Name: At_42deg_Heat_P Parameter: Tissue Value: Aerial
  misc_feature: MA Experiment ID: 20000184 Result: Up-regulated in Transcription
  misc_feature: MA Experiment 20000184 PARAMETER Experiment Name: At_Shoots__P Parameter: Age (day) Value: 7
  misc_feature: MA Experiment 20000184 PARAMETER Experiment Name: At_Shoots__P Parameter: Tissue Value: Shoots vs. Whole Plant
  misc_feature: MA Experiment ID: 20000185 Result: Down-regulated in Transcription
  misc_feature: MA Experiment 20000185 PARAMETER Experiment Name: At_Roots__P Parameter: Age (day) Value: 7 vs. 21
  misc_feature: MA Experiment 20000185 PARAMETER Experiment Name: At_Roots__P Parameter: Organism Value: A. thaliana
  misc_feature: MA Experiment 20000185 PARAMETER Experiment Name: At_Roots__P Parameter: Tissue Value: Roots vs. Whole Plant
  misc_feature: MA Experiment ID: 20000437 Result: Down-regulated in Transcription
  misc_feature: MA Experiment 20000437 PARAMETER Experiment Name: At_Drought_P Parameter: Age (day) Value: 8
  misc_feature: MA Experiment 20000437 PARAMETER Experiment Name: At_Drought_P Parameter: Organism Value: A. thaliana
  misc_feature: MA Experiment 20000437 PARAMETER Experiment Name: At_Drought_P Parameter: Plant Line Value: WS
  misc_feature: MA Experiment 20000437 PARAMETER Experiment Name: At_Drought_P Parameter: Timepoint (hr) Value: 24
  misc_feature: MA Experiment 20000437 PARAMETER Experiment Name: At_Drought_P Parameter: Tissue Value: Whole Plant
  misc_feature: MA Experiment 20000437 PARAMETER Experiment Name: At_Drought_P Parameter: Treatment Value: Drought vs. No Drought
  misc_feature: MA Experiment ID: 20001905 Result: Down-regulated in Transcription
  misc_feature: MA Experiment 20001905 PARAMETER Experiment Name: At_Drought_Reproduction_P Parameter: Age (day) Value: 40
  misc_feature: MA Experiment 20001905 PARAMETER Experiment Name: At_Drought_Reproduction_P Parameter: Organism Value: A. thaliana
  misc_feature: MA Experiment 20001905 PARAMETER Experiment Name: At_Drought_Reproduction_P Parameter: Plant Line Value: WS
  misc_feature: MA Experiment 20001905 PARAMETER Experiment Name: At_Drought_Reproduction_P Parameter: Timepoint (day) Value: 10
  misc_feature: MA Experiment 20001905 PARAMETER Experiment Name: At_Drought_Reproduction_P Parameter: Tissue Value: Rosettes
  misc_feature: MA Experiment 20001905 PARAMETER Experiment Name: At_Drought_Reproduction_P Parameter: Treatment Value: Drought vs. No Drought
ggtggtagtagcagtgaaaaacaaaagcaatccaatcccaaacccatttgctcttaagattcttcacatagagaagtcacatgttccttcttcttcttccttcatcatccccaaacacacacaaactaaaaaaaaggcaaaaccctagatccaagatcagacctaatctaatcgaaactcatagctgaaaaatgaagagagatcatcaccaattccaaggtcgattgtccaaccacgggacttcttcttcttcatcatcaatctctaaagataagatgatgatggtgaaaaaagaagaagacggtggaggtaacatggacgacgagcttctcgctgttttaggttacaaagttaggtcatcggagatggcggaggttgctttgaaactcgaacaattagagacgatgatgagtaatgttcaagaagatggtttatctcatctcgcgacggatactgttcattataatccgtcggagctttattcttggcttgataatatgctctctgagcttaatcctcctcctcttccggcgagttctaacggtttagatccggttcttccttcgccggagatttgtggttttccggcttcggattatgaccttaaagtcattcccggaaacgcgatttatcagtttccggcgattgattcttcgtcttcgtcgaataatcagaacaagcgtttgaaatcatgctcgagtcctgattctatggttacatcgacttcgacgggtacgcagattggtggagtcataggaacgacggtgacgacaaccaccacgacaacgacggcggcgggtgagtcaactcgttctgttatcctggttgactcgcaagagaacggtgttcgtttagtccacgcgcttatggcttgtgcagaagcaatccagcagaacaatttgactctagcggaagctcttgtgaagcaaatcggatgcttagctgtgtctcaagccggagctatgagaaaagtggctacttacttcgccgaagctttagcgcggcggatctaccgtctctctccgccgcagaatcagatcgatcattgtctctccgatactcttcagatgcacttttacgagacttgtccttatcttaaattcgctcacttcacggcgaaccaagcgattctcgaagcttttgaaggtaagaagagagtacacgtcattgatttctcgatgaaccaaggtcttcaatggcctgcacttatgcaagctcttgcgcttcgagaaggaggtcctccaactttccggttaaccggaattggtccaccggcgccggataattctgatcatcttcatgaagttggttgtaaattagctcagcttgcggaggcgattcacgtagaattcgaataccgtggattcgttgctaacagcttagccgatctcgatgcttcgatgcttgagcttagaccgagcgatacggaagctgttgcggtgaactctgtttttgagctacataagctcttaggtcgtcccggtgggatagagaaagttctcggcgttgtgaaacagattaaaccggtgattttcacggtggttgagcaagaatcgaaccataacggaccggttttcttagaccggtttactgaatcgttacattattattcgactctgtttgattcgttggaaggagttccgaatagtcaagacaaagtcatgtctgaagtttacttagggaaacagatttgtaatctggtggcttgtgaaggtcctgacagagtcgagagacacgaaacgttgagtcaatggggaaaccggtttggttcgtccggtttagcgccggcacatcttgggtctaacgcgtttaagcaagcgagtatgcttttgtctgtgtttaatagtggccaaggttatcgtgtggaggagagtaatggatgtttgatgttgggttggcacactcgtccactcattaccacctccgcttggaaactctcgacggcggcgtactgagtttgactcgaagcatacgacggtggtggagtcgagtcgagtgaatttgagattgagatcagtggaccggtgatgacatatgttcggaccaagacctaaaccgaactgaatcgaaccgttttgccttttgtttattttatttattttcgttcacttgtttaaaattcttatatatatcgctttggtaggtcatttttaatttatgcctttttgggatcaatttttaataggctgagtttgtatttattaataaattatctttatgaattttaaactaaaactatgttttaatctcatcc

SEQ ID NO: 45017 - protein, 587 aa, Arabidopsis thaliana
  peptide (1)..(587): Ceres Seq. ID no. 13591475
  misc_feature (195)..(490): Pfam Name: GRAS family transcription factor Pfam Description: GRAS family transcription factor
  misc_feature (195)..(490): Pfam Name: GRAS family transcription factor Pfam Description: GRAS family transcription factor
  misc_feature (26)..(110): Homolog of NCBI NO: 2339980 NR Description: RGA2 protein [Arabidopsis thaliana]
  misc_feature (134)..(584): Homolog of NCBI NO: 2339980 NR Description: RGA2 protein [Arabidopsis thaliana]
  misc_feature (26)..(110): Homolog of NCBI NO: 2569938 NR Description: GAI [Arabidopsis thaliana]
  misc_feature (134)..(584): Homolog of NCBI NO: 2569938 NR Description: GAI [Arabidopsis thaliana]
  misc_feature (1)..(110): Homolog of NCBI NO: 15223951 NR Description: gibberellin response modulator (GAI/RGA2)
  misc_feature (26)..(110): Homolog of NCBI NO: 2339980 NR Description: RGA2 protein [Arabidopsis thaliana]
  misc_feature (26)..(110): Homolog of NCBI NO: 2569938 NR Description: GAI [Arabidopsis thaliana]
  misc_feature (1)..(110): Homolog of NCBI NO: 15223951 NR Description: gibberellin response modulator (GAI/RGA2)
  misc_feature (1)..(587): Homolog of NCBI NO: 15226311 NR Description: gibberellin response modulator (RGA1)
  misc_feature (1)..(587): Homolog of NCBI NO: 15529230 NR Description: At2g01570/F2I9.19 [Arabidopsis thaliana]
  misc_feature (1)..(587): Homolog of NCBI NO: 2339978 NR Description: RGA1 protein [Arabidopsis thaliana]
  misc_feature (1)..(587): Homolog of NCBI NO: 2569940 NR Description: GRS protein [Arabidopsis thaliana]
  misc_feature (134)..(584): Homolog of NCBI NO: 15223951 NR Description: gibberellin response modulator (GAI/RGA2)
  misc_feature (134)..(584): Homolog of NCBI NO: 2569938 NR Description: GAI [Arabidopsis thaliana]
  misc_feature (134)..(584): Homolog of NCBI NO: 2339980 NR Description: RGA2 protein [Arabidopsis thaliana]
  misc_feature (134)..(584): Homolog of NCBI NO: 15223951 NR Description: gibberellin response modulator (GAI/RGA2)
  misc_feature (1)..(587): Homolog of NCBI NO: 2569940 NR Description: GRS protein [Arabidopsis thaliana]
  misc_feature (1)..(587): Homolog of NCBI NO: 2339978 NR Description: RGA1 protein [Arabidopsis thaliana]
  misc_feature (1)..(587): Homolog of NCBI NO: 15529230 NR Description: At2g01570/F2I9.19 [Arabidopsis thaliana]
  misc_feature (1)..(587): Homolog of NCBI NO: 15226311 NR Description: gibberellin response modulator (RGA1)
MKRDHHQFQGRLSNHGTSSSSSSISKDKMMMVKKEEDGGGNMDDELLAVLGYKVRSSEMAEVALKLEQLETMMSNVQEDGLSHLATDTVHYNPSELYSWLDNMLSELNPPPLPASSNGLDPVLPSPEICGFPASDYDLKVIPGNAIYQFPAIDSSSSSNNQNKRLKSCSSPDSMVTSTSTGTQIGGVIGTTVTTTTTTTTAAGESTRSVILVDSQENGVRLVHALMACAEAIQQNNLTLAEALVKQIGCLAVSQAGAMRKVATYFAEALARRIYRLSPPQNQIDHCLSDTLQMHFYETCPYLKFAHFTANQAILEAFEGKKRVHVIDFSMNQGLQWPALMQALALREGGPPTFRLTGIGPPAPDNSDHLHEVGCKLAQLAEAIHVEFEYRGFVANSLADLDASMLELRPSDTEAVAVNSVFELHKLLGRPGGIEKVLGVVKQIKPVIFTVVEQESNHNGPVFLDRFTESLHYYSTLFDSLEGVPNSQDKVMSEVYLGKQICNLVACEGPDRVERHETLSQWGNRFGSSGLAPAHLGSNAFKQASMLLSVFNSGQGYRVEESNGCLMLGWHTRPLITTSAWKLSTAAY

SEQ ID NO: 45018 - protein, 559 aa, Arabidopsis thaliana
  peptide (1)..(559): Ceres Seq. ID no. 13591476
  misc_feature (167)..(462): Pfam Name: GRAS family transcription factor Pfam Description: GRAS family transcription factor
  misc_feature (167)..(462): Pfam Name: GRAS family transcription factor Pfam Description: GRAS family transcription factor
  misc_feature (1)..(82): Homolog of NCBI NO: 2339980 NR Description: RGA2 protein [Arabidopsis thaliana]
  misc_feature (106)..(556): Homolog of NCBI NO: 2339980 NR Description: RGA2 protein [Arabidopsis thaliana]
  misc_feature (1)..(82): Homolog of NCBI NO: 2569938 NR Description: GAI [Arabidopsis thaliana]
  misc_feature (106)..(556): Homolog of NCBI NO: 2569938 NR Description: GAI [Arabidopsis thaliana]
  misc_feature (1)..(82): Homolog of NCBI NO: 15223951 NR Description: gibberellin response modulator (GAI/RGA2)
  misc_feature (1)..(82): Homolog of NCBI NO: 2339980 NR Description: RGA2 protein [Arabidopsis thaliana]
  misc_feature (1)..(82): Homolog of NCBI NO: 2569938 NR Description: GAI [Arabidopsis thaliana]
  misc_feature (1)..(82): Homolog of NCBI NO: 15223951 NR Description: gibberellin response modulator (GAI/RGA2)
  misc_feature (1)..(559): Homolog of NCBI NO: 15226311 NR Description: gibberellin response modulator (RGA1)
  misc_feature (1)..(559): Homolog of NCBI NO: 15529230 NR Description: At2g01570/F2I9.19 [Arabidopsis thaliana]
  misc_feature (1)..(559): Homolog of NCBI NO: 2339978 NR Description: RGA1 protein [Arabidopsis thaliana]
  misc_feature (1)..(559): Homolog of NCBI NO: 2569940 NR Description: GRS protein [Arabidopsis thaliana]
  misc_feature (106)..(556): Homolog of NCBI NO: 15223951 NR Description: gibberellin response modulator (GAI/RGA2)
  misc_feature (106)..(556): Homolog of NCBI NO: 2569938 NR Description: GAI [Arabidopsis thaliana]
  misc_feature (106)..(556): Homolog of NCBI NO: 2339980 NR Description: RGA2 protein [Arabidopsis thaliana]
  misc_feature (106)..(556): Homolog of NCBI NO: 15223951 NR Description: gibberellin response modulator (GAI/RGA2)
  misc_feature (1)..(559): Homolog of NCBI NO: 2569940 NR Description: GRS protein [Arabidopsis thaliana]
  misc_feature (1)..(559): Homolog of NCBI NO: 2339978 NR Description: RGA1 protein [Arabidopsis thaliana]
  misc_feature (1)..(559): Homolog of NCBI NO: 15529230 NR Description: At2g01570/F2I9.19 [Arabidopsis thaliana]
  misc_feature (1)..(559): Homolog of NCBI NO: 15226311 NR Description: gibberellin response modulator (RGA1)
MMMVKKEEDGGGNMDDELLAVLGYKVRSSEMAEVALKLEQLETMMSNVQEDGLSHLATDTVHYNPSELYSWLDNMLSELNPPPLPASSNGLDPVLPSPEICGFPASDYDLKVIPGNAIYQFPAIDSSSSSNNQNKRLKSCSSPDSMVTSTSTGTQIGGVIGTTVTTTTTTTTAAGESTRSVILVDSQENGVRLVHALMACAEAIQQNNLTLAEALVKQIGCLAVSQAGAMRKVATYFAEALARRIYRLSPPQNQIDHCLSDTLQMHFYETCPYLKFAHFTANQAILEAFEGKKRVHVIDFSMNQGLQWPALMQALALREGGPPTFRLTGIGPPAPDNSDHLHEVGCKLAQLAEAIHVEFEYRGFVANSLADLDASMLELRPSDTEAVAVNSVFELHKLLGRPGGIEKVLGVVKQIKPVIFTVVEQESNHNGPVFLDRFTESLHYYSTLFDSLEGVPNSQDKVMSEVYLGKQICNLVACEGPDRVERHETLSQWGNRFGSSGLAPAHLGSNAFKQASMLLSVFNSGQGYRVEESNGCLMLGWHTRPLITTSAWKLSTAAY

SEQ ID NO: 45019 - protein, 558 aa, Arabidopsis thaliana
  peptide (1)..(558): Ceres Seq. ID no. 13591477
  misc_feature (166)..(461): Pfam Name: GRAS family transcription factor Pfam Description: GRAS family transcription factor
  misc_feature (166)..(461): Pfam Name: GRAS family transcription factor Pfam Description: GRAS family transcription factor
  misc_feature (1)..(81): Homolog of NCBI NO: 2339980 NR Description: RGA2 protein [Arabidopsis thaliana]
  misc_feature (105)..(555): Homolog of NCBI NO: 2339980 NR Description: RGA2 protein [Arabidopsis thaliana]
  misc_feature (1)..(81): Homolog of NCBI NO: 2569938 NR Description: GAI [Arabidopsis thaliana]
  misc_feature (105)..(555): Homolog of NCBI NO: 2569938 NR Description: GAI [Arabidopsis thaliana]
  misc_feature (1)..(81): Homolog of NCBI NO: 15223951 NR Description: gibberellin response modulator (GAI/RGA2)
  misc_feature (1)..(81): Homolog of NCBI NO: 2339980 NR Description: RGA2 protein [Arabidopsis thaliana]
  misc_feature (1)..(81): Homolog of NCBI NO: 2569938 NR Description: GAI [Arabidopsis thaliana]
  misc_feature (1)..(81): Homolog of NCBI NO: 15223951 NR Description: gibberellin response modulator (GAI/RGA2)
  misc_feature (1)..(558): Homolog of NCBI NO: 15226311 NR Description: gibberellin response modulator (RGA1)
  misc_feature (1)..(558): Homolog of NCBI NO: 15529230 NR Description: At2g01570/F2I9.19 [Arabidopsis thaliana]
  misc_feature (1)..(558): Homolog of NCBI NO: 2339978 NR Description: RGA1 protein [Arabidopsis thaliana]
  misc_feature (1)..(558): Homolog of NCBI NO: 2569940 NR Description: GRS protein [Arabidopsis thaliana]
  misc_feature (105)..(555): Homolog of NCBI NO: 15223951 NR Description: gibberellin response modulator (GAI/RGA2)
  misc_feature (105)..(555): Homolog of NCBI NO: 2569938 NR Description: GAI [Arabidopsis thaliana]
  misc_feature (105)..(555): Homolog of NCBI NO: 2339980 NR Description: RGA2 protein [Arabidopsis thaliana]
  misc_feature (105)..(555): Homolog of NCBI NO: 15223951 NR Description: gibberellin response modulator (GAI/RGA2)
  misc_feature (1)..(558): Homolog of NCBI NO: 2569940 NR Description: GRS protein [Arabidopsis thaliana]
  misc_feature (1)..(558): Homolog of NCBI NO: 2339978 NR Description: RGA1 protein [Arabidopsis thaliana]
  misc_feature (1)..(558): Homolog of NCBI NO: 15529230 NR Description: At2g01570/F2I9.19 [Arabidopsis thaliana]
  misc_feature (1)..(558): Homolog of NCBI NO: 15226311 NR Description: gibberellin response modulator (RGA1)
MMVKKEEDGGGNMDDELLAVLGYKVRSSEMAEVALKLEQLETMMSNVQEDGLSHLATDTVHYNPSELYSWLDNMLSELNPPPLPASSNGLDPVLPSPEICGFPASDYDLKVIPGNAIYQFPAIDSSSSSNNQNKRLKSCSSPDSMVTSTSTGTQIGGVIGTTVTTTTTTTTAAGESTRSVILVDSQENGVRLVHALMACAEAIQQNNLTLAEALVKQIGCLAVSQAGAMRKVATYFAEALARRIYRLSPPQNQIDHCLSDTLQMHFYETCPYLKFAHFTANQAILEAFEGKKRVHVIDFSMNQGLQWPALMQALALREGGPPTFRLTGIGPPAPDNSDHLHEVGCKLAQLAEAIHVEFEYRGFVANSLADLDASMLELRPSDTEAVAVNSVFELHKLLGRPGGIEKVLGVVKQIKPVIFTVVEQESNHNGPVFLDRFTESLHYYSTLFDSLEGVPNSQDKVMSEVYLGKQICNLVACEGPDRVERHETLSQWGNRFGSSGLAPAHLGSNAFKQASMLLSVFNSGQGYRVEESNGCLMLGWHTRPLITTSAWKLSTAAY

SEQ ID NO: 45020 - DNA, 2920 bp, Arabidopsis thaliana; identical to SEQ ID NO: 21546
  misc_feature (1)..(2920): Ceres Seq. ID no. 12600069
  misc_feature: MA Experiment ID: 20000111 Result: Down-regulated in Transcription
  misc_feature: MA Experiment 20000111 PARAMETER Experiment Name: At_42deg_Heat_cDNA_P Parameter: Temperature (deg C) Value: 42 vs. 22
  misc_feature: MA Experiment 20000111 PARAMETER Experiment Name: At_42deg_Heat_cDNA_P Parameter: Timepoint (hr) Value: 6
  misc_feature: MA Experiment 20000111 PARAMETER Experiment Name: At_42deg_Heat_cDNA_P Parameter: Tissue Value: Aerial
  misc_feature: MA Experiment ID: 20000112 Result: Down-regulated in Transcription
  misc_feature: MA Experiment 20000112 PARAMETER Experiment Name: At_42deg_Heat_cDNA_P Parameter: Temperature (deg C) Value: 42 vs. 22
  misc_feature: MA Experiment 20000112 PARAMETER Experiment Name: At_42deg_Heat_cDNA_P Parameter: Timepoint (hr) Value: 2
  misc_feature: MA Experiment 20000112 PARAMETER Experiment Name: At_42deg_Heat_cDNA_P Parameter: Tissue Value: Aerial
  misc_feature: MA Experiment ID: 20000113 Result: Down-regulated in Transcription
  misc_feature: MA Experiment 20000113 PARAMETER Experiment Name: At_42deg_Heat_cDNA_P Parameter: Temperature (deg C) Value: 42 vs. 22
  misc_feature: MA Experiment 20000113 PARAMETER Experiment Name: At_42deg_Heat_cDNA_P Parameter: Timepoint (hr) Value: 8
  misc_feature: MA Experiment 20000113 PARAMETER Experiment Name: At_42deg_Heat_cDNA_P Parameter: Tissue Value: Aerial

SEQ ID NO: 45021 - protein, 794 aa, Arabidopsis thaliana; identical to SEQ ID NO: 21547
  peptide (1)..(794): Ceres Seq. ID no. 12600070
  misc_feature (92)..(550): Homolog of NCBI NO: 34912848 NR Description: kinesin-like protein [Oryza sativa (japonica
  misc_feature (704)..(787): Homolog of NCBI NO: 18401002 NR Description: kinesin-like protein TBK5, putative
  misc_feature (704)..(787): Homolog of NCBI NO: 9294452 NR Description: contains similarity to kinesin heavy
  misc_feature (86)..(635): Homolog of NCBI NO: 18401002 NR Description: kinesin-like protein TBK5, putative
  misc_feature (86)..(635): Homolog of NCBI NO: 9294452 NR Description: contains similarity to kinesin heavy
  misc_feature (662)..(787): Homolog of NCBI NO: 13536983 NR Description: BY-2 kinesin-like protein 10 [Nicotiana tabacum]
  misc_feature (7)..(541): Homolog of NCBI NO: 13536983 NR Description: BY-2 kinesin-like protein 10 [Nicotiana tabacum]
  misc_feature (25)..(52): Homolog of NCBI NO: 34897620 NR Description: kinesin-like protein [Oryza sativa]
  misc_feature (57)..(404): Homolog of NCBI NO: 34897620 NR Description: kinesin-like protein [Oryza sativa]
  misc_feature (424)..(794): Homolog of NCBI NO: 34897620 NR Description: kinesin-like protein [Oryza sativa]
  misc_feature (424)..(794): Homolog of NCBI NO: 34897620 NR Description: kinesin-like protein [Oryza sativa]
  misc_feature (92)..(550): Homolog of NCBI NO: 34912848 NR Description: kinesin-like protein [Oryza sativa (japonica
  misc_feature (704)..(787): Homolog of NCBI NO: 18401002 NR Description: kinesin-like protein TBK5, putative
  misc_feature (704)..(787): Homolog of NCBI NO: 9294452 NR Description: contains similarity to kinesin heavy
  misc_feature (86)..(635): Homolog of NCBI NO: 18401002 NR Description: kinesin-like protein TBK5, putative
  misc_feature (86)..(635): Homolog of NCBI NO: 9294452 NR Description: contains similarity to kinesin heavy
  misc_feature (662)..(787): Homolog of NCBI NO: 13536983 NR Description: BY-2 kinesin-like protein 10 [Nicotiana tabacum]
  misc_feature (7)..(541): Homolog of NCBI NO: 13536983 NR Description: BY-2 kinesin-like protein 10 [Nicotiana tabacum]
  misc_feature (25)..(52): Homolog of NCBI NO: 34897620 NR Description: kinesin-like protein [Oryza sativa]
  misc_feature (57)..(404): Homolog of NCBI NO: 34897620 NR Description: kinesin-like protein [Oryza sativa]

SEQ ID NO: 45022 - protein, 790 aa, Arabidopsis thaliana; identical to SEQ ID NO: 21548
  peptide (1)..(790): Ceres Seq. ID no. 12600071
  misc_feature (88)..(546): Homolog of NCBI NO: 34912848 NR Description: kinesin-like protein [Oryza sativa (japonica
  misc_feature (700)..(783): Homolog of NCBI NO: 18401002 NR Description: kinesin-like protein TBK5, putative
  misc_feature (700)..(783): Homolog of NCBI NO: 9294452 NR Description: contains similarity to kinesin heavy
  misc_feature (82)..(631): Homolog of NCBI NO: 18401002 NR Description: kinesin-like protein TBK5, putative
  misc_feature (82)..(631): Homolog of NCBI NO: 9294452 NR Description: contains similarity to kinesin heavy
  misc_feature (658)..(783): Homolog of NCBI NO: 13536983 NR Description: BY-2 kinesin-like protein 10 [Nicotiana tabacum]
  misc_feature (3)..(537): Homolog of NCBI NO: 13536983 NR Description: BY-2 kinesin-like protein 10 [Nicotiana tabacum]
  misc_feature (21)..(48): Homolog of NCBI NO: 34897620 NR Description: kinesin-like protein [Oryza sativa]
  misc_feature (53)..(400): Homolog of NCBI NO: 34897620 NR Description: kinesin-like protein [Oryza sativa]
  misc_feature (420)..(790): Homolog of NCBI NO: 34897620 NR Description: kinesin-like protein [Oryza sativa]
  misc_feature (88)..(546): Homolog of NCBI NO: 34912848 NR Description: kinesin-like protein [Oryza sativa (japonica
  misc_feature (700)..(783): Homolog of NCBI NO: 18401002 NR Description: kinesin-like protein TBK5, putative
  misc_feature (700)..(783): Homolog of NCBI NO: 9294452 NR Description: contains similarity to kinesin heavy
  misc_feature (82)..(631): Homolog of NCBI NO: 18401002 NR Description: kinesin-like protein TBK5, putative
  misc_feature (82)..(631): Homolog of NCBI NO: 9294452 NR Description: contains similarity to kinesin heavy
  misc_feature (658)..(783): Homolog of NCBI NO: 13536983 NR Description: BY-2 kinesin-like protein 10 [Nicotiana tabacum]
  misc_feature (3)..(537): Homolog of NCBI NO: 13536983 NR Description: BY-2 kinesin-like protein 10 [Nicotiana tabacum]
  misc_feature (21)..(48): Homolog of NCBI NO: 34897620 NR Description: kinesin-like protein [Oryza sativa]
  misc_feature (53)..(400): Homolog of NCBI NO: 34897620 NR Description: kinesin-like protein [Oryza sativa]
  misc_feature (420)..(790): Homolog of NCBI NO: 34897620 NR Description: kinesin-like protein [Oryza sativa]

SEQ ID NO: 45023 - protein, 764 aa, Arabidopsis thaliana; identical to SEQ ID NO: 21549
  peptide (1)..(764): Ceres Seq. ID no. 12600072
  misc_feature (62)..(520): Homolog of NCBI NO: 34912848 NR Description: kinesin-like protein [Oryza sativa (japonica
  misc_feature (674)..(757): Homolog of NCBI NO: 18401002 NR Description: kinesin-like protein TBK5, putative
  misc_feature (674)..(757): Homolog of NCBI NO: 9294452 NR Description: contains similarity to kinesin heavy
  misc_feature (56)..(605): Homolog of NCBI NO: 18401002 NR Description: kinesin-like protein TBK5, putative
  misc_feature (56)..(605): Homolog of NCBI NO: 9294452 NR Description: contains similarity to kinesin heavy
  misc_feature (632)..(757): Homolog of NCBI NO: 13536983 NR Description: BY-2 kinesin-like protein 10 [Nicotiana tabacum]
  misc_feature (1)..(511): Homolog of NCBI NO: 13536983 NR Description: BY-2 kinesin-like protein 10 [Nicotiana tabacum]
  misc_feature (1)..(22): Homolog of NCBI NO: 34897620 NR Description: kinesin-like protein [Oryza sativa]
  misc_feature (27)..(374): Homolog of NCBI NO: 34897620 NR Description: kinesin-like protein [Oryza sativa]
  misc_feature (394)..(764): Homolog of NCBI NO: 34897620 NR Description: kinesin-like protein [Oryza sativa]
  misc_feature (62)..(520): Homolog of NCBI NO: 34912848 NR Description: kinesin-like protein [Oryza sativa (japonica
  misc_feature (674)..(757): Homolog of NCBI NO: 18401002 NR Description: kinesin-like protein TBK5, putative
  misc_feature (674)..(757): Homolog of NCBI NO: 9294452 NR Description: contains similarity to kinesin heavy
  misc_feature (56)..(605): Homolog of NCBI NO: 18401002 NR Description: kinesin-like protein TBK5, putative
  misc_feature (56)..(605): Homolog of NCBI NO: 9294452 NR Description: contains similarity to kinesin heavy
  misc_feature (632)..(757): Homolog of NCBI NO: 13536983 NR Description: BY-2 kinesin-like protein 10 [Nicotiana tabacum]
  misc_feature (1)..(511): Homolog of NCBI NO: 13536983 NR Description: BY-2 kinesin-like protein 10 [Nicotiana tabacum]
  misc_feature (1)..(22): Homolog of NCBI NO: 34897620 NR Description: kinesin-like protein [Oryza sativa]
  misc_feature (27)..(374): Homolog of NCBI NO: 34897620 NR Description: kinesin-like protein [Oryza sativa]
  misc_feature (394)..(764): Homolog of NCBI NO: 34897620 NR Description: kinesin-like protein [Oryza sativa]

SEQ ID NO: 45024 - DNA, 1880 bp, Arabidopsis thaliana
  misc_feature (1)..(1880): Ceres Seq. ID no. 12559206
  misc_feature: MA Experiment ID: 20000169 Result: Up-regulated in Transcription
  misc_feature: MA Experiment 20000169 PARAMETER Experiment Name: At_100uM_ABA_P Parameter: Age (day) Value: 14
  misc_feature: MA Experiment 20000169 PARAMETER Experiment Name: At_100uM_ABA_P Parameter: Organism Value: A. thaliana
  misc_feature: MA Experiment 20000169 PARAMETER Experiment Name: At_100uM_ABA_P Parameter: Plant Line Value: WS
  misc_feature: MA Experiment 20000169 PARAMETER Experiment Name: At_100uM_ABA_P Parameter: Timepoint (hr) Value: 6
  misc_feature: MA Experiment 20000169 PARAMETER Experiment Name: At_100uM_ABA_P Parameter: Tissue Value: Aerial
  misc_feature: MA Experiment 20000169 PARAMETER Experiment Name: At_100uM_ABA_P Parameter: Treatment Value: 100uM ABA vs. No Treatment
  misc_feature: MA Experiment ID: 20000171 Result: Down-regulated in Transcription
  misc_feature: MA Experiment 20000171 PARAMETER Experiment Name: At_42deg_Heat_P Parameter: Age (day) Value: 14
  misc_feature: MA Experiment 20000171 PARAMETER Experiment Name: At_42deg_Heat_P Parameter: Organism Value: A. thaliana
  misc_feature: MA Experiment 20000171 PARAMETER Experiment Name: At_42deg_Heat_P Parameter: Plant Line Value: WS
  misc_feature: MA Experiment 20000171 PARAMETER Experiment Name: At_42deg_Heat_P Parameter: Temperature (deg C) Value: 42 vs. 22
  misc_feature: MA Experiment 20000171 PARAMETER Experiment Name: At_42deg_Heat_P Parameter: Timepoint (hr) Value: 1
  misc_feature: MA Experiment 20000171 PARAMETER Experiment Name: At_42deg_Heat_P Parameter: Tissue Value: Aerial
  misc_feature: MA Experiment ID: 20000173 Result: Down-regulated in Transcription
  misc_feature: MA Experiment 20000173 PARAMETER Experiment Name: At_42deg_Heat_P Parameter: Age (day) Value: 14
  misc_feature: MA Experiment 20000173 PARAMETER Experiment Name: At_42deg_Heat_P Parameter: Organism Value: A. thaliana
  misc_feature: MA Experiment 20000173 PARAMETER Experiment Name: At_42deg_Heat_P Parameter: Plant Line Value: WS
  misc_feature: MA Experiment 20000173 PARAMETER Experiment Name: At_42deg_Heat_P Parameter: Temperature (deg C) Value: 42 vs. 22
  misc_feature: MA Experiment 20000173 PARAMETER Experiment Name: At_42deg_Heat_P Parameter: Timepoint (hr) Value: 6
  misc_feature: MA Experiment 20000173 PARAMETER Experiment Name: At_42deg_Heat_P Parameter: Tissue Value: Aerial
  misc_feature: MA Experiment ID: 20000213 Result: Up-regulated in Transcription
  misc_feature: MA Experiment 20000213 PARAMETER Experiment Name: At_4deg_Cold_P Parameter: Timepoint (hr) Value: 2
  misc_feature: MA Experiment ID: 20000227 Result: Down-regulated in Transcription
  misc_feature: MA Experiment 20000227 PARAMETER Experiment Name: At_Root-Tips-vs-Tops_P Parameter: Tissue Value: Root Tips vs. Root Tops
  misc_feature: MA Experiment ID: 20000265 Result: Down-regulated in Transcription
  misc_feature: MA Experiment 20000265 PARAMETER Experiment Name: At_Open_Flower_P Parameter: Age (day) Value: 21
  misc_feature: MA Experiment 20000265 PARAMETER Experiment Name: At_Open_Flower_P Parameter: Plant Line Value: WS
  misc_feature: MA Experiment 20000265 PARAMETER Experiment Name: At_Open_Flower_P Parameter: Tissue Value: Closed Flower vs. Whole Plant
  misc_feature: MA Experiment ID: 20000495 Result: Down-regulated in Transcription
  misc_feature: MA Experiment 20000495 PARAMETER Experiment Name: At_Guard_Cells_P Parameter: Harvest Date Value: 8/2/2002
  misc_feature: MA Experiment 20000495 PARAMETER Experiment Name: At_Guard_Cells_P Parameter: Organism Value: A. thaliana
  misc_feature: MA Experiment 20000495 PARAMETER Experiment Name: At_Guard_Cells_P Parameter: Tissue Value: Guard Cells vs. Leaves
  misc_feature: MA Experiment ID: 20000573 Result: Down-regulated in Transcription
  misc_feature: MA Experiment 20000573 PARAMETER Experiment Name: At_100uM_ABA_Mutants__P Parameter: Organism Value: A. thaliana
  misc_feature: MA Experiment 20000573 PARAMETER Experiment Name: At_100uM_ABA_Mutants__P Parameter: Plant Line Value: CS22 vs. Ler wt
  misc_feature: MA Experiment 20000573 PARAMETER Experiment Name: At_100uM_ABA_Mutants__P Parameter: Timepoint (hr) Value: N/A
  misc_feature: MA Experiment 20000573 PARAMETER Experiment Name: At_100uM_ABA_Mutants__P Parameter: Tissue Value: Whole Plant
  misc_feature: MA Experiment 20000573 PARAMETER Experiment Name: At_100uM_ABA_Mutants__P Parameter: Treatment Value: None
  misc_feature: MA Experiment ID: 20000574 Result: Down-regulated in Transcription
  misc_feature: MA Experiment 20000574 PARAMETER Experiment Name: At_100uM_ABA_Mutants__P Parameter: Organism Value: A. thaliana
  misc_feature: MA Experiment 20000574 PARAMETER Experiment Name: At_100uM_ABA_Mutants__P Parameter: Plant Line Value: CS23 vs. Ler wt
  misc_feature: MA Experiment 20000574 PARAMETER Experiment Name: At_100uM_ABA_Mutants__P Parameter: Timepoint (hr) Value: N/A
  misc_feature: MA Experiment 20000574 PARAMETER Experiment Name: At_100uM_ABA_Mutants__P Parameter: Tissue Value: Whole Plant
  misc_feature: MA Experiment 20000574 PARAMETER Experiment Name: At_100uM_ABA_Mutants__P Parameter: Treatment Value: None
  misc_feature: MA Experiment ID: 20001247 Result: Up-regulated in Transcription
  misc_feature: MA Experiment 20001247 PARAMETER Experiment Name: At_Far-red-induction_P Parameter: Age (day) Value: 7
  misc_feature: MA Experiment 20001247 PARAMETER Experiment Name: At_Far-red-induction_P Parameter: Light Value: Far-red vs. White
  misc_feature: MA Experiment 20001247 PARAMETER Experiment Name: At_Far-red-induction_P Parameter: Organism Value: A. thaliana
  misc_feature: MA Experiment 20001247 PARAMETER Experiment Name: At_Far-red-induction_P Parameter: Plant Line Value: Columbia
  misc_feature: MA Experiment 20001247 PARAMETER Experiment Name: At_Far-red-induction_P Parameter: Timepoint (hr) Value: 1
  misc_feature: MA Experiment 20001247 PARAMETER Experiment Name: At_Far-red-induction_P Parameter: Tissue Value: Whole Plant
  misc_feature: MA Experiment ID: 20001248 Result: Down-regulated in Transcription
  misc_feature: MA Experiment 20001248 PARAMETER Experiment Name: At_Far-red-induction_P Parameter: Age (day) Value: 7
  misc_feature: MA Experiment 20001248 PARAMETER Experiment Name: At_Far-red-induction_P Parameter: Light Value: Far-red vs. White
  misc_feature: MA Experiment 20001248 PARAMETER Experiment Name: At_Far-red-induction_P Parameter: Organism Value: A. thaliana
  misc_feature: MA Experiment 20001248 PARAMETER Experiment Name: At_Far-red-induction_P Parameter: Plant Line Value: Columbia
  misc_feature: MA Experiment 20001248 PARAMETER Experiment Name: At_Far-red-induction_P Parameter: Timepoint (hr) Value: 4
  misc_feature: MA Experiment 20001248 PARAMETER Experiment Name: At_Far-red-induction_P Parameter: Tissue Value: Whole Plant
  misc_feature: MA Experiment ID: 20001556 Result: Down-regulated in Transcription
  misc_feature: MA Experiment 20001556 PARAMETER Experiment Name: At_Drought_Soil_Dry_P Parameter: Age (day) Value: 26
  misc_feature: MA Experiment 20001556 PARAMETER Experiment Name: At_Drought_Soil_Dry_P Parameter: Organism Value: A. thaliana
  misc_feature: MA Experiment 20001556 PARAMETER Experiment Name: At_Drought_Soil_Dry_P Parameter: Plant Line Value: WS
  misc_feature: MA Experiment 20001556 PARAMETER Experiment Name: At_Drought_Soil_Dry_P Parameter: Post Timepoint (hr) Value: None
  misc_feature: MA Experiment 20001556 PARAMETER Experiment Name: At_Drought_Soil_Dry_P Parameter: Post-Treatment Value: None
  misc_feature: MA Experiment 20001556 PARAMETER Experiment Name: At_Drought_Soil_Dry_P Parameter: Timepoint (day) Value: 12
  misc_feature: MA Experiment 20001556 PARAMETER Experiment Name: At_Drought_Soil_Dry_P Parameter: Treatment Value: Drought vs. No Drought
  misc_feature: MA Experiment ID: 20001557 Result: Up-regulated in Transcription
  misc_feature: MA Experiment 20001557 PARAMETER Experiment Name: At_Drought_Soil_Dry_P Parameter: Age (day) Value: 27
  misc_feature: MA Experiment 20001557 PARAMETER Experiment Name: At_Drought_Soil_Dry_P Parameter: Organism Value: A. thaliana
  misc_feature: MA Experiment 20001557 PARAMETER Experiment Name: At_Drought_Soil_Dry_P Parameter: Plant Line Value: WS
  misc_feature: MA Experiment 20001557 PARAMETER Experiment Name: At_Drought_Soil_Dry_P Parameter: Post Timepoint (hr) Value: 3
  misc_feature: MA Experiment 20001557 PARAMETER Experiment Name: At_Drought_Soil_Dry_P Parameter: Post-Treatment Value: Re-Water vs. No Drought
  misc_feature: MA Experiment 20001557 PARAMETER Experiment Name: At_Drought_Soil_Dry_P Parameter: Timepoint (day) Value: 13
  misc_feature: MA Experiment 20001557 PARAMETER Experiment Name: At_Drought_Soil_Dry_P Parameter: Treatment Value: Drought vs. No Drought
  misc_feature: MA Experiment ID: 20001558 Result: Up-regulated in Transcription
  misc_feature: MA Experiment 20001558 PARAMETER Experiment Name: At_Drought_Soil_Dry_P Parameter: Age (day) Value: 27
  misc_feature: MA Experiment 20001558 PARAMETER Experiment Name: At_Drought_Soil_Dry_P Parameter: Organism Value: A. thaliana
  misc_feature: MA Experiment 20001558 PARAMETER Experiment Name: At_Drought_Soil_Dry_P Parameter: Plant Line Value: WS
  misc_feature: MA Experiment 20001558 PARAMETER Experiment Name: At_Drought_Soil_Dry_P Parameter: Post Timepoint (hr) Value: 6
  misc_feature: MA Experiment 20001558 PARAMETER Experiment Name: At_Drought_Soil_Dry_P Parameter: Post-Treatment Value: Re-Water vs. No Drought
  misc_feature: MA Experiment 20001558 PARAMETER Experiment Name: At_Drought_Soil_Dry_P Parameter: Timepoint (day) Value: 13
  misc_feature: MA Experiment 20001558 PARAMETER Experiment Name: At_Drought_Soil_Dry_P Parameter: Treatment Value: Drought vs. No Drought
  misc_feature: MA Experiment ID: 20001560 Result: Up-regulated in Transcription
  misc_feature: MA Experiment 20001560 PARAMETER Experiment Name: At_Drought_Soil_Dry_P Parameter: Age (day) Value: 28
  misc_feature: MA Experiment 20001560 PARAMETER Experiment Name: At_Drought_Soil_Dry_P Parameter: Organism Value: A. thaliana
  misc_feature: MA Experiment 20001560 PARAMETER Experiment Name: At_Drought_Soil_Dry_P Parameter: Plant Line Value: WS
  misc_feature: MA Experiment 20001560 PARAMETER Experiment Name: At_Drought_Soil_Dry_P Parameter: Post Timepoint (hr) Value: None
  misc_feature: MA Experiment 20001560 PARAMETER Experiment Name: At_Drought_Soil_Dry_P Parameter: Post-Treatment Value: None
  misc_feature: MA Experiment 20001560 PARAMETER Experiment Name: At_Drought_Soil_Dry_P Parameter: Timepoint (day) Value: 14
  misc_feature: MA Experiment 20001560 PARAMETER Experiment Name: At_Drought_Soil_Dry_P Parameter: Treatment Value: Drought vs. No Drought
  misc_feature: MA Experiment ID: 20001906 Result: Down-regulated in Transcription
  misc_feature: MA Experiment 20001906 PARAMETER Experiment Name: At_Drought_Reproduction_P Parameter: Age (day) Value: 35
  misc_feature: MA Experiment 20001906 PARAMETER Experiment Name: At_Drought_Reproduction_P Parameter: Organism Value: A. thaliana
  misc_feature: MA Experiment 20001906 PARAMETER Experiment Name: At_Drought_Reproduction_P Parameter: Plant Line Value: WS
  misc_feature: MA Experiment 20001906 PARAMETER Experiment Name: At_Drought_Reproduction_P Parameter: Timepoint (day) Value: 5
  misc_feature: MA Experiment 20001906 PARAMETER Experiment Name: At_Drought_Reproduction_P Parameter: Tissue Value: Siliques
  misc_feature: MA Experiment 20001906 PARAMETER Experiment Name: At_Drought_Reproduction_P Parameter: Treatment Value: Drought vs. No Drought
  misc_feature: MA Experiment ID: 20001911 Result: Down-regulated in Transcription
  misc_feature: MA Experiment 20001911 PARAMETER Experiment Name: At_Drought_Reproduction_P Parameter: Age (day) Value: 40
  misc_feature: MA Experiment 20001911 PARAMETER Experiment Name: At_Drought_Reproduction_P Parameter: Organism Value: A. thaliana
  misc_feature: MA Experiment 20001911 PARAMETER Experiment Name: At_Drought_Reproduction_P Parameter: Plant Line Value: WS
  misc_feature: MA Experiment 20001911 PARAMETER Experiment Name: At_Drought_Reproduction_P Parameter: Timepoint (day) Value: 10
  misc_feature: MA Experiment 20001911 PARAMETER Experiment Name: At_Drought_Reproduction_P Parameter: Tissue Value: Flowers
  misc_feature: MA Experiment 20001911 PARAMETER Experiment Name: At_Drought_Reproduction_P Parameter: Treatment Value: Drought vs. No Drought
gcactctatatatctctccatccctacttgccctcatttcaccaaaatcctcctaattcaccaattttagaattcccattctcattttctctctctttctatttctccaaatttgcctaaagattttacattttatcttcaatccttccttgatttacgtttgaaatatttcgacccaaaactatactgatggagagaacaaacagcattgagatggatcgagagagattaacggcggagatggcgtttcgagattcatcatcggccgttataagaattcgaagacgtttgccggatttattaacgtccgttaagctcaaatacgtgaagcttggacttcacaactcttgcaacgtgaccaccattctcttcttcttaattattcttcctttaaccggaaccgtgctggttcagctaaccggtctaacgttcgatacgttctctgagctttggtctaaccaggcggttcaactcgacacggcgacgagacttacctgcttggttttcctctccttcgttttgaccctctacgtggctaaccggtctaaaccggtttacctagtggatttctcctgctacaaaccggaagacgagcgtaaaatatcagtagattcgttcttgacgatgactgaggaaaatggatcattcaccgatgacacggttcagttccagcaaagaatctcgaaccgggccggtttgggagacgagacgtatctgccacgtggcataacttcaacgcccccgaagctaaatatgtcagaggcacgtgccgaagctgaagccgttatgtttggagccttagattccctcttcgagaaaaccggaattaaaccggccgaagtcggaatcttgatagtaaactgcagcttattcaatccgacgccgtctctatcagcgatgatcgtgaaccattacaagatgagagaagacatcaaaagttacaacctcggaggaatgggttgctccgccggattaatctcaatcgatctcgctaacaatctcctcaaagcaaaccctaattcttacgctgtcgtggtaagcacggaaaacataaccctaaactggtacttcggaaatgaccggtcaatgctcctctgcaactgcatcttccgaatgggcggagctgcgattctcctctctaaccgccgtcaagaccggaagaagtcaaagtactcgctggtcaacgtcgttcgaacacataaaggatcagacgacaagaactacaattgcgtgtaccagaaggaagacgagagaggaacaatcggtgtctctttagctagagagctcatgtctgtcgccggagacgctctgaaaacaaacatcacgactttaggaccgatggttcttccattgtcagagcagttgatgttcttgatttccttggtcaaaaggaagatgttcaagttaaaagttaaaccgtatattccggatttcaagctagctttcgagcatttctgtattcacgcaggaggtagagcggttctagacgaagtgcagaagaatcttgatctcaaagattggcacatggaaccttctagaatgactttgcacagatttggtaacacttcgagtagctcgctttggtatgagatggcttataccgaagctaagggtcgggttaaagctggtgaccgactttggcagattgcgtttggatcgggtttcaagtgtaatagtgcggtttggaaagcgttacgaccggtttcgacggaggagatgaccggtaatgcttgggctggttcgattgatcaatatccggttaaagttgtgcaatgattggttgaaccggataatcatatatgtaattgtgttcttcttgattttattttttaattgttgatgtaagttgtcgattgaaaatcatataatttaattaattt

SEQ ID NO: 45025 - protein, 528 aa, Arabidopsis thaliana
  peptide (1)..(528): Ceres Seq. ID no. 12559207
  misc_feature (360)..(503): Pfam Name: Chalcone and stilbene synthases, C-terminal domain Pfam Description: Chalcone and stilbene synthases, C-terminal
  misc_feature (360)..(503): Pfam Name: Chalcone and stilbene synthases, C-terminal domain Pfam Description: Chalcone and stilbene synthases, C-terminal
  misc_feature (22)..(526): Homolog of NCBI NO: 15219676 NR Description: putative beta-ketoacyl-CoA synthase; protein id:
  misc_feature (27)..(527): Homolog of NCBI NO: 11066477 NR Description: fatty acid elongase 1-like protein [Limnanthes
  misc_feature (34)..(526): Homolog of NCBI NO: 15239981 NR Description: beta-ketoacyl-CoA synthase
  misc_feature (34)..(526): Homolog of NCBI NO: 14334714 NR Description: putative beta-ketoacyl-CoA synthase [Arabidopsis
  misc_feature (32)..(526): Homolog of NCBI NO: 15225767 NR Description: putative beta-ketoacyl-CoA synthase; protein id:
  misc_feature (22)..(526): Homolog of NCBI NO: 15219676 NR Description: putative beta-ketoacyl-CoA synthase; protein id:
  misc_feature (34)..(526): Homolog of NCBI NO: 15239981 NR Description: beta-ketoacyl-CoA synthase
  misc_feature (32)..(526): Homolog of NCBI NO: 15225767 NR Description: putative beta-ketoacyl-CoA synthase; protein id:
  misc_feature (1)..(528): Homolog of NCBI NO: 22329274 NR Description: fatty acid elongase 3-ketoacyl-CoA synthase 1
  misc_feature (9)..(528): Homolog of NCBI NO: 4091810 NR Description: fatty acid elongase 3-ketoacyl-CoA synthase 1
  misc_feature (9)..(525): Homolog of NCBI NO: 3551960 NR Description: senescence-associated protein 15 [Hemerocallis
  misc_feature (22)..(526): Homolog of NCBI NO: 29417540 NR Description: beta-ketoacyl-CoA-synthase [Marchantia polymorpha]
  misc_feature (36)..(526): Homolog of NCBI NO: 9714501 NR Description: putative fatty acid elongase [Zea mays]
  misc_feature (34)..(526): Homolog of NCBI NO: 14334714 NR Description: putative beta-ketoacyl-CoA synthase [Arabidopsis
  misc_feature (27)..(527): Homolog of NCBI NO: 11066477 NR Description: fatty acid elongase 1-like protein [Limnanthes
  misc_feature (36)..(526): Homolog of NCBI NO: 9714501 NR Description: putative fatty acid elongase [Zea mays]
  misc_feature (22)..(526): Homolog of NCBI NO: 29417540 NR Description: beta-ketoacyl-CoA-synthase [Marchantia polymorpha]
  misc_feature (9)..(525): Homolog of NCBI NO: 3551960 NR Description: senescence-associated protein 15 [Hemerocallis
  misc_feature (9)..(528): Homolog of NCBI NO: 4091810 NR Description: fatty acid elongase 3-ketoacyl-CoA synthase 1
  misc_feature (1)..(528): Homolog of NCBI NO: 22329274 NR Description: fatty acid elongase 3-ketoacyl-CoA synthase 1
MERTNSIEMDRERLTAEMAFRDSSSAVIRIRRRLPDLLTSVKLKYVKLGLHNSCNVTTILFFLIILPLTGTVLVQLTGLTFDTFSELWSNQAVQLDTATRLTCLVFLSFVLTLYVANRSKPVYLVDFSCYKPEDERKISVDSFLTMTEENGSFTDDTVQFQQRISNRAGLGDETYLPRGITSTPPKLNMSEARAEAEAVMFGALDSLFEKTGIKPAEVGILIVNCSLFNPTPSLSAMIVNHYKMREDIKSYNLGGMGCSAGLISIDLANNLLKANPNSYAVVVSTENITLNWYFGNDRSMLLCNCIFRMGGAAILLSNRRQDRKKSKYSLVNVVRTHKGSDDKNYNCVYQKEDERGTIGVSLARELMSVAGDALKTNITTLGPMVLPLSEQLMFLISLVKRKMFKLKVKPYIPDFKLAFEHFCIHAGGRAVLDEVQKNLDLKDWHMEPSRMTLHRFGNTSSSSLWYEMAYTEAKGRVKAGDRLWQIAFGSGFKCNSAVWKALRPVSTEEMTGNAWAGSIDQYPVKVVQ

SEQ ID NO: 45026 - protein, 520 aa, Arabidopsis thaliana
  peptide (1)..(520): Ceres Seq. ID no. 12559208
  misc_feature (352)..(495): Pfam Name: Chalcone and stilbene synthases, C-terminal domain Pfam Description: Chalcone and stilbene synthases, C-terminal
  misc_feature (352)..(495): Pfam Name: Chalcone and stilbene synthases, C-terminal domain Pfam Description: Chalcone and stilbene synthases, C-terminal
  misc_feature (14)..(518): Homolog of NCBI NO: 15219676 NR Description: putative beta-ketoacyl-CoA synthase; protein id:
  misc_feature (19)..(519): Homolog of NCBI NO: 11066477 NR Description: fatty acid elongase 1-like protein [Limnanthes
  misc_feature (26)..(518): Homolog of NCBI NO: 15239981 NR Description: beta-ketoacyl-CoA synthase
  misc_feature (26)..(518): Homolog of NCBI NO: 14334714 NR Description: putative beta-ketoacyl-CoA synthase [Arabidopsis
  misc_feature (24)..(518): Homolog of NCBI NO: 15225767 NR Description: putative beta-ketoacyl-CoA synthase; protein id:
  misc_feature (14)..(518): Homolog of NCBI NO: 15219676 NR Description: putative beta-ketoacyl-CoA synthase; protein id:
  misc_feature (26)..(518): Homolog of NCBI NO: 15239981 NR Description: beta-ketoacyl-CoA synthase
  misc_feature (24)..(518): Homolog of NCBI NO: 15225767 NR Description: putative beta-ketoacyl-CoA synthase; protein id:
  misc_feature (1)..(520): Homolog of NCBI NO: 22329274 NR Description: fatty acid elongase 3-ketoacyl-CoA synthase 1
  misc_feature (1)..(520): Homolog of NCBI NO: 4091810 NR Description: fatty acid elongase 3-ketoacyl-CoA synthase 1
  misc_feature (1)..(517): Homolog of NCBI NO: 3551960 NR Description: senescence-associated protein 15 [Hemerocallis
  misc_feature (14)..(518): Homolog of NCBI NO: 29417540 NR Description: beta-ketoacyl-CoA-synthase [Marchantia polymorpha]
  misc_feature (28)..(518): Homolog of NCBI NO: 9714501 NR Description: putative fatty acid elongase [Zea mays]
  misc_feature (26)..(518): Homolog of NCBI NO: 14334714 NR Description: putative beta-ketoacyl-CoA synthase [Arabidopsis
  misc_feature (19)..(519): Homolog of NCBI NO: 11066477 NR Description: fatty acid elongase 1-like protein [Limnanthes
  misc_feature (28)..(518): Homolog of NCBI NO: 9714501 NR Description: putative fatty acid elongase [Zea mays]
  misc_feature (14)..(518): Homolog of NCBI NO: 29417540 NR Description: beta-ketoacyl-CoA-synthase [Marchantia polymorpha]
  misc_feature (1)..(517): Homolog of NCBI NO: 3551960 NR Description: senescence-associated protein 15 [Hemerocallis
  misc_feature (1)..(520): Homolog of NCBI NO: 4091810 NR Description: fatty acid elongase 3-ketoacyl-CoA synthase 1
  misc_feature (1)..(520): Homolog of NCBI NO: 22329274 NR Description: fatty acid elongase 3-ketoacyl-CoA synthase 1
MDRERLTAEMAFRDSSSAVIRIRRRLPDLLTSVKLKYVKLGLHNSCNVTTILFFLIILPLTGTVLVQLTGLTFDTFSELWSNQAVQLDTATRLTCLVFLSFVLTLYVANRSKPVYLVDFSCYKPEDERKISVDSFLTMTEENGSFTDDTVQFQQRISNRAGLGDETYLPRGITSTPPKLNMSEARAEAEAVMFGALDSLFEKTGIKPAEVGILIVNCSLFNPTPSLSAMIVNHYKMREDIKSYNLGGMGCSAGLISIDLANNLLKANPNSYAVVVSTENITLNWYFGNDRSMLLCNCIFRMGGAAILLSNRRQDRKKSKYSLVNVVRTHKGSDDKNYNCVYQKEDERGTIGVSLARELMSVAGDALKTNITTLGPMVLPLSEQLMFLISLVKRKMFKLKVKPYIPDFKLAFEHFCIHAGGRAVLDEVQKNLDLKDWHMEPSRMTLHRFGNTSSSSLWYEMAYTEAKGRVKAGDRLWQIAFGSGFKCNSAVWKALRPVSTEEMTGNAWAGSIDQYPVKVVQ

SEQ ID NO: 45027 - protein, 511 aa, Arabidopsis thaliana
  peptide (1)..(511): Ceres Seq. ID no. 12559209
  misc_feature (343)..(486): Pfam Name: Chalcone and stilbene synthases, C-terminal domain Pfam Description: Chalcone and stilbene synthases, C-terminal
  misc_feature (343)..(486): Pfam Name: Chalcone and stilbene synthases, C-terminal domain Pfam Description: Chalcone and stilbene synthases, C-terminal
  misc_feature (5)..(509): Homolog of NCBI NO: 15219676 NR Description: putative beta-ketoacyl-CoA synthase; protein id:
  misc_feature (10)..(510): Homolog of NCBI NO: 11066477 NR Description: fatty acid elongase 1-like protein [Limnanthes
  misc_feature (17)..(509): Homolog of NCBI NO: 15239981 NR Description: beta-ketoacyl-CoA synthase
  misc_feature (17)..(509): Homolog of NCBI NO: 14334714 NR Description: putative beta-ketoacyl-CoA synthase [Arabidopsis
  misc_feature (15)..(509): Homolog of NCBI NO: 15225767 NR Description: putative beta-ketoacyl-CoA synthase; protein id:
  misc_feature (5)..(509): Homolog of NCBI NO: 15219676 NR Description: putative beta-ketoacyl-CoA synthase; protein id:
  misc_feature (17)..(509): Homolog of NCBI NO: 15239981 NR Description: beta-ketoacyl-CoA synthase
  misc_feature (15)..(509): Homolog of NCBI NO: 15225767 NR Description: putative beta-ketoacyl-CoA synthase; protein id:
  misc_feature (1)..(511): Homolog of NCBI NO: 22329274 NR Description: fatty acid elongase 3-ketoacyl-CoA synthase 1
  misc_feature (1)..(511): Homolog of NCBI NO: 4091810 NR Description: fatty acid elongase 3-ketoacyl-CoA synthase 1
  misc_feature (1)..(508): Homolog of NCBI NO: 3551960 NR Description: senescence-associated protein 15 [Hemerocallis
  misc_feature (5)..(509): Homolog of NCBI NO: 29417540 NR Description: beta-ketoacyl-CoA-synthase [Marchantia polymorpha]
  misc_feature (19)..(509): Homolog of NCBI NO: 9714501 NR Description: putative fatty acid elongase [Zea mays]
  misc_feature (17)..(509): Homolog of NCBI NO: 14334714 NR Description: putative beta-ketoacyl-CoA synthase [Arabidopsis
  misc_feature (10)..(510): Homolog of NCBI NO: 11066477 NR Description: fatty acid elongase 1-like protein [Limnanthes
  misc_feature (19)..(509): Homolog of NCBI NO: 9714501 NR Description: putative fatty acid elongase [Zea mays]
  misc_feature (5)..(509): Homolog of NCBI NO: 29417540 NR Description: beta-ketoacyl-CoA-synthase [Marchantia polymorpha]
  misc_feature (1)..(508): Homolog of NCBI NO: 3551960 NR Description: senescence-associated protein 15 [Hemerocallis
  misc_feature (1)..(511): Homolog of NCBI NO: 4091810 NR Description: fatty acid elongase 3-ketoacyl-CoA synthase 1
  misc_feature (1)..(511): Homolog of NCBI NO: 22329274 NR Description: fatty acid elongase 3-ketoacyl-CoA synthase 1
MAFRDSSSAVIRIRRRLPDLLTSVKLKYVKLGLHNSCNVTTILFFLIILPLTGTVLVQLTGLTFDTFSELWSNQAVQLDTATRLTCLVFLSFVLTLYVANRSKPVYLVDFSCYKPEDERKISVDSFLTMTEENGSFTDDTVQFQQRISNRAGLGDETYLPRGITSTPPKLNMSEARAEAEAVMFGALDSLFEKTGIKPAEVGILIVNCSLFNPTPSLSAMIVNHYKMREDIKSYNLGGMGCSAGLISIDLANNLLKANPNSYAVVVSTENITLNWYFGNDRSMLLCNCIFRMGGAAILLSNRRQDRKKSKYSLVNVVRTHKGSDDKNYNCVYQKEDERGTIGVSLARELMSVAGDALKTNITTLGPMVLPLSEQLMFLISLVKRKMFKLKVKPYIPDFKLAFEHFCIHAGGRAVLDEVQKNLDLKDWHMEPSRMTLHRFGNTSSSSLWYEMAYTEAKGRVKAGDRLWQIAFGSGFKCNSAVWKALRPVSTEEMTGNAWAGSIDQYPVKVVQ

SEQ ID NO: 45028 - DNA, 1755 bp, Arabidopsis thaliana
  misc_feature (1)..(1755): Ceres Seq. ID no. 12559214
  misc_feature: MA Experiment ID: 20000227 Result: Down-regulated in Transcription
  misc_feature: MA Experiment 20000227 PARAMETER Experiment Name: At_Root-Tips-vs-Tops_P Parameter: Tissue Value: Root Tips vs. Root Tops
  misc_feature: MA Experiment ID: 20000439 Result: Up-regulated in Transcription
  misc_feature: MA Experiment 20000439 PARAMETER Experiment Name: At_Roots__P Parameter: Age (day) Value: 14 vs. 21
  misc_feature: MA Experiment 20000439 PARAMETER Experiment Name: At_Roots__P Parameter: Organism Value: A. thaliana
  misc_feature: MA Experiment 20000439 PARAMETER Experiment Name: At_Roots__P Parameter: Tissue Value: Roots vs. Whole Plant
  misc_feature: MA Experiment ID: 20000794 Result: Up-regulated in Transcription
  misc_feature: MA Experiment 20000794 PARAMETER Experiment Name: At_Petals_P Parameter: Age (day) Value: 23-25 days
  misc_feature: MA Experiment 20000794 PARAMETER Experiment Name: At_Petals_P Parameter: Plant Line Value: WS
  misc_feature: MA Experiment 20000794 PARAMETER Experiment Name: At_Petals_P Parameter: Tissue Value: Petals vs. Whole plant
gagaaagagtctctgttctgatttgtcagtggaaaaagagaaagagaagtgggacccatctccgccatagccaaagacctctttctctcccacctcatacctctctactctctgcccatcattgcccccgacgaaactctctctctctcgctctctctctaaaaagagaaacaaacatttctttagtgtctctctctttcatcatctctttaccttttgcttcttcgaaaaaaaaagagaaataaattctaagaagagaaattgagagcttggtttttctttattggcatgaatttgtaacttaccagagataataaagttagggttcttttttttcgttcttataaatatagtaatctttctatttttaagtgtgtgtgtgagtgttgtttgggaataatgggtaactgttggtgtagatttgagcccttaaaccacagagtttctgcaaacgctaaatcagagtcaccaaaagaacagagtccaacagtagaagataaacatattaaggaagttcaaaagctgccatcaaatccaaaagaagtagaagatctaagacgtgactcagcagcgaatcctcttatagctttcacatacgaagagcttaagaacattacaagtaattttagacaagacagagttcttggtggtggtggatttggaagtgtctacaaagggtttataaaagaggatttgggtgatcaagaagttcctgaaccacttcctgttgccgttaaagttcatgatggtgataatagctttcagggtcacagagaatggctggcagaggtgatattcttggggcagctttcacatccaaacttagtgaaattgatcggttattgctgtgaggataatcaccgagtgctaatctatgagtacatggctcgtggtagcgtggagaacaatcttttctcaagagtgttgcttcctctttcatgggcaataagaatgaagattgctttcggagctgcgaaaggacttgcctttcttcatgaagcaaagaaacccgtcatttatcgcgatttcaaaacttcgaacattcttctagatatggattacaacgccaaattatctgattttggacttgctaaagacggtcctgtaggagataaatcccatgtttccactcgtataatgggaacttatggctatgcagctcctgaatacatcatgacagggcatttgacaccggggagtgatgtgtatagtttcggtgtagttctgttagagcttcttacgggaagaaaatcattagacaaatcacggccaacacgtgagcaaaacctcatagattgggctcttccattgttgaaggagaagaagaaagtcttgaacattgtagacccaaaaatgaactgtgagtatccggttaaagcggttcaaaaggctgcaatgttagcttaccattgcctgaaccgtaacccgaaggctcggcctttaatgcgtgacattgttgattctttggagcctcttcaggccacagaagaggaggctttactagtccctcctgttcagaaagcagtaattactattatcgacgaaatgcctaagaatggattgaagaaagttgaagaattgaagaaggttgaagaagtgaagaaggttattgaagatgcatgctaattcacattgtaattgatcacttttttttttttttttaatcttcttaatatacagtttgaaaaagtgataactagattgtgttattttgtattttgaaatacagattaagaaacagatacaaaggtttgt

SEQ ID NO: 45029 - protein, 408 aa, Arabidopsis thaliana
  peptide (1)..(408): Ceres Seq. ID no. 12559215
  misc_feature (76)..(356): Pfam Name: Protein kinase domain Pfam Description: Protein kinase domain
  misc_feature (56)..(366): Homolog of NCBI NO: 34898434 NR Description: ESTs C98382(C2985),D22444(C11129) correspond to a of the predicted gene.~Similar to Arabidopsis thaliana APK1 gene
  misc_feature (42)..(360): Homolog of NCBI NO: 25287636 NR Description: probable protein kinase [imported] - Arabidopsis
  misc_feature (42)..(360): Homolog of NCBI NO: 22325532 NR Description: putative protein kinase
  misc_feature (25)..(366): Homolog of NCBI NO: 28804505 NR Description: serine/threonine protein kinase [Aster tripolium]
  misc_feature (50)..(360): Homolog of NCBI NO: 30013675 NR Description: Avr9/Cf-9 rapidly elicited protein 264 [Nicotiana
  misc_feature (1)..(370): Homolog of NCBI NO: 9542860 NR Description: protein kinase-like protein [Arabidopsis thaliana]
  misc_feature (1)..(370): Homolog of NCBI NO: 30679085 NR Description: protein kinase family [Arabidopsis thaliana]
  misc_feature (52)..(364): Homolog of NCBI NO: 37534628 NR Description: putative protein kinase [Oryza sativa (japonica
  misc_feature (27)..(365): Homolog of NCBI NO: 22773239 NR Description: Putative protein kinase [Oryza sativa (japonica
  misc_feature (1)..(408): Homolog of NCBI NO: 15241220 NR Description: protein kinase-like protein; protein id:
MGNCWCRFEPLNHRVSANAKSESPKEQSPTVEDKHIKEVQKLPSNPKEVEDLRRDSAANPLIAFTYEELKNITSNFRQDRVLGGGGFGSVYKGFIKEDLGDQEVPEPLPVAVKVHDGDNSFQGHREWLAEVIFLGQLSHPNLVKLIGYCCEDNHRVLIYEYMARGSVENNLFSRVLLPLSWAIRMKIAFGAAKGLAFLHEAKKPVIYRDFKTSNILLDMDYNAKLSDFGLAKDGPVGDKSHVSTRIMGTYGYAAPEYIMTGHLTPGSDVYSFGVVLLELLTGRKSLDKSRPTREQNLIDWALPLLKEKKKVLNIVDPKMNCEYPVKAVQKAAMLAYHCLNRNPKARPLMRDIVDSLEPLQATEEEALLVPPVQKAVITIIDEMPKNGLKKVEELKKVEEVKKVIEDAC

SEQ ID NO: 45030 - protein, 247 aa, Arabidopsis thaliana
  peptide (1)..(247): Ceres Seq. ID no. 12559216
  misc_feature (1)..(195): Pfam Name: Protein kinase domain Pfam Description: Protein kinase domain
  misc_feature (1)..(205): Homolog of NCBI NO: 34898434 NR Description: ESTs C98382(C2985),D22444(C11129) correspond to a of the predicted gene.~Similar to Arabidopsis thaliana APK1 gene
  misc_feature (1)..(199): Homolog of NCBI NO: 25287636 NR Description: probable protein kinase [imported] - Arabidopsis
  misc_feature (1)..(199): Homolog of NCBI NO: 22325532 NR Description: putative protein kinase
  misc_feature (1)..(205): Homolog of NCBI NO: 28804505 NR Description: serine/threonine protein kinase [Aster tripolium]
  misc_feature (1)..(199): Homolog of NCBI NO: 30013675 NR Description: Avr9/Cf-9 rapidly elicited protein 264 [Nicotiana
  misc_feature (1)..(209): Homolog of NCBI NO: 9542860 NR Description: protein kinase-like protein [Arabidopsis thaliana]
  misc_feature (1)..(209): Homolog of NCBI NO: 30679085 NR Description: protein kinase family [Arabidopsis thaliana]
  misc_feature (1)..(203): Homolog of NCBI NO: 37534628 NR Description: putative protein kinase [Oryza sativa (japonica
  misc_feature (1)..(204): Homolog of NCBI NO: 22773239 NR Description: Putative protein kinase [Oryza sativa (japonica
  misc_feature (1)..(247): Homolog of NCBI NO: 15241220 NR Description: protein kinase-like protein; protein id:
MARGSVENNLFSRVLLPLSWAIRMKIAFGAAKGLAFLHEAKKPVIYRDFKTSNILLDMDYNAKLSDFGLAKDGPVGDKSHVSTRIMGTYGYAAPEYIMTGHLTPGSDVYSFGVVLLELLTGRKSLDKSRPTREQNLIDWALPLLKEKKKVLNIVDPKMNCEYPVKAVQKAAMLAYHCLNRNPKARPLMRDIVDSLEPLQATEEEALLVPPVQKAVITIIDEMPKNGLKKVEELKKVEEVKKVIEDAC

SEQ ID NO: 45031 - protein, 224 aa, Arabidopsis thaliana
  peptide (1)..(224): Ceres Seq. ID no. 12559217
  misc_feature (1)..(172): Pfam Name: Protein kinase domain Pfam Description: Protein kinase domain
  misc_feature (1)..(182): Homolog of NCBI NO: 34898434 NR Description: ESTs C98382(C2985),D22444(C11129) correspond to a of the predicted gene.~Similar to Arabidopsis thaliana APK1 gene
  misc_feature (1)..(176): Homolog of NCBI NO: 25287636 NR Description: probable protein kinase [imported] - Arabidopsis
  misc_feature (1)..(176): Homolog of NCBI NO: 22325532 NR Description: putative protein kinase
  misc_feature (1)..(182): Homolog of NCBI NO: 28804505 NR Description: serine/threonine protein kinase [Aster tripolium]
  misc_feature (1)..(176): Homolog of NCBI NO: 30013675 NR Description: Avr9/Cf-9 rapidly elicited protein 264 [Nicotiana
  misc_feature (1)..(186): Homolog of NCBI NO: 9542860 NR Description: protein kinase-like protein [Arabidopsis thaliana]
  misc_feature (1)..(186): Homolog of NCBI NO: 30679085 NR Description: protein kinase family [Arabidopsis thaliana]
  misc_feature (1)..(180): Homolog of NCBI NO: 37534628 NR Description: putative protein kinase [Oryza sativa (japonica
  misc_feature (1)..(181): Homolog of NCBI NO: 22773239 NR Description: Putative protein kinase [Oryza sativa (japonica
  misc_feature (1)..(224): Homolog of NCBI NO: 15241220 NR Description: protein kinase-like protein; protein id:
MKIAFGAAKGLAFLHEAKKPVIYRDFKTSNILLDMDYNAKLSDFGLAKDGPVGDKSHVSTRIMGTYGYAAPEYIMTGHLTPGSDVYSFGVVLLELLTGRKSLDKSRPTREQNLIDWALPLLKEKKKVLNIVDPKMNCEYPVKAVQKAAMLAYHCLNRNPKARPLMRDIVDSLEPLQATEEEALLVPPVQKAVITIIDEMPKNGLKKVEELKKVEEVKKVIEDAC

SEQ ID NO: 45032 - DNA, 1608 bp, Arabidopsis thaliana
  misc_feature (1)..(1608): Ceres Seq. ID no. 12559218
  misc_feature: MA Experiment ID: 20000171 Result: Down-regulated in Transcription
  misc_feature: MA Experiment 20000171 PARAMETER Experiment Name: At_42deg_Heat_P Parameter: Age (day) Value: 14
  misc_feature: MA Experiment 20000171 PARAMETER Experiment Name: At_42deg_Heat_P Parameter: Organism Value: A. thaliana
  misc_feature: MA Experiment 20000171 PARAMETER Experiment Name: At_42deg_Heat_P Parameter: Plant Line Value: WS
  misc_feature: MA Experiment 20000171 PARAMETER Experiment Name: At_42deg_Heat_P Parameter: Temperature (deg C) Value: 42 vs. 22
  misc_feature: MA Experiment 20000171 PARAMETER Experiment Name: At_42deg_Heat_P Parameter: Timepoint (hr) Value: 1
  misc_feature: MA Experiment 20000171 PARAMETER Experiment Name: At_42deg_Heat_P Parameter: Tissue Value: Aerial
  misc_feature: MA Experiment ID: 20000173 Result: Down-regulated in Transcription
  misc_feature: MA Experiment 20000173 PARAMETER Experiment Name: At_42deg_Heat_P Parameter: Age (day) Value: 14
  misc_feature: MA Experiment 20000173 PARAMETER Experiment Name: At_42deg_Heat_P Parameter: Organism Value: A. thaliana
  misc_feature: MA Experiment 20000173 PARAMETER Experiment Name: At_42deg_Heat_P Parameter: Plant Line Value: WS
  misc_feature: MA Experiment 20000173 PARAMETER Experiment Name: At_42deg_Heat_P Parameter: Temperature (deg C) Value: 42 vs. 22
  misc_feature: MA Experiment 20000173 PARAMETER Experiment Name: At_42deg_Heat_P Parameter: Timepoint (hr) Value: 6
  misc_feature: MA Experiment 20000173 PARAMETER Experiment Name: At_42deg_Heat_P Parameter: Tissue Value: Aerial
  misc_feature: MA Experiment ID: 20000179 Result: Up-regulated in Transcription
  misc_feature: MA Experiment 20000179 PARAMETER Experiment Name: At_Germinating_Seeds_P Parameter: Age (hr) Value: 6 vs. 0
  misc_feature: MA Experiment 20000179 PARAMETER Experiment Name: At_Germinating_Seeds_P Parameter: Tissue Value: Germinating Seeds
  misc_feature: MA Experiment ID: 20000180 Result: Up-regulated in Transcription
  misc_feature: MA Experiment 20000180 PARAMETER Experiment Name: At_Germinating_Seeds_P Parameter: Age (hr) Value: 24 vs. 0
  misc_feature: MA Experiment 20000180 PARAMETER Experiment Name: At_Germinating_Seeds_P Parameter: Tissue Value: Germinating Seeds
  misc_feature: MA Experiment ID: 20000227 Result: Down-regulated in Transcription
  misc_feature: MA Experiment 20000227 PARAMETER Experiment Name: At_Root-Tips-vs-Tops_P Parameter: Tissue Value: Root Tips vs. Root Tops
  misc_feature: MA Experiment ID: 20000439 Result: Up-regulated in Transcription
  misc_feature: MA Experiment 20000439 PARAMETER Experiment Name: At_Roots__P Parameter: Age (day) Value: 14 vs. 21
  misc_feature: MA Experiment 20000439 PARAMETER Experiment Name: At_Roots__P Parameter: Organism Value: A. thaliana
  misc_feature: MA Experiment 20000439 PARAMETER Experiment Name: At_Roots__P Parameter: Tissue Value: Roots vs. Whole Plant
  misc_feature: MA Experiment ID: 20000452 Result: Up-regulated in Transcription
  misc_feature: MA Experiment 20000452 PARAMETER Experiment Name: At_CS6879_Shoots-Roots_P Parameter: Age (day) Value: 14
  misc_feature: MA Experiment 20000452 PARAMETER Experiment Name: At_CS6879_Shoots-Roots_P Parameter: Organism Value: A. thaliana
  misc_feature: MA Experiment 20000452 PARAMETER Experiment Name: At_CS6879_Shoots-Roots_P Parameter: Plant Line Value: CS6879 vs. WS
  misc_feature: MA Experiment 20000452 PARAMETER Experiment Name: At_CS6879_Shoots-Roots_P Parameter: Tissue Value: Shoots
  misc_feature: MA Experiment ID: 20000573 Result: Down-regulated in Transcription
  misc_feature: MA Experiment 20000573 PARAMETER Experiment Name: At_100uM_ABA_Mutants__P Parameter: Organism Value: A. thaliana
  misc_feature: MA Experiment 20000573 PARAMETER Experiment Name: At_100uM_ABA_Mutants__P Parameter: Plant Line Value: CS22 vs. Ler wt
  misc_feature: MA Experiment 20000573 PARAMETER Experiment Name: At_100uM_ABA_Mutants__P Parameter: Timepoint (hr) Value: N/A
  misc_feature: MA Experiment 20000573 PARAMETER Experiment Name: At_100uM_ABA_Mutants__P Parameter: Tissue Value: Whole Plant
  misc_feature: MA Experiment 20000573 PARAMETER Experiment Name: At_100uM_ABA_Mutants__P Parameter: Treatment Value: None
  misc_feature: MA Experiment ID: 20000574 Result: Down-regulated in Transcription
  misc_feature: MA Experiment 20000574 PARAMETER Experiment Name: At_100uM_ABA_Mutants__P Parameter: Organism Value: A. thaliana
  misc_feature: MA Experiment 20000574 PARAMETER Experiment Name: At_100uM_ABA_Mutants__P Parameter: Plant Line Value: CS23 vs. Ler wt
  misc_feature: MA Experiment 20000574 PARAMETER Experiment Name: At_100uM_ABA_Mutants__P Parameter: Timepoint (hr) Value: N/A
  misc_feature: MA Experiment 20000574 PARAMETER Experiment Name: At_100uM_ABA_Mutants__P Parameter: Tissue Value: Whole Plant
  misc_feature: MA Experiment 20000574 PARAMETER Experiment Name: At_100uM_ABA_Mutants__P Parameter: Treatment Value: None
  misc_feature: MA Experiment ID: 20001247 Result: Down-regulated in Transcription
  misc_feature: MA Experiment 20001247 PARAMETER Experiment Name: At_Far-red-induction_P Parameter: Age (day) Value: 7
  misc_feature: MA Experiment 20001247 PARAMETER Experiment Name: At_Far-red-induction_P Parameter: Light Value: Far-red vs. White
  misc_feature: MA Experiment 20001247 PARAMETER Experiment Name: At_Far-red-induction_P Parameter: Organism Value: A. thaliana
  misc_feature: MA Experiment 20001247 PARAMETER Experiment Name: At_Far-red-induction_P Parameter: Plant Line Value: Columbia
  misc_feature: MA Experiment 20001247 PARAMETER Experiment Name: At_Far-red-induction_P Parameter: Timepoint (hr) Value: 1
  misc_feature: MA Experiment 20001247 PARAMETER Experiment Name: At_Far-red-induction_P Parameter: Tissue Value: Whole Plant
  misc_feature: MA Experiment ID: 20001248 Result: Down-regulated in Transcription
  misc_feature: MA Experiment 20001248 PARAMETER Experiment Name: At_Far-red-induction_P Parameter: Age (day) Value: 7
  misc_feature: MA Experiment 20001248 PARAMETER Experiment Name: At_Far-red-induction_P Parameter: Light Value: Far-red vs. White
  misc_feature: MA Experiment 20001248 PARAMETER Experiment Name: At_Far-red-induction_P Parameter: Organism Value: A. thaliana
  misc_feature: MA Experiment 20001248 PARAMETER Experiment Name: At_Far-red-induction_P Parameter: Plant Line Value: Columbia
  misc_feature: MA Experiment 20001248 PARAMETER Experiment Name: At_Far-red-induction_P Parameter: Timepoint (hr) Value: 4
  misc_feature: MA Experiment 20001248 PARAMETER Experiment Name: At_Far-red-induction_P Parameter: Tissue Value: Whole Plant
  misc_feature: MA Experiment ID: 20001450 Result: Down-regulated in Transcription
  misc_feature: MA Experiment 20001450 PARAMETER Experiment Name: At_Far-red-induction_P Parameter: Age (day) Value: 7
  misc_feature: MA Experiment 20001450 PARAMETER Experiment Name: At_Far-red-induction_P Parameter: Light Value: Far-red vs. White
  misc_feature: MA Experiment 20001450 PARAMETER Experiment Name: At_Far-red-induction_P Parameter: Organism Value: A. thaliana
  misc_feature: MA Experiment 20001450 PARAMETER Experiment Name: At_Far-red-induction_P Parameter: Plant Line Value: Columbia
  misc_feature: MA Experiment 20001450 PARAMETER Experiment Name: At_Far-red-induction_P Parameter: Timepoint (hr) Value: 8
  misc_feature: MA Experiment 20001450 PARAMETER Experiment Name: At_Far-red-induction_P Parameter: Tissue Value: Whole Plant
atggagattttgagatttttgctttctctctttatatattttcttttgttgaatctttctctttcacattttccttcgatttcagctcaaaggactaaccatgaaaacttcctcaagtgtctctctcaccgaatcaacgaggacgactcaagaatcatacacacatcaaaagatccttcgtatttctcaatcttgaattcttccatacaaaatccaagattctttgttctcgaaacacctaaaccggtttcaatcatcactccggttcaagccaccgatgttcaatctacgattaaatgcgcacggcttcacggtatacacatcaggactaggagtggtggtcatgactacgaaggtttatcttacatggctaaaagcagaccgttcgttgtcattgatttgagaaatctccggtctattacattagatgttgataaccggaccggttgggttcaatccggagctacaattggggaattgtactatgagattggaaaattaagcaaatctttggcctttccggccggtctttatccaaccgttggcatcggagggcaattcggaggtggtgggtacggtacgttgatgagaaaatacggtttatcggcggacaatgtaattgatgcacatattgttgacgcgaatggaagctttcttgaccgacaaggcatgggtgaagatttcttttgggctatccgtggaggcggaggatcaagcttctctgttgtcctgtcatggaagattagattgcttgatgttccgtcggtagtaacggtctttaaagtcgtgaaaacatcggaaaaagaggctgtctcgatcatcaacaagtggcagtatattgcggataaggttcctaatgatcttttcatcagagctatgctacagaaggaaaccgaggtttatgcttcgttcccgggactttatctcggtccggtaagcgatctattagcattgatgaaagataagtttccggaattaggtcttgagattggaaattgtagagaaatgagttggattgagtctgttctctggtttataaaaggagaatcaatggaaattcttgcgaaacggaaacgaacgtcaagatctttcaagggaaaagatgatttcatcgaagaaccgatacctaaaaccgcgattcagtatctttggagacgattcgaggcgcccgaggctcggcttgcaaagatcatactcactccatttggtggcaaaatgagtgaaattgcggataacgaaataccattcccacatagagaaggtaatctttatgagattcaatatttagcttattggagtgaagaagaagataagaacaagactaatactgaaaagtatttgagatgggtcgagagtgtatacgaatttatgactccttatgtttcaaaatctccacgaagagcttatgttaattttagagacattgatttgggaatgtatcttgggttgaatatgaagacaaagtacgaggaagcaaaggtttggggagtgaagtatttcaagaacaatttcgatagattggtgagagttaaaacaaatgttgatccaatggatttcttctgtgatgaacaaagtataccaattatgaaatatgttaatgatatttga

SEQ ID NO: 45033 - protein, 535 aa, Arabidopsis thaliana
  peptide (1)..(535): Ceres Seq. ID no. 12559219
  misc_feature (82)..(238): Pfam Name: FAD binding domain Pfam Description: FAD binding domain
  misc_feature (10)..(527): Homolog of NCBI NO: 15233424 NR Description: FAD-linked oxidoreductase family
  misc_feature (28)..(531): Homolog of NCBI NO: 15241476 NR Description: FAD-linked oxidoreductase family
  misc_feature (6)..(527): Homolog of NCBI NO: 15241474 NR Description: FAD-linked oxidoreductase family; protein id:
  misc_feature (8)..(529): Homolog of NCBI NO: 15241478 NR Description: FAD-linked oxidoreductase family
  misc_feature (8)..(529): Homolog of NCBI NO: 16648925 NR Description: berberine bridge enzyme-like protein [Arabidopsis
  misc_feature (4)..(529): Homolog of NCBI NO: 13161397 NR Description: CPRD2 [Vigna unguiculata]
  misc_feature (1)..(535): Homolog of NCBI NO: 15233411 NR Description: FAD-linked oxidoreductase family; protein id:
  misc_feature (46)..(532): Homolog of NCBI NO: 28058799 NR Description: berberine bridge enzyme-like protein [Arabidopsis
  misc_feature (9)..(532): Homolog of NCBI NO: 15241498 NR Description: FAD-linked oxidoreductase family; protein id:
  misc_feature (1)..(535): Homolog of NCBI NO: 15241495 NR Description: FAD-linked oxidoreductase family; protein id:
MEILRFLLSLFIYFLLLNLSLSHFPSISAQRTNHENFLKCLSHRINEDDSRIIHTSKDPSYFSILNSSIQNPRFFVLETPKPVSIITPVQATDVQSTIKCARLHGIHIRTRSGGHDYEGLSYMAKSRPFVVIDLRNLRSITLDVDNRTGWVQSGATIGELYYEIGKLSKSLAFPAGLYPTVGIGGQFGGGGYGTLMRKYGLSADNVIDAHIVDANGSFLDRQGMGEDFFWAIRGGGGSSFSVVLSWKIRLLDVPSVVTVFKVVKTSEKEAVSIINKWQYIADKVPNDLFIRAMLQKETEVYASFPGLYLGPVSDLLALMKDKFPELGLEIGNCREMSWIESVLWFIKGESMEILAKRKRTSRSFKGKDDFIEEPIPKTAIQYLWRRFEAPEARLAKIILTPFGGKMSEIADNEIPFPHREGNLYEIQYLAYWSEEEDKNKTNTEKYLRWVESVYEFMTPYVSKSPRRAYVNFRDIDLGMYLGLNMKTKYEEAKVWGVKYFKNNFDRLVRVKTNVDPMDFFCDEQSIPIMKYVNDI

SEQ ID NO: 45034 - protein, 413 aa, Arabidopsis thaliana
  peptide (1)..(413): Ceres Seq. ID no. 12559220
  misc_feature (1)..(116): Pfam Name: FAD binding domain Pfam Description: FAD binding domain
  misc_feature (1)..(405): Homolog of NCBI NO: 15233424 NR Description: FAD-linked oxidoreductase family
  misc_feature (1)..(409): Homolog of NCBI NO: 15241476 NR Description: FAD-linked oxidoreductase family
  misc_feature (1)..(405): Homolog of NCBI NO: 15241474 NR Description: FAD-linked oxidoreductase family; protein id:
  misc_feature (1)..(407): Homolog of NCBI NO: 15241478 NR Description: FAD-linked oxidoreductase family
  misc_feature (1)..(407): Homolog of NCBI NO: 16648925 NR Description: berberine bridge enzyme-like protein [Arabidopsis
  misc_feature (1)..(407): Homolog of NCBI NO: 13161397 NR Description: CPRD2 [Vigna unguiculata]
  misc_feature (1)..(413): Homolog of NCBI NO: 15233411 NR Description: FAD-linked oxidoreductase family; protein id:
  misc_feature (1)..(410): Homolog of NCBI NO: 28058799 NR Description: berberine bridge enzyme-like protein [Arabidopsis
  misc_feature (1)..(410): Homolog of NCBI NO: 15241498 NR Description: FAD-linked oxidoreductase family; protein id:
  misc_feature (1)..(413): Homolog of NCBI NO: 15241495 NR Description: FAD-linked oxidoreductase family; protein id:
MAKSRPFVVIDLRNLRSITLDVDNRTGWVQSGATIGELYYEIGKLSKSLAFPAGLYPTVGIGGQFGGGGYGTLMRKYGLSADNVIDAHIVDANGSFLDRQGMGEDFFWAIRGGGGSSFSVVLSWKIRLLDVPSVVTVFKVVKTSEKEAVSIINKWQYIADKVPNDLFIRAMLQKETEVYASFPGLYLGPVSDLLALMKDKFPELGLEIGNCREMSWIESVLWFIKGESMEILAKRKRTSRSFKGKDDFIEEPIPKTAIQYLWRRFEAPEARLAKIILTPFGGKMSEIADNEIPFPHREGNLYEIQYLAYWSEEEDKNKTNTEKYLRWVESVYEFMTPYVSKSPRRAYVNFRDIDLGMYLGLNMKTKYEEAKVWGVKYFKNNFDRLVRVKTNVDPMDFFCDEQSIPIMKYVNDI

SEQ ID NO: 45035 - protein, 340 aa, Arabidopsis thaliana
  peptide (1)..(340): Ceres Seq. ID no. 12559221
  misc_feature (1)..(332): Homolog of NCBI NO: 15233424 NR Description: FAD-linked oxidoreductase family
  misc_feature (1)..(336): Homolog of NCBI NO: 15241476 NR Description: FAD-linked oxidoreductase family
  misc_feature (1)..(332): Homolog of NCBI NO: 15241474 NR Description: FAD-linked oxidoreductase family; protein id:
  misc_feature (1)..(334): Homolog of NCBI NO: 15241478 NR Description: FAD-linked oxidoreductase family
  misc_feature (1)..(334): Homolog of NCBI NO: 16648925 NR Description: berberine bridge enzyme-like protein [Arabidopsis
  misc_feature (1)..(334): Homolog of NCBI NO: 13161397 NR Description: CPRD2 [Vigna unguiculata]
  misc_feature (1)..(340): Homolog of NCBI NO: 15233411 NR Description: FAD-linked oxidoreductase family; protein id:
  misc_feature (1)..(337): Homolog of NCBI NO: 28058799 NR Description: berberine bridge enzyme-like protein [Arabidopsis
  misc_feature (1)..(337): Homolog of NCBI NO: 15241498 NR Description: FAD-linked oxidoreductase family; protein id:
  misc_feature (1)..(340): Homolog of NCBI NO: 15241495 NR Description: FAD-linked oxidoreductase family; protein id:
MRKYGLSADNVIDAHIVDANGSFLDRQGMGEDFFWAIRGGGGSSFSVVLSWKIRLLDVPSVVTVFKVVKTSEKEAVSIINKWQYIADKVPNDLFIRAMLQKETEVYASFPGLYLGPVSDLLALMKDKFPELGLEIGNCREMSWIESVLWFIKGESMEILAKRKRTSRSFKGKDDFIEEPIPKTAIQYLWRRFEAPEARLAKIILTPFGGKMSEIADNEIPFPHREGNLYEIQYLAYWSEEEDKNKTNTEKYLRWVESVYEFMTPYVSKSPRRAYVNFRDIDLGMYLGLNMKTKYEEAKVWGVKYFKNNFDRLVRVKTNVDPMDFFCDEQSIPIMKYVNDI

SEQ ID NO: 45036 - DNA, 1727 bp, Arabidopsis thaliana
  misc_feature (1)..(1727): Ceres Seq. ID no. 12559281
  misc_feature: MA Experiment ID: 20000166 Result: Up-regulated in Transcription
  misc_feature: MA Experiment 20000166 PARAMETER Experiment Name: At_100uM_ABA_P Parameter: Age (day) Value: 14
  misc_feature: MA Experiment 20000166 PARAMETER Experiment Name: At_100uM_ABA_P Parameter: Organism Value: A. thaliana
  misc_feature: MA Experiment 20000166 PARAMETER Experiment Name: At_100uM_ABA_P Parameter: Plant Line Value: WS
  misc_feature: MA Experiment 20000166 PARAMETER Experiment Name: At_100uM_ABA_P Parameter: Timepoint (hr) Value: 1
  misc_feature: MA Experiment 20000166 PARAMETER Experiment Name: At_100uM_ABA_P Parameter: Tissue Value: Aerial
  misc_feature: MA Experiment 20000166 PARAMETER Experiment Name: At_100uM_ABA_P Parameter: Treatment Value: 100uM ABA vs. No Treatment
  misc_feature: MA Experiment ID: 20000179 Result: Down-regulated in Transcription
  misc_feature: MA Experiment 20000179 PARAMETER Experiment Name: At_Germinating_Seeds_P Parameter: Age (hr) Value: 6 vs. 0
  misc_feature: MA Experiment 20000179 PARAMETER Experiment Name: At_Germinating_Seeds_P Parameter: Tissue Value: Germinating Seeds
  misc_feature: MA Experiment ID: 20000264 Result: Up-regulated in Transcription
  misc_feature: MA Experiment 20000264 PARAMETER Experiment Name: At_Open_Flower_P Parameter: Age (day) Value: 21
  misc_feature: MA Experiment 20000264 PARAMETER Experiment Name: At_Open_Flower_P Parameter: Plant Line Value: WS
  misc_feature: MA Experiment 20000264 PARAMETER Experiment Name: At_Open_Flower_P Parameter: Tissue Value: Open Flower vs. Whole Plant
  misc_feature: MA Experiment ID: 20000265 Result: Up-regulated in Transcription
  misc_feature: MA Experiment 20000265 PARAMETER Experiment Name: At_Open_Flower_P Parameter: Age (day) Value: 21
  misc_feature: MA Experiment 20000265 PARAMETER Experiment Name: At_Open_Flower_P Parameter: Plant Line Value: WS
  misc_feature: MA Experiment 20000265 PARAMETER Experiment Name: At_Open_Flower_P Parameter: Tissue Value: Closed Flower vs. Whole Plant
  misc_feature: MA Experiment ID: 20000286 Result: Up-regulated in Transcription
  misc_feature: MA Experiment 20000286 PARAMETER Experiment Name: At_Open_Flower_P Parameter: Age (day) Value: 21
  misc_feature: MA Experiment 20000286 PARAMETER Experiment Name: At_Open_Flower_P Parameter: Plant Line Value: WS
  misc_feature: MA Experiment 20000286 PARAMETER Experiment Name: At_Open_Flower_P Parameter: Tissue Value: Half Open vs. Whole Plant
  misc_feature: MA Experiment ID: 20000438 Result: Up-regulated in Transcription
  misc_feature: MA Experiment 20000438 PARAMETER Experiment Name: At_Shoots__P Parameter: Age (day) Value: 14
  misc_feature: MA Experiment 20000438 PARAMETER Experiment Name: At_Shoots__P Parameter: Tissue Value: Shoots vs. Whole Plant
  misc_feature: MA Experiment ID: 20001248 Result: Down-regulated in Transcription
  misc_feature: MA Experiment 20001248 PARAMETER Experiment Name: At_Far-red-induction_P Parameter: Age (day) Value: 7
  misc_feature: MA Experiment 20001248 PARAMETER Experiment Name: At_Far-red-induction_P Parameter: Light Value: Far-red vs. White
  misc_feature: MA Experiment 20001248 PARAMETER Experiment Name: At_Far-red-induction_P Parameter: Organism Value: A. thaliana
  misc_feature: MA Experiment 20001248 PARAMETER Experiment Name: At_Far-red-induction_P Parameter: Plant Line Value: Columbia
  misc_feature: MA Experiment 20001248 PARAMETER Experiment Name: At_Far-red-induction_P Parameter: Timepoint (hr) Value: 4
  misc_feature: MA Experiment 20001248 PARAMETER Experiment Name: At_Far-red-induction_P Parameter: Tissue Value: Whole Plant
  misc_feature: MA Experiment ID: 20001558 Result: Up-regulated in Transcription
  misc_feature: MA Experiment 20001558 PARAMETER Experiment Name: At_Drought_Soil_Dry_P Parameter: Age (day) Value: 27
  misc_feature: MA Experiment 20001558 PARAMETER Experiment Name: At_Drought_Soil_Dry_P Parameter: Organism Value: A. thaliana
  misc_feature: MA Experiment 20001558 PARAMETER Experiment Name: At_Drought_Soil_Dry_P Parameter: Plant Line Value: WS
  misc_feature: MA Experiment 20001558 PARAMETER Experiment Name: At_Drought_Soil_Dry_P Parameter: Post Timepoint (hr) Value: 6
  misc_feature: MA Experiment 20001558 PARAMETER Experiment Name: At_Drought_Soil_Dry_P Parameter: Post-Treatment Value: Re-Water vs. No Drought
  misc_feature: MA Experiment 20001558 PARAMETER Experiment Name: At_Drought_Soil_Dry_P Parameter: Timepoint (day) Value: 13
  misc_feature: MA Experiment 20001558 PARAMETER Experiment Name: At_Drought_Soil_Dry_P Parameter: Treatment Value: Drought vs. No Drought
aatatcacaaactcgtttgctcttttcatcattactaaatcataagcggctctcaagttctttagggtttcgagttttctcaatctcctacctgattaaggttaatttcttatcttggatcaataacaagagaattataactccggattgtaatcaatattcctctacataaaaagcgtgaatgagattatgatggaatcgaaagctggtaataagaagtcaagcagcaatagttccttatgttacgaagcaccccttggttacagcattgaagacgttcgtcctttcggtggaatcaagaaattcaaatcttctgtctactccaactgcgctaagaggccttcctgagtactagccagttccctccatagcttttcaattacaacaatctccttttctcaaagctctggttccccaaatcctctcgtcttttgtttgccctcacaacaacaacaacaacgcagagatggccatgtctgctattggcttcgaaggttacgagaagcggcttgaagttactttctttgagcctggtctctttcttgacactcaaggaaaagggctacgtgctttagctaagtctcagatcgatgagattcttcagccagctgagtgcactatcgtctcatctctctcgaacgatcagcttgactcttatgttctctctgagtccagtctctttatcttcccgtacaagatcgtcatcaagacttgcggtactactaagctcctcctctctattgagcctctcttgaggttagccggtgagctttctcttgacgttaaggctgtgaggtacactcgtggaagtttcctctgtcctggaggacaaccattccctcaccgcaacttctctgaagaagtctctgttcttgatggtcactttgctaagcttggtttaagcagtgttgcctacttgatgggcaatgacgatgaaaccaagaaatggcatgtttactctgcttcttctgccaacagcaacaacaagaacaatgtctacacgcttgagatgtgtatgactggtctagacaaagacaaggcatctgtcttctacaagaacgagtcaagctctgctggttctatgactgataactctggcatcagaaagatactgcctcaatcccaaatctgtgactttgagtttgagccctgtggctactcaatgaacagcatcgaaggcgacgcaatctctaccatccatgtaactccagaggatggtttcagctacgctagctttgaagcagtgggatatgatttcacaaccatggacttgagccatcttgtctcaaaggtactaacttgcttcaaaccaaaacaattctctgtagctgtccactcgaccgtggcacagaagagctacgactctggtctctctgtggacctagacgattacggatgcaaagagtcaacaatggagtctctaggagaagagagaggaacagtgatgtatcagaggtttgagaagctaggaaggtattgtggttctccgagatctaccttgaaatgtgagtggagcagcaacagtagctgcaacagcgaggacgagaaggaatagggaatctaaaagctcaagtttttaattttcgttttcttgaataatgtcttatggatatttttcttcttcttcttatttcccttaaaccagtgtttgtgtctggtctatgtgaattcggatgatccaaatgttgaatataatggatcaagtatctattattatgatcattttc

SEQ ID NO: 45037 - protein, 362 aa, Arabidopsis thaliana
  peptide (1)..(362): Ceres Seq. ID no. 12559282
  misc_feature (3)..(335): Pfam Name: Adenosylmethionine decarboxylase Pfam Description: Adenosylmethionine decarboxylase
  misc_feature (3)..(335): Pfam Name: Adenosylmethionine decarboxylase Pfam Description: Adenosylmethionine decarboxylase
  misc_feature (1)..(362): Homolog of NCBI NO: 15213963 NR Description: S-adenosylmethionine decarboxylase proenzyme
  misc_feature (1)..(362): Homolog of NCBI NO: 3913415 NR Description: S-adenosylmethionine decarboxylase proenzyme 1
  misc_feature (1)..(362): Homolog of NCBI NO: 1490554 NR Description: S-adenosylmethionine decarboxylase [Arabidopsis
  misc_feature (1)..(362): Homolog of NCBI NO: 15213968 NR Description: S-adenosylmethionine decarboxylase proenzyme 3
  misc_feature (1)..(362): Homolog of NCBI NO: 1531763 NR Description: S-adenosylmethionine decarboxylase [Arabidopsis
  misc_feature (1)..(362): Homolog of NCBI NO: 15213963 NR Description: S-adenosylmethionine decarboxylase proenzyme
  misc_feature (1)..(362): Homolog of NCBI NO: 1490554 NR Description: S-adenosylmethionine decarboxylase [Arabidopsis
  misc_feature (1)..(362): Homolog of NCBI NO: 1531763 NR Description: S-adenosylmethionine decarboxylase [Arabidopsis
  misc_feature (1)..(362): Homolog of NCBI NO: 15237226 NR Description: S-adenosylmethionine decarboxylase (adoMetDC2)
  misc_feature (1)..(362): Homolog of NCBI NO: 38261497 NR Description: S-adenosyl-L-methionine decarboxylase [Brassica
  misc_feature (1)..(362): Homolog of NCBI NO: 3913410 NR Description: S-adenosylmethionine decarboxylase proenzyme 2
  misc_feature (1)..(362): Homolog of NCBI NO: 15232910 NR Description: S-adenosylmethionine decarboxylase
  misc_feature (1)..(362): Homolog of NCBI NO: 15809836 NR Description: AT3g02470/F16B3_10 [Arabidopsis thaliana]
  misc_feature (1)..(362): Homolog of NCBI NO: 15213968 NR Description: S-adenosylmethionine decarboxylase proenzyme 3
  misc_feature (1)..(362): Homolog of NCBI NO: 3913415 NR Description: S-adenosylmethionine decarboxylase proenzyme 1
  misc_feature (1)..(362): Homolog of NCBI NO: 15809836 NR Description: AT3g02470/F16B3_10 [Arabidopsis thaliana]
  misc_feature (1)..(362): Homolog of NCBI NO: 15232910 NR Description: S-adenosylmethionine decarboxylase
  misc_feature (1)..(362): Homolog of NCBI NO: 3913410 NR Description: S-adenosylmethionine decarboxylase proenzyme 2
  misc_feature (1)..(362): Homolog of NCBI NO: 38261497 NR Description: S-adenosyl-L-methionine decarboxylase [Brassica
  misc_feature (1)..(362): Homolog of NCBI NO: 15237226 NR Description: S-adenosylmethionine decarboxylase (adoMetDC2)
MAMSAIGFEGYEKRLEVTFFEPGLFLDTQGKGLRALAKSQIDEILQPAECTIVSSLSNDQLDSYVLSESSLFIFPYKIVIKTCGTTKLLLSIEPLLRLAGELSLDVKAVRYTRGSFLCPGGQPFPHRNFSEEVSVLDGHFAKLGLSSVAYLMGNDDETKKWHVYSASSANSNNKNNVYTLEMCMTGLDKDKASVFYKNESSSAGSMTDNSGIRKILPQSQICDFEFEPCGYSMNSIEGDAISTIHVTPEDGFSYASFEAVGYDFTTMDLSHLVSKVLTCFKPKQFSVAVHSTVAQKSYDSGLSVDLDDYGCKESTMESLGEERGTVMYQRFEKLGRYCGSPRSTLKCEWSSNSSCNSEDEKE

SEQ ID NO: 45038 - protein, 360 aa, Arabidopsis thaliana
  peptide (1)..(360): Ceres Seq. ID no. 12559283
  misc_feature (1)..(333): Pfam Name: Adenosylmethionine decarboxylase Pfam Description: Adenosylmethionine decarboxylase
  misc_feature (1)..(333): Pfam Name: Adenosylmethionine decarboxylase Pfam Description: Adenosylmethionine decarboxylase
  misc_feature (1)..(360): Homolog of NCBI NO: 15213963 NR Description: S-adenosylmethionine decarboxylase proenzyme
  misc_feature (1)..(360): Homolog of NCBI NO: 3913415 NR Description: S-adenosylmethionine decarboxylase proenzyme 1
  misc_feature (1)..(360): Homolog of NCBI NO: 1490554 NR Description: S-adenosylmethionine decarboxylase [Arabidopsis
  misc_feature (1)..(360): Homolog of NCBI NO: 15213968 NR Description: S-adenosylmethionine decarboxylase proenzyme 3
  misc_feature (1)..(360): Homolog of NCBI NO: 1531763 NR Description: S-adenosylmethionine decarboxylase [Arabidopsis
  misc_feature (1)..(360): Homolog of NCBI NO: 15213963 NR Description: S-adenosylmethionine decarboxylase proenzyme
  misc_feature (1)..(360): Homolog of NCBI NO: 1490554 NR Description: S-adenosylmethionine decarboxylase [Arabidopsis
  misc_feature (1)..(360): Homolog of NCBI NO: 1531763 NR Description: S-adenosylmethionine decarboxylase [Arabidopsis
  misc_feature (1)..(360): Homolog of NCBI NO: 15237226 NR Description: S-adenosylmethionine decarboxylase (adoMetDC2)
  misc_feature (1)..(360): Homolog of NCBI NO: 38261497 NR Description: S-adenosyl-L-methionine decarboxylase [Brassica
  misc_feature (1)..(360): Homolog of NCBI NO: 3913410 NR Description: S-adenosylmethionine decarboxylase proenzyme 2
  misc_feature (1)..(360): Homolog of NCBI NO: 15232910 NR Description: S-adenosylmethionine decarboxylase
  misc_feature (1)..(360): Homolog of NCBI NO: 15809836 NR Description: AT3g02470/F16B3_10 [Arabidopsis thaliana]
  misc_feature (1)..(360): Homolog of NCBI NO: 15213968 NR Description: S-adenosylmethionine decarboxylase proenzyme 3
  misc_feature (1)..(360): Homolog of NCBI NO: 3913415 NR Description: S-adenosylmethionine decarboxylase proenzyme 1
  misc_feature (1)..(360): Homolog of NCBI NO: 15809836 NR Description: AT3g02470/F16B3_10 [Arabidopsis thaliana]
  misc_feature (1)..(360): Homolog of NCBI NO: 15232910 NR Description: S-adenosylmethionine decarboxylase
  misc_feature (1)..(360): Homolog of NCBI NO: 3913410 NR Description: S-adenosylmethionine decarboxylase proenzyme 2
  misc_feature (1)..(360): Homolog of NCBI NO: 38261497 NR Description: S-adenosyl-L-methionine decarboxylase [Brassica
  misc_feature (1)..(360): Homolog of NCBI NO: 15237226 NR Description: S-adenosylmethionine decarboxylase (adoMetDC2)
MSAIGFEGYEKRLEVTFFEPGLFLDTQGKGLRALAKSQIDEILQPAECTIVSSLSNDQLDSYVLSESSLFIFPYKIVIKTCGTTKLLLSIEPLLRLAGELSLDVKAVRYTRGSFLCPGGQPFPHRNFSEEVSVLDGHFAKLGLSSVAYLMGNDDETKKWHVYSASSANSNNKNNVYTLEMCMTGLDKDKASVFYKNESSSAGSMTDNSGIRKILPQSQICDFEFEPCGYSMNSIEGDAISTIHVTPEDGFSYASFEAVGYDFTTMDLSHLVSKVLTCFKPKQFSVAVHSTVAQKSYDSGLSVDLDDYGCKESTMESLGEERGTVMYQRFEKLGRYCGSPRSTLKCEWSSNSSCNSEDEKE

SEQ ID NO: 45039 - protein, 211 aa, Arabidopsis thaliana
  peptide (1)..(211): Ceres Seq. ID no. 12559284
  misc_feature (1)..(184): Pfam Name: Adenosylmethionine decarboxylase Pfam Description: Adenosylmethionine decarboxylase
  misc_feature (1)..(184): Pfam Name: Adenosylmethionine decarboxylase Pfam Description: Adenosylmethionine decarboxylase
  misc_feature (1)..(211): Homolog of NCBI NO: 15213963 NR Description: S-adenosylmethionine decarboxylase proenzyme
  misc_feature (1)..(211): Homolog of NCBI NO: 3913415 NR Description: S-adenosylmethionine decarboxylase proenzyme 1
  misc_feature (1)..(211): Homolog of NCBI NO: 1490554 NR Description: S-adenosylmethionine decarboxylase [Arabidopsis
  misc_feature (1)..(211): Homolog of NCBI NO: 15213968 NR Description: S-adenosylmethionine decarboxylase proenzyme 3
  misc_feature (1)..(211): Homolog of NCBI NO: 1531763 NR Description: S-adenosylmethionine decarboxylase [Arabidopsis
  misc_feature (1)..(211): Homolog of NCBI NO: 15213963 NR Description: S-adenosylmethionine decarboxylase proenzyme
  misc_feature (1)..(211): Homolog of NCBI NO: 1490554 NR Description: S-adenosylmethionine decarboxylase [Arabidopsis
  misc_feature (1)..(211): Homolog of NCBI NO: 1531763 NR Description: S-adenosylmethionine decarboxylase [Arabidopsis
  misc_feature (1)..(211): Homolog of NCBI NO: 15237226 NR Description: S-adenosylmethionine decarboxylase (adoMetDC2)
  misc_feature (1)..(211): Homolog of NCBI NO: 38261497 NR Description: S-adenosyl-L-methionine decarboxylase [Brassica
  misc_feature (1)..(211): Homolog of NCBI NO: 3913410 NR Description: S-adenosylmethionine decarboxylase proenzyme 2
  misc_feature (1)..(211): Homolog of NCBI NO: 15232910 NR Description: S-adenosylmethionine decarboxylase
  misc_feature (1)..(211): Homolog of NCBI NO: 15809836 NR Description: AT3g02470/F16B3_10 [Arabidopsis thaliana]
  misc_feature (1)..(211): Homolog of NCBI NO: 15213968 NR Description: S-adenosylmethionine decarboxylase proenzyme 3
  misc_feature (1)..(211): Homolog of NCBI NO: 3913415 NR Description: S-adenosylmethionine decarboxylase proenzyme 1
  misc_feature (1)..(211): Homolog of NCBI NO: 15809836 NR Description: AT3g02470/F16B3_10 [Arabidopsis thaliana]
  misc_feature (1)..(211): Homolog of NCBI NO: 15232910 NR Description: S-adenosylmethionine decarboxylase
  misc_feature (1)..(211): Homolog of NCBI NO: 3913410 NR Description: S-adenosylmethionine decarboxylase proenzyme 2
  misc_feature (1)..(211): Homolog of NCBI NO: 38261497 NR Description: S-adenosyl-L-methionine decarboxylase [Brassica
  misc_feature (1)..(211): Homolog of NCBI NO: 15237226 NR Description: S-adenosylmethionine decarboxylase (adoMetDC2)
MGNDDETKKWHVYSASSANSNNKNNVYTLEMCMTGLDKDKASVFYKNESSSAGSMTDNSGIRKILPQSQICDFEFEPCGYSMNSIEGDAISTIHVTPEDGFSYASFEAVGYDFTTMDLSHLVSKVLTCFKPKQFSVAVHSTVAQKSYDSGLSVDLDDYGCKESTMESLGEERGTVMYQRFEKLGRYCGSPRSTLKCEWSSNSSCNSEDEKE

SEQ ID NO: 45040 - DNA, 3093 bp, Arabidopsis thaliana
  misc_feature (1)..(3093): Ceres Seq. ID no. 12600157
  misc_feature: MA Experiment ID: 20000179 Result: Up-regulated in Transcription
  misc_feature: MA Experiment 20000179 PARAMETER Experiment Name: At_Germinating_Seeds_P Parameter: Age (hr) Value: 6 vs. 0
  misc_feature: MA Experiment 20000179 PARAMETER Experiment Name: At_Germinating_Seeds_P Parameter: Tissue Value: Germinating Seeds
  misc_feature: MA Experiment ID: 20000180 Result: Up-regulated in Transcription
  misc_feature: MA Experiment 20000180 PARAMETER Experiment Name: At_Germinating_Seeds_P Parameter: Age (hr) Value: 24 vs. 0
  misc_feature: MA Experiment 20000180 PARAMETER Experiment Name: At_Germinating_Seeds_P Parameter: Tissue Value: Germinating Seeds
  misc_feature: MA Experiment ID: 20000184 Result: Up-regulated in Transcription
  misc_feature: MA Experiment 20000184 PARAMETER Experiment Name: At_Shoots__P Parameter: Age (day) Value: 7
  misc_feature: MA Experiment 20000184 PARAMETER Experiment Name: At_Shoots__P Parameter: Tissue Value: Shoots vs. Whole Plant
  misc_feature: MA Experiment ID: 20000234 Result: Up-regulated in Transcription
  misc_feature: MA Experiment 20000234 PARAMETER Experiment Name: At_Siliques_P Parameter: Age (day) Value: 21
  misc_feature: MA Experiment 20000234 PARAMETER Experiment Name: At_Siliques_P Parameter: Organism Value: A. thaliana
  misc_feature: MA Experiment 20000234 PARAMETER Experiment Name: At_Siliques_P Parameter: Plant Line Value: WS
  misc_feature: MA Experiment 20000234 PARAMETER Experiment Name: At_Siliques_P Parameter: Tissue Value: Less Than 5mm Siliques vs. Whole Plant
  misc_feature: MA Experiment ID: 20000235 Result: Up-regulated in Transcription
  misc_feature: MA Experiment 20000235 PARAMETER Experiment Name: At_Siliques_P Parameter: Age (day) Value: 21
  misc_feature: MA Experiment 20000235 PARAMETER Experiment Name: At_Siliques_P Parameter: Organism Value: A. thaliana
  misc_feature: MA Experiment 20000235 PARAMETER Experiment Name: At_Siliques_P Parameter: Plant Line Value: WS
  misc_feature: MA Experiment 20000235 PARAMETER Experiment Name: At_Siliques_P Parameter: Tissue Value: 5-10mm Siliques vs. Whole Plant
  misc_feature: MA Experiment ID: 20000264 Result: Up-regulated in Transcription
  misc_feature: MA Experiment 20000264 PARAMETER Experiment Name: At_Open_Flower_P Parameter: Age (day) Value: 21
  misc_feature: MA Experiment 20000264 PARAMETER Experiment Name: At_Open_Flower_P Parameter: Plant Line Value: WS
  misc_feature: MA Experiment 20000264 PARAMETER Experiment Name: At_Open_Flower_P Parameter: Tissue Value: Open Flower vs. Whole Plant
  misc_feature: MA Experiment ID: 20000265 Result: Up-regulated in Transcription
  misc_feature: MA Experiment 20000265 PARAMETER Experiment Name: At_Open_Flower_P Parameter: Age (day) Value: 21
  misc_feature: MA Experiment 20000265 PARAMETER Experiment Name: At_Open_Flower_P Parameter: Plant Line Value: WS
  misc_feature: MA Experiment 20000265 PARAMETER Experiment Name: At_Open_Flower_P Parameter: Tissue Value: Closed Flower vs. Whole Plant
  misc_feature: MA Experiment ID: 20000286 Result: Up-regulated in Transcription
  misc_feature: MA Experiment 20000286 PARAMETER Experiment Name: At_Open_Flower_P Parameter: Age (day) Value: 21
  misc_feature: MA Experiment 20000286 PARAMETER Experiment Name: At_Open_Flower_P Parameter: Plant Line Value: WS
  misc_feature: MA Experiment 20000286 PARAMETER Experiment Name: At_Open_Flower_P Parameter: Tissue Value: Half Open vs. Whole Plant
  misc_feature: MA Experiment ID: 20000438 Result: Up-regulated in Transcription
  misc_feature: MA Experiment 20000438 PARAMETER Experiment Name: At_Shoots__P Parameter: Age (day) Value: 14
  misc_feature: MA Experiment 20000438 PARAMETER Experiment Name: At_Shoots__P Parameter: Tissue Value: Shoots vs. Whole Plant
  misc_feature: MA Experiment ID: 20000439 Result: Up-regulated in Transcription
  misc_feature: MA Experiment 20000439 PARAMETER Experiment Name: At_Roots__P Parameter: Age (day) Value: 14 vs. 21
  misc_feature: MA Experiment 20000439 PARAMETER Experiment Name: At_Roots__P Parameter: Organism Value: A. thaliana
  misc_feature: MA Experiment 20000439 PARAMETER Experiment Name: At_Roots__P Parameter: Tissue Value: Roots vs. Whole Plant
  misc_feature: MA Experiment ID: 20000495 Result: Up-regulated in Transcription
  misc_feature: MA Experiment 20000495 PARAMETER Experiment Name: At_Guard_Cells_P Parameter: Harvest Date Value: 8/2/2002
  misc_feature: MA Experiment 20000495 PARAMETER Experiment Name: At_Guard_Cells_P Parameter: Organism Value: A. thaliana
  misc_feature: MA Experiment 20000495 PARAMETER Experiment Name: At_Guard_Cells_P Parameter: Tissue Value: Guard Cells vs. Leaves
  misc_feature: MA Experiment ID: 20000573 Result: Down-regulated in Transcription
  misc_feature: MA Experiment 20000573 PARAMETER Experiment Name: At_100uM_ABA_Mutants__P Parameter: Organism Value: A. thaliana
  misc_feature: MA Experiment 20000573 PARAMETER Experiment Name: At_100uM_ABA_Mutants__P Parameter: Plant Line Value: CS22 vs. Ler wt
  misc_feature: MA Experiment 20000573 PARAMETER Experiment Name: At_100uM_ABA_Mutants__P Parameter: Timepoint (hr) Value: N/A
  misc_feature: MA Experiment 20000573 PARAMETER Experiment Name: At_100uM_ABA_Mutants__P Parameter: Tissue Value: Whole Plant
  misc_feature: MA Experiment 20000573 PARAMETER Experiment Name: At_100uM_ABA_Mutants__P Parameter: Treatment Value: None
  misc_feature: MA Experiment ID: 20001248 Result: Down-regulated in Transcription
  misc_feature: MA Experiment 20001248 PARAMETER Experiment Name: At_Far-red-induction_P Parameter: Age (day) Value: 7
  misc_feature: MA Experiment 20001248 PARAMETER Experiment Name: At_Far-red-induction_P Parameter: Light Value: Far-red vs. White
  misc_feature: MA Experiment 20001248 PARAMETER Experiment Name: At_Far-red-induction_P Parameter: Organism Value: A. thaliana
  misc_feature: MA Experiment 20001248 PARAMETER Experiment Name: At_Far-red-induction_P Parameter: Plant Line Value: Columbia
  misc_feature: MA Experiment 20001248 PARAMETER Experiment Name: At_Far-red-induction_P Parameter: Timepoint (hr) Value: 4
  misc_feature: MA Experiment 20001248 PARAMETER Experiment Name: At_Far-red-induction_P Parameter: Tissue Value: Whole Plant
  misc_feature: MA Experiment ID: 20001450 Result: Down-regulated in Transcription
  misc_feature: MA Experiment 20001450 PARAMETER Experiment Name: At_Far-red-induction_P Parameter: Age (day) Value: 7
  misc_feature: MA Experiment 20001450 PARAMETER Experiment Name: At_Far-red-induction_P Parameter: Light Value: Far-red vs. White
  misc_feature: MA Experiment 20001450 PARAMETER Experiment Name: At_Far-red-induction_P Parameter: Organism Value: A. thaliana
  misc_feature: MA Experiment 20001450 PARAMETER Experiment Name: At_Far-red-induction_P Parameter: Plant Line Value: Columbia
  misc_feature: MA Experiment 20001450 PARAMETER Experiment Name: At_Far-red-induction_P Parameter: Timepoint (hr) Value: 8
  misc_feature: MA Experiment 20001450 PARAMETER Experiment Name: At_Far-red-induction_P Parameter: Tissue Value: Whole Plant
  misc_feature: MA Experiment ID: 20001557 Result: Up-regulated in Transcription
  misc_feature: MA Experiment 20001557 PARAMETER Experiment Name: At_Drought_Soil_Dry_P Parameter: Age (day) Value: 27
  misc_feature: MA Experiment 20001557 PARAMETER Experiment Name: At_Drought_Soil_Dry_P Parameter: Organism Value: A. thaliana
  misc_feature: MA Experiment 20001557 PARAMETER Experiment Name: At_Drought_Soil_Dry_P Parameter: Plant Line Value: WS
  misc_feature: MA Experiment 20001557 PARAMETER Experiment Name: At_Drought_Soil_Dry_P Parameter: Post Timepoint (hr) Value: 3
  misc_feature: MA Experiment 20001557 PARAMETER Experiment Name: At_Drought_Soil_Dry_P Parameter: Post-Treatment Value: Re-Water vs. No Drought
  misc_feature: MA Experiment 20001557 PARAMETER Experiment Name: At_Drought_Soil_Dry_P Parameter: Timepoint (day) Value: 13
  misc_feature: MA Experiment 20001557 PARAMETER Experiment Name: At_Drought_Soil_Dry_P Parameter: Treatment Value: Drought vs. No Drought
  misc_feature: MA Experiment ID: 20001558 Result: Up-regulated in Transcription
  misc_feature: MA Experiment 20001558 PARAMETER Experiment Name: At_Drought_Soil_Dry_P Parameter: Age (day) Value: 27
  misc_feature: MA Experiment 20001558 PARAMETER Experiment Name: At_Drought_Soil_Dry_P Parameter: Organism Value: A. thaliana
  misc_feature: MA Experiment 20001558 PARAMETER Experiment Name: At_Drought_Soil_Dry_P Parameter: Plant Line Value: WS
  misc_feature: MA Experiment 20001558 PARAMETER Experiment Name: At_Drought_Soil_Dry_P Parameter: Post Timepoint (hr) Value: 6
  misc_feature: MA Experiment 20001558 PARAMETER Experiment Name: At_Drought_Soil_Dry_P Parameter: Post-Treatment Value: Re-Water vs. No Drought
  misc_feature: MA Experiment 20001558 PARAMETER Experiment Name: At_Drought_Soil_Dry_P Parameter: Timepoint (day) Value: 13
  misc_feature: MA Experiment 20001558 PARAMETER Experiment Name: At_Drought_Soil_Dry_P Parameter: Treatment Value: Drought vs. No Drought
  misc_feature: MA Experiment ID: 20001560 Result: Up-regulated in Transcription
  misc_feature: MA Experiment 20001560 PARAMETER Experiment Name: At_Drought_Soil_Dry_P Parameter: Age (day) Value: 28
  misc_feature: MA Experiment 20001560 PARAMETER Experiment Name: At_Drought_Soil_Dry_P Parameter: Organism Value: A. thaliana
  misc_feature: MA Experiment 20001560 PARAMETER Experiment Name: At_Drought_Soil_Dry_P Parameter: Plant Line Value: WS
  misc_feature: MA Experiment 20001560 PARAMETER Experiment Name: At_Drought_Soil_Dry_P Parameter: Post Timepoint (hr) Value: None
  misc_feature: MA Experiment 20001560 PARAMETER Experiment Name: At_Drought_Soil_Dry_P Parameter: Post-Treatment Value: None
  misc_feature: MA Experiment 20001560 PARAMETER Experiment Name: At_Drought_Soil_Dry_P Parameter: Timepoint (day) Value: 14
  misc_feature: MA Experiment 20001560 PARAMETER Experiment Name: At_Drought_Soil_Dry_P Parameter: Treatment Value: Drought vs. No Drought
  misc_feature: MA Experiment ID: 20001911 Result: Down-regulated in Transcription
  misc_feature: MA Experiment 20001911 PARAMETER Experiment Name: At_Drought_Reproduction_P Parameter: Age (day) Value: 40
  misc_feature: MA Experiment 20001911 PARAMETER Experiment Name: At_Drought_Reproduction_P Parameter: Organism Value: A. thaliana
  misc_feature: MA Experiment 20001911 PARAMETER Experiment Name: At_Drought_Reproduction_P Parameter: Plant Line Value: WS
  misc_feature: MA Experiment 20001911 PARAMETER Experiment Name: At_Drought_Reproduction_P Parameter: Timepoint (day) Value: 10
  misc_feature: MA Experiment 20001911 PARAMETER Experiment Name: At_Drought_Reproduction_P Parameter: Tissue Value: Flowers
  misc_feature: MA Experiment 20001911 PARAMETER Experiment Name: At_Drought_Reproduction_P Parameter: Treatment Value: Drought vs. No Drought
gtcttcttcttcttcttcttccttccttctctctccttattaagaaagaccaacacagacacggaagaagtagcttggttcttctctttgtgaaggtgaatgcgggagatggggactggagattctgcttcgagactgattctctggttctgcttagggtttttgattctaggtgttggatttgtgcaatgtggagttacttatgaccggaaagcacttctcattaatggacagagacgaatcctcttctctggctccatacattaccctcgaagcactcctgatatgtgggaagatttgattcagaaggcgaaagatggaggcattgatgtgattgagacgtatgtgttctggaatcttcatgagccttctcctggaaaatacgattttgaagggagaaatgatttggtgagattcgtgaagacgattcacaaagctggtttatatgctcatcttcgaattggaccttatgtttgcgccgagtggaattttggaggattccctgtttggctcaagtatgttcctggaatcagcttcagaacagataatgagccttttaagagagctatgaaaggattcacagagagaatagttgagctgatgaagagtgagaacttgttcgagtcccagggtggtcccattatcctttctcagattgagaatgagtatggaagacaagggcagttattgggcgctgaaggtcacaactacatgacatgggcagctaaaatggctatagcaactgagactggtgtcccgtgggtcatgtgcaaagaagacgatgcccctgaccctgtgataaacacatgtaacggtttctactgtgattcatttgctccgaacaagccatacaagcctttgatatggacagaggcatggagcggctggttcactgagttcggtgggccaatgcaccatagaccagttcaggatctggcgtttggtgttgcacgtttcatacaaaaaggaggatcttttgttaactactacatgtatcatggaggaactaactttggaagaacagccggaggtccatttgtcaccaccagctatgattatgatgctccgatcgacgaatatggtttaatcagacaacctaaatatggtcacctaaaggaactccacagagctatcaagatgtgtgagaaggctctggtgtcagctgatcccgttgttacatcaataggaaacaagcaacaagctcatgtatactctgcagaatcaggagattgttcggctttcctagctaactatgatacagaatcggcagcaagagttttgtttaacaacgttcattataacttacctccttggtcaatcagtattcttccagactgtagaaatgcagtcttcaatactgcaaaggttggagttcaaacatcccagatggaaatgttgcctacagacacaaagaatttccagtgggagagttatttggaagatctttcttctctagatgacagctccacattcaccactcacggactcttggagcagataaatgtcacgcgtgacacaagcgattatctttggtacatgacgagtgttgatatcggtgacagtgaatcattcttgcatggaggagagctaccaactctcattattcaatctacaggccatgccgtgcatatatttgtcaatggacagctttcaggttctgcctttggaacaaggcaaaacaggagatttacttatcagggaaagatcaatctgcattctggaactaacagaattgcgttgctgagtgttgctgttggattaccaaatgtgggtggacactttgagtcatggaatactggaatcttgggtccggtggcattgcatgggttgagtcaagggaaaatggatttgtcatggcagaaatggacataccaggtgggactgaaaggtgaagctatgaatcttgcatttccaaccaacactccctctattggatggatggatgcgtccttaactgtacaaaagcctcagcctttgacatggcacaagacttattttgatgcgcccgaaggaaatgagccgcttgctttggacatggaaggaatgggaaaaggtcagatttgggtgaacggtgagagcatcggaagatactggacagcatttgcgactggtgactgcagtcattgtagctacactggaacatataaaccgaacaaatgccaaaccggctgtggtcaacctacacaaaggtggtaccatgtgccgagagcttggttaaagccgagccaaaatctgttggtcatattcgaggagcttggtggaaacccatcaactgtctctttggtcaaaagatcagtatcaggagtttgtgctgaagtttctgaataccacccgaatatcaagaactggcaaatcgaaagctacggaaagggacagacatttcatagacccaaggttcatttgaaatgtagtccaggtcaagcaattgcatccatcaaatttgcaagctttggaactcctttaggaacctgcgggagttaccaacaaggagagtgtcacgcagctacctcatacgctatcttagagaggaagtgtgtagggaaagcgagatgcgcagtgacgatatccaacagcaatttcgggaaagacccgtgtccaaatgtgctgaaacggttgactgttgaagcagtttgtgccccagagaaatctgtaagcacttggagaccttaaagacaaccattgagccctttgtctacaaaatgtataaccaaacaatacagagagagttgaagaaaagaaattgtaagctgtgtttaaaatatgtgtgtgtgtgtgttagtttgaacagagacatttgtgggttagagtagtttcagatagataagagagaagagtctgtagagttgtgatgagtctcgggcaattccgtggctcattaaaaacgttcaggccaccggtcaccaccgaccattttaaccggttatggagaccgggattggtgggtctgaatgaagtcagtttaaggtttggttttgatttgtctttgtaatcaactaaagagggttcaggtttaggagaaaggagatcctatggtgacccatttctttcaaacctattgtcgtttcactttctaatttagttctattttccctt

SEQ ID NO: 45041 - protein, 856 aa, Arabidopsis thaliana
  peptide (1)..(856): Ceres Seq. ID no. 12600158
  misc_feature (768)..(845): Pfam Name: Galactose binding lectin domain Pfam Description: Galactose binding lectin domain
  misc_feature (768)..(845): Pfam Name: Galactose binding lectin domain Pfam Description: Galactose binding lectin domain
  misc_feature (768)..(845): Pfam Name: Galactose binding lectin domain Pfam Description: Galactose binding lectin domain
  misc_feature (622)..(849): Homolog of NCBI NO: 30679742 NR Description: glycosyl hydrolase family 35 (beta-galactosidase)
  misc_feature (33)..(668): Homolog of NCBI NO: 30679742 NR Description: glycosyl hydrolase family 35 (beta-galactosidase)
  misc_feature (622)..(849): Homolog of NCBI NO: 25326168 NR Description: probable beta-galactosidase [imported] -
  misc_feature (16)..(668): Homolog of NCBI NO: 25326168 NR Description: probable beta-galactosidase [imported] -
  misc_feature (22)..(846): Homolog of NCBI NO: 30683905 NR Description: glycosyl hydrolase family 35 (beta-galactosidase)
  misc_feature (622)..(849): Homolog of NCBI NO: 30679742 NR Description: glycosyl hydrolase family 35 (beta-galactosidase)
  misc_feature (622)..(849): Homolog of NCBI NO: 25326168 NR Description: probable beta-galactosidase [imported] -
  misc_feature (22)..(846): Homolog of NCBI NO: 30683905 NR Description: glycosyl hydrolase family 35 (beta-galactosidase)
  misc_feature (16)..(668): Homolog of NCBI NO: 25326168 NR Description: probable beta-galactosidase [imported] -
  misc_feature (622)..(849): Homolog of NCBI NO: 25326168 NR Description: probable beta-galactosidase [imported] -
  misc_feature (33)..(668): Homolog of NCBI NO: 30679742 NR Description: glycosyl hydrolase family 35 (beta-galactosidase)
  misc_feature (622)..(849): Homolog of NCBI NO: 30679742 NR Description: glycosyl hydrolase family 35 (beta-galactosidase)
  misc_feature (16)..(846): Homolog of NCBI NO: 1352077 NR Description: Beta-galactosidase precursor (Lactase) (Acid
  misc_feature (17)..(846): Homolog of NCBI NO: 15231354 NR Description: glycosyl hydrolase family 35 (beta-galactosidase)
  misc_feature (17)..(846): Homolog of NCBI NO: 20260596 NR Description: galactosidase, putative [Arabidopsis thaliana]
  misc_feature (13)..(846): Homolog of NCBI NO: 4138137 NR Description: ss-galactosidase [Lycopersicon esculentum]
  misc_feature (16)..(732): Homolog of NCBI NO: 30687121 NR Description: glycosyl hydrolase family 35 (beta-galactosidase)
  misc_feature (16)..(846): Homolog of NCBI NO: 1352077 NR Description: Beta-galactosidase precursor (Lactase) (Acid
  misc_feature (17)..(846): Homolog of NCBI NO: 15231354 NR Description: glycosyl hydrolase family 35 (beta-galactosidase)
  misc_feature (17)..(846): Homolog of NCBI NO: 20260596 NR Description: galactosidase, putative [Arabidopsis thaliana]
  misc_feature (13)..(846): Homolog of NCBI NO: 4138137 NR Description: ss-galactosidase [Lycopersicon esculentum]
  misc_feature (16)..(732): Homolog of NCBI NO: 30687121 NR Description: glycosyl hydrolase family 35 (beta-galactosidase)
  misc_feature (22)..(846): Homolog of NCBI NO: 30683905 NR Description: glycosyl hydrolase family 35 (beta-galactosidase)
  misc_feature (16)..(668): Homolog of NCBI NO: 25326168 NR Description: probable beta-galactosidase [imported] -
  misc_feature (33)..(668): Homolog of NCBI NO: 30679742 NR Description: glycosyl hydrolase family 35 (beta-galactosidase)
  misc_feature (16)..(732): Homolog of NCBI NO: 30687121 NR Description: glycosyl hydrolase family 35 (beta-galactosidase)
  misc_feature (13)..(846): Homolog of NCBI NO: 4138137 NR Description: ss-galactosidase [Lycopersicon esculentum]
  misc_feature (17)..(846): Homolog of NCBI NO: 20260596 NR Description: galactosidase, putative [Arabidopsis thaliana]
  misc_feature (17)..(846): Homolog of NCBI NO: 15231354 NR Description: glycosyl hydrolase family 35 (beta-galactosidase)
  misc_feature (16)..(846): Homolog of NCBI NO: 1352077 NR Description: Beta-galactosidase precursor (Lactase) (Acid
MREMGTGDSASRLILWFCLGFLILGVGFVQCGVTYDRKALLINGQRRILFSGSIHYPRSTPDMWEDLIQKAKDGGIDVIETYVFWNLHEPSPGKYDFEGRNDLVRFVKTIHKAGLYAHLRIGPYVCAEWNFGGFPVWLKYVPGISFRTDNEPFKRAMKGFTERIVELMKSENLFESQGGPIILSQIENEYGRQGQLLGAEGHNYMTWAAKMAIATETGVPWVMCKEDDAPDPVINTCNGFYCDSFAPNKPYKPLIWTEAWSGWFTEFGGPMHHRPVQDLAFGVARFIQKGGSFVNYYMYHGGTNFGRTAGGPFVTTSYDYDAPIDEYGLIRQPKYGHLKELHRAIKMCEKALVSADPVVTSIGNKQQAHVYSAESGDCSAFLANYDTESAARVLFNNVHYNLPPWSISILPDCRNAVFNTAKVGVQTSQMEMLPTDTKNFQWESYLEDLSSLDDSSTFTTHGLLEQINVTRDTSDYLWYMTSVDIGDSESFLHGGELPTLIIQSTGHAVHIFVNGQLSGSAFGTRQNRRFTYQGKINLHSGTNRIALLSVAVGLPNVGGHFESWNTGILGPVALHGLSQGKMDLSWQKWTYQVGLKGEAMNLAFPTNTPSIGWMDASLTVQKPQPLTWHKTYFDAPEGNEPLALDMEGMGKGQIWVNGESIGRYWTAFATGDCSHCSYTGTYKPNKCQTGCGQPTQRWYHVPRAWLKPSQNLLVIFEELGGNPSTVSLVKRSVSGVCAEVSEYHPNIKNWQIESYGKGQTFHRPKVHLKCSPGQAIASIKFASFGTPLGTCGSYQQGECHAATSYAILERKCVGKARCAVTISNSNFGKDPCPNVLKRLTVEAVCAPEKSVSTWRP

SEQ ID NO: 45042 - protein, 853 aa, Arabidopsis thaliana
  peptide (1)..(853): Ceres Seq. ID no. 12600159
  misc_feature (765)..(842): Pfam Name: Galactose binding lectin domain Pfam Description: Galactose binding lectin domain
  misc_feature (765)..(842): Pfam Name: Galactose binding lectin domain Pfam Description: Galactose binding lectin domain
  misc_feature (765)..(842): Pfam Name: Galactose binding lectin domain Pfam Description: Galactose binding lectin domain
  misc_feature (619)..(846): Homolog of NCBI NO: 30679742 NR Description: glycosyl hydrolase family 35 (beta-galactosidase)
  misc_feature (30)..(665): Homolog of NCBI NO: 30679742 NR Description: glycosyl hydrolase family 35 (beta-galactosidase)
  misc_feature (619)..(846): Homolog of NCBI NO: 25326168 NR Description: probable beta-galactosidase [imported] -
  misc_feature (13)..(665): Homolog of NCBI NO: 25326168 NR Description: probable beta-galactosidase [imported] -
  misc_feature (19)..(843): Homolog of NCBI NO: 30683905 NR Description: glycosyl hydrolase family 35 (beta-galactosidase)
  misc_feature (619)..(846): Homolog of NCBI NO: 30679742 NR Description: glycosyl hydrolase family 35 (beta-galactosidase)
  misc_feature (619)..(846): Homolog of NCBI NO: 25326168 NR Description: probable beta-galactosidase [imported] -
  misc_feature (19)..(843): Homolog of NCBI NO: 30683905 NR Description: glycosyl hydrolase family 35 (beta-galactosidase)
  misc_feature (13)..(665): Homolog of NCBI NO: 25326168 NR Description: probable beta-galactosidase [imported] -
  misc_feature (619)..(846): Homolog of NCBI NO: 25326168 NR Description: probable beta-galactosidase [imported] -
  misc_feature (30)..(665): Homolog of NCBI NO: 30679742 NR Description: glycosyl hydrolase family 35 (beta-galactosidase)
  misc_feature (619)..(846): Homolog of NCBI NO: 30679742 NR Description: glycosyl hydrolase family 35 (beta-galactosidase)
  misc_feature (13)..(843): Homolog of NCBI NO: 1352077 NR Description: Beta-galactosidase precursor (Lactase) (Acid
  misc_feature (14)..(843): Homolog of NCBI NO: 15231354 NR Description: glycosyl hydrolase family 35 (beta-galactosidase)
  misc_feature (14)..(843): Homolog of NCBI NO: 20260596 NR Description: galactosidase, putative [Arabidopsis thaliana]
  misc_feature (10)..(843): Homolog of NCBI NO: 4138137 NR Description: ss-galactosidase [Lycopersicon esculentum]
  misc_feature (13)..(729): Homolog of NCBI NO: 30687121 NR Description: glycosyl hydrolase family 35 (beta-galactosidase)
  misc_feature (13)..(843): Homolog of NCBI NO: 1352077 NR Description: Beta-galactosidase precursor (Lactase) (Acid
  misc_feature (14)..(843): Homolog of NCBI NO: 15231354 NR Description: glycosyl hydrolase family 35 (beta-galactosidase)
  misc_feature (14)..(843): Homolog of NCBI NO: 20260596 NR Description: galactosidase, putative [Arabidopsis thaliana]
  misc_feature (10)..(843): Homolog of NCBI NO: 4138137 NR Description: ss-galactosidase [Lycopersicon esculentum]
  misc_feature (13)..(729): Homolog of NCBI NO: 30687121 NR Description: glycosyl hydrolase family 35 (beta-galactosidase)
  misc_feature (19)..(843): Homolog of NCBI NO: 30683905 NR Description: glycosyl hydrolase family 35 (beta-galactosidase)
  misc_feature (13)..(665): Homolog of NCBI NO: 25326168 NR Description: probable beta-galactosidase [imported] -
  misc_feature (30)..(665): Homolog of NCBI NO: 30679742 NR Description: glycosyl hydrolase family 35 (beta-galactosidase)
  misc_feature (13)..(729): Homolog of NCBI NO: 30687121 NR Description: glycosyl hydrolase family 35 (beta-galactosidase)
  misc_feature (10)..(843): Homolog of NCBI NO: 4138137 NR Description: ss-galactosidase [Lycopersicon esculentum]
  misc_feature (14)..(843): Homolog of NCBI NO: 20260596 NR Description: galactosidase, putative [Arabidopsis thaliana]
  misc_feature (14)..(843): Homolog of NCBI NO: 15231354 NR Description: glycosyl hydrolase family 35 (beta-galactosidase)
  misc_feature (13)..(843): Homolog of NCBI NO: 1352077 NR Description: Beta-galactosidase precursor (Lactase) (Acid
MGTGDSASRLILWFCLGFLILGVGFVQCGVTYDRKALLINGQRRILFSGSIHYPRSTPDMWEDLIQKAKDGGIDVIETYVFWNLHEPSPGKYDFEGRNDLVRFVKTIHKAGLYAHLRIGPYVCAEWNFGGFPVWLKYVPGISFRTDNEPFKRAMKGFTERIVELMKSENLFESQGGPIILSQIENEYGRQGQLLGAEGHNYMTWAAKMAIATETGVPWVMCKEDDAPDPVINTCNGFYCDSFAPNKPYKPLIWTEAWSGWFTEFGGPMHHRPVQDLAFGVARFIQKGGSFVNYYMYHGGTNFGRTAGGPFVTTSYDYDAPIDEYGLIRQPKYGHLKELHRAIKMCEKALVSADPVVTSIGNKQQAHVYSAESGDCSAFLANYDTESAARVLFNNVHYNLPPWSISILPDCRNAVFNTAKVGVQTSQMEMLPTDTKNFQWESYLEDLSSLDDSSTFTTHGLLEQINVTRDTSDYLWYMTSVDIGDSESFLHGGELPTLIIQSTGHAVHIFVNGQLSGSAFGTRQNRRFTYQGKINLHSGTNRIALLSVAVGLPNVGGHFESWNTGILGPVALHGLSQGKMDLSWQKWTYQVGLKGEAMNLAFPTNTPSIGWMDASLTVQKPQPLTWHKTYFDAPEGNEPLALDMEGMGKGQIWVNGESIGRYWTAFATGDCSHCSYTGTYKPNKCQTGCGQPTQRWYHVPRAWLKPSQNLLVIFEELGGNPSTVSLVKRSVSGVCAEVSEYHPNIKNWQIESYGKGQTFHRPKVHLKCSPGQAIASIKFASFGTPLGTCGSYQQGECHAATSYAILERKCVGKARCAVTISNSNFGKDPCPNVLKRLTVEAVCAPEKSVSTWRP

SEQ ID NO: 45043 - protein, 794 aa, Arabidopsis thaliana
  peptide (1)..(794): Ceres Seq. ID no. 12600160
  misc_feature (706)..(783): Pfam Name: Galactose binding lectin domain Pfam Description: Galactose binding lectin domain
  misc_feature (706)..(783): Pfam Name: Galactose binding lectin domain Pfam Description: Galactose binding lectin domain
  misc_feature (706)..(783): Pfam Name: Galactose binding lectin domain Pfam Description: Galactose binding lectin domain
  misc_feature (560)..(787): Homolog of NCBI NO: 30679742 NR Description: glycosyl hydrolase family 35 (beta-galactosidase)
  misc_feature (1)..(606): Homolog of NCBI NO: 30679742 NR Description: glycosyl hydrolase family 35 (beta-galactosidase)
  misc_feature (560)..(787): Homolog of NCBI NO: 25326168 NR Description: probable beta-galactosidase [imported] -
  misc_feature (1)..(606): Homolog of NCBI NO: 25326168 NR Description: probable beta-galactosidase [imported] -
  misc_feature (1)..(784): Homolog of NCBI NO: 30683905 NR Description: glycosyl hydrolase family 35 (beta-galactosidase)
  misc_feature (560)..(787): Homolog of NCBI NO: 30679742 NR Description: glycosyl hydrolase family 35 (beta-galactosidase)
  misc_feature (560)..(787): Homolog of NCBI NO: 25326168 NR Description: probable beta-galactosidase [imported] -
  misc_feature (1)..(784): Homolog of NCBI NO: 30683905 NR Description: glycosyl hydrolase family 35 (beta-galactosidase)
  misc_feature (1)..(606): Homolog of NCBI NO: 25326168 NR Description: probable beta-galactosidase [imported] -
  misc_feature (560)..(787): Homolog of NCBI NO: 25326168 NR Description: probable beta-galactosidase [imported] -
  misc_feature (1)..(606): Homolog of NCBI NO: 30679742 NR Description: glycosyl hydrolase family 35 (beta-galactosidase)
  misc_feature (560)..(787): Homolog of NCBI NO: 30679742 NR Description: glycosyl hydrolase family 35 (beta-galactosidase)
  misc_feature (1)..(784): Homolog of NCBI NO: 1352077 NR Description: Beta-galactosidase precursor (Lactase) (Acid
  misc_feature (1)..(784): Homolog of NCBI NO: 15231354 NR Description: glycosyl hydrolase family 35 (beta-galactosidase)
  misc_feature (1)..(784): Homolog of NCBI NO: 20260596 NR Description: galactosidase, putative [Arabidopsis thaliana]
  misc_feature (1)..(784): Homolog of NCBI NO: 4138137 NR Description: ss-galactosidase [Lycopersicon esculentum]
  misc_feature (1)..(670): Homolog of NCBI NO: 30687121 NR Description: glycosyl hydrolase family 35 (beta-galactosidase)
  misc_feature (1)..(784): Homolog of NCBI NO: 1352077 NR Description: Beta-galactosidase precursor (Lactase) (Acid
  misc_feature (1)..(784): Homolog of NCBI NO: 15231354 NR Description: glycosyl hydrolase family 35 (beta-galactosidase)
  misc_feature (1)..(784): Homolog of NCBI NO: 20260596 NR Description: galactosidase, putative [Arabidopsis thaliana]
  misc_feature (1)..(784): Homolog of NCBI NO: 4138137 NR Description: ss-galactosidase [Lycopersicon esculentum]
  misc_feature (1)..(670): Homolog of NCBI NO: 30687121 NR Description: glycosyl hydrolase family 35 (beta-galactosidase)
  misc_feature (1)..(784): Homolog of NCBI NO: 30683905 NR Description: glycosyl hydrolase family 35 (beta-galactosidase)
  misc_feature (1)..(606): Homolog of NCBI NO: 25326168 NR Description: probable beta-galactosidase [imported] -
  misc_feature (1)..(606): Homolog of NCBI NO: 30679742 NR Description: glycosyl hydrolase family 35 (beta-galactosidase)
  misc_feature (1)..(670): Homolog of NCBI NO: 30687121 NR Description: glycosyl hydrolase family 35 (beta-galactosidase)
  misc_feature (1)..(784): Homolog of NCBI NO: 4138137 NR Description: ss-galactosidase [Lycopersicon esculentum]
  misc_feature (1)..(784): Homolog of NCBI NO: 20260596 NR Description: galactosidase, putative [Arabidopsis thaliana]
  misc_feature (1)..(784): Homolog of NCBI NO: 15231354 NR Description: glycosyl hydrolase family 35 (beta-galactosidase)
  misc_feature (1)..(784): Homolog of NCBI NO: 1352077 NR Description: Beta-galactosidase precursor (Lactase) (Acid
MWEDLIQKAKDGGIDVIETYVFWNLHEPSPGKYDFEGRNDLVRFVKTIHKAGLYAHLRIGPYVCAEWNFGGFPVWLKYVPGISFRTDNEPFKRAMKGFTERIVELMKSENLFESQGGPIILSQIENEYGRQGQLLGAEGHNYMTWAAKMAIATETGVPWVMCKEDDAPDPVINTCNGFYCDSFAPNKPYKPLIWTEAWSGWFTEFGGPMHHRPVQDLAFGVARFIQKGGSFVNYYMYHGGTNFGRTAGGPFVTTSYDYDAPIDEYGLIRQPKYGHLKELHRAIKMCEKALVSADPVVTSIGNKQQAHVYSAESGDCSAFLANYDTESAARVLFNNVHYNLPPWSISILPDCRNAVFNTAKVGVQTSQMEMLPTDTKNFQWESYLEDLSSLDDSSTFTTHGLLEQINVTRDTSDYLWYMTSVDIGDSESFLHGGELPTLIIQSTGHAVHIFVNGQLSGSAFGTRQNRRFTYQGKINLHSGTNRIALLSVAVGLPNVGGHFESWNTGILGPVALHGLSQGKMDLSWQKWTYQVGLKGEAMNLAFPTNTPSIGWMDASLTVQKPQPLTWHKTYFDAPEGNEPLALDMEGMGKGQIWVNGESIGRYWTAFATGDCSHCSYTGTYKPNKCQTGCGQPTQRWYHVPRAWLKPSQNLLVIFEELGGNPSTVSLVKRSVSGVCAEVSEYHPNIKNWQIESYGKGQTFHRPKVHLKCSPGQAIASIKFASFGTPLGTCGSYQQGECHAATSYAILERKCVGKARCAVTISNSNFGKDPCPNVLKRLTVEAVCAPEKSVSTWRP

SEQ ID NO: 45044 - DNA, 2350 bp, Arabidopsis thaliana
  misc_feature (1)..(2350): Ceres Seq. ID no. 12560164
  misc_feature: MA Experiment ID: 20000495 Result: Down-regulated in Transcription
  misc_feature: MA Experiment 20000495 PARAMETER Experiment Name: At_Guard_Cells_P Parameter: Harvest Date Value: 8/2/2002
  misc_feature: MA Experiment 20000495 PARAMETER Experiment Name: At_Guard_Cells_P Parameter: Organism Value: A. thaliana
  misc_feature: MA Experiment 20000495 PARAMETER Experiment Name: At_Guard_Cells_P Parameter: Tissue Value: Guard Cells vs. Leaves
  misc_feature: MA Experiment ID: 20000794 Result: Up-regulated in Transcription
  misc_feature: MA Experiment 20000794 PARAMETER Experiment Name: At_Petals_P Parameter: Age (day) Value: 23-25 days
  misc_feature: MA Experiment 20000794 PARAMETER Experiment Name: At_Petals_P Parameter: Plant Line Value: WS
  misc_feature: MA Experiment 20000794 PARAMETER Experiment Name: At_Petals_P Parameter: Tissue Value: Petals vs. Whole plant
aaaagcaacgcaaagctttacactttcctttctcctttctctttcactgcaaatttctcctacccttaaaaatcgaaacttcaagagaagaaattgaggaatcaaaaattccctagattcgagggttcttctctcacttgttctatcttcctgcttcatcggaatcgtttgatttgtgttctttacattttctccgactcaacttatggtctgaattttacctagtgcaaggcattagagaaattggtacagtcgtgtgacatgtgaagattgttgttgtacatatagctgaaggaactctttgctgatttttacataaaagagtgtatcttgatatttggtttgcgatcgagttaagtggaagcgatggatactgccagagcatggctgaagaaattaaagtctaaagggaaagagaaatcttcgaataagaaggaaacttctagaggaaatgttaaggagggatcaaaaacagctggaggtgaagaagctgtgtctaatgtgacaaagcagaaggctgctgctgcgaaacagtatattgaaaatcattacaaaaaacaagttcaaagtcagcagcaaagaaaagagcggcgtgatatgctggaaaataagttagctgctgcagaagtctctgaggaagagcaaaagaatctgcttaaggatctagagaagaaggaaactgaatacatgcgccgtcagagacataaaatgggaactgatgacttcgagccattgacaatgataggaaagggggcttttggagaggttaggatatgtagggagaagacaacaggcaatgtctatgcgatgaaaaagcttaagaaatctgagatgctccgtagaggccaggtggagcatgtgaaagcagagagaaatttacttgcagaggttgacagcaattgcattgtgaagctgtattgttcttttcaagatgaagagtatttgtatcttattatggagtatctacctggtggagatatgatgacattacttatgaggaaagacacacttactgaagatgaggcaagattttatgttggggaaactgtcttagctatcgagtccattcataagcacaattatatccacagagatatcaagcctgataatctgctactcgacagaagcggtcacatgaagttatccgattttggattatgtaagccattagattgtagtattctccaggaaaaagatttcgtagttgcacacaaccttagtggggctctacaaagtgatggccgccctgtggcaccgagacgtacccgctctcaaatggaacaattacaaaactggcagagaaatagaaggatgcttgcttattctacagttggaactcctgactatattgctccagaagttttgttgaagaaaggatatggcatggaatgtgattggtggtcacttggtgcgatcatgtatgaaatgcttgtggggtttccaccattttattcagacgagccaatgacaacttgtagaaagatagtaaattggaaaaattatttaaaattccctgatgaggttaggctatcaccagaagccaaggatctaatttgtagacttttatgcaacgtagaacaaaggattggaacaaaaggagcaaatgaaattaaggaacacccttggttcagtggtgtcgaatgggaaaagttgtatcagatgaaggctgcttttattccccaagttaatgacgagctggacacccaaaatttcgaaaaattcgaagagactgataagcaagttccgaagacgccaaaatcaggtccatggagaaagatgctctcatccaaagacataaactttgtgggttatacttacaagaacgttgaaatcgtaaaccatgatcaattaccagggatagctgagctgaagaagaagagcacaaagccaaagcggccatcaattaaatccctctttgaggatgaatcagccagtagcaccacaagccaccaaggaagctttatgaaactcttgccaacacaaatcgaagttccagagaaagaagacaaatcaagctcatctagtgaaaccctatcatcttccaccacacgtttcgacaatgccacatcctaaaccagactctttgctacactttggtcccggttaacacaccaaaacacggtttgaggtggcggatttacggttggagatagtacagtttccattgtggcggtgaaggctattgtgtgagaagattaaggatttgttcaacagtttctacataggataatatttggttgttcaaaaggtttagtttgaagcaaaaggaagtaaatagtcattttcagaatgtggttttatttatttgtttgattgttttgtttgggtaaaaatcaaatttggtttgttt

SEQ ID NO: 45045 - protein, 568 aa, Arabidopsis thaliana
  peptide (1)..(568): Ceres Seq. ID no. 12560165
  misc_feature (120)..(421): Pfam Name: Protein kinase domain Pfam Description: Protein kinase domain
  misc_feature (1)..(518): Homolog of NCBI NO: 15221465 NR Description: putative protein kinase; protein id: At1g30640.1
  misc_feature (1)..(498): Homolog of NCBI NO: 15225358 NR Description: putative protein kinase; protein id: At2g20470.1
  misc_feature (38)..(529): Homolog of NCBI NO: 25287691 NR Description: hypothetical protein [imported] - Arabidopsis
  misc_feature (38)..(529): Homolog of NCBI NO: 15219591 NR Description: putative protein kinase
  misc_feature (1)..(517): Homolog of NCBI NO: 37535354 NR Description: putative protein kinase [Oryza sativa (japonica
  misc_feature (82)..(546): Homolog of NCBI NO: 541816 NR Description: protein kinase (EC 2.7.1.-) - common ice plant
  misc_feature (1)..(524): Homolog of NCBI NO: 1076632 NR Description: protein kinase PKTL7 (EC 2.7.1.-) - common
  misc_feature (78)..(521): Homolog of NCBI NO: 7446413 NR Description: probable protein kinase - Arabidopsis thaliana
  misc_feature (1)..(546): Homolog of NCBI NO: 7339534 NR Description: protein kinase MK6 [Mesembryanthemum crystallinum]
  misc_feature (1)..(568): Homolog of NCBI NO: 22331282 NR Description: putative protein kinase
MDTARAWLKKLKSKGKEKSSNKKETSRGNVKEGSKTAGGEEAVSNVTKQKAAAAKQYIENHYKKQVQSQQQRKERRDMLENKLAAAEVSEEEQKNLLKDLEKKETEYMRRQRHKMGTDDFEPLTMIGKGAFGEVRICREKTTGNVYAMKKLKKSEMLRRGQVEHVKAERNLLAEVDSNCIVKLYCSFQDEEYLYLIMEYLPGGDMMTLLMRKDTLTEDEARFYVGETVLAIESIHKHNYIHRDIKPDNLLLDRSGHMKLSDFGLCKPLDCSILQEKDFVVAHNLSGALQSDGRPVAPRRTRSQMEQLQNWQRNRRMLAYSTVGTPDYIAPEVLLKKGYGMECDWWSLGAIMYEMLVGFPPFYSDEPMTTCRKIVNWKNYLKFPDEVRLSPEAKDLICRLLCNVEQRIGTKGANEIKEHPWFSGVEWEKLYQMKAAFIPQVNDELDTQNFEKFEETDKQVPKTPKSGPWRKMLSSKDINFVGYTYKNVEIVNHDQLPGIAELKKKSTKPKRPSIKSLFEDESASSTTSHQGSFMKLLPTQIEVPEKEDKSSSSSETLSSSTTRFDNATS

SEQ ID NO: 45046 - protein, 491 aa, Arabidopsis thaliana
  peptide (1)..(491): Ceres Seq. ID no. 12560166
  misc_feature (43)..(344): Pfam Name: Protein kinase domain Pfam Description: Protein kinase domain
  misc_feature (1)..(441): Homolog of NCBI NO: 15221465 NR Description: putative protein kinase; protein id: At1g30640.1
  misc_feature (1)..(421): Homolog of NCBI NO: 15225358 NR Description: putative protein kinase; protein id: At2g20470.1
  misc_feature (1)..(452): Homolog of NCBI NO: 25287691 NR Description: hypothetical protein [imported] - Arabidopsis
  misc_feature (1)..(452): Homolog of NCBI NO: 15219591 NR Description: putative protein kinase
  misc_feature (1)..(440): Homolog of NCBI NO: 37535354 NR Description: putative protein kinase [Oryza sativa (japonica
  misc_feature (5)..(469): Homolog of NCBI NO: 541816 NR Description: protein kinase (EC 2.7.1.-) - common ice plant
  misc_feature (1)..(447): Homolog of NCBI NO: 1076632 NR Description: protein kinase PKTL7 (EC 2.7.1.-) - common
  misc_feature (1)..(444): Homolog of NCBI NO: 7446413 NR Description: probable protein kinase - Arabidopsis thaliana
  misc_feature (1)..(469): Homolog of NCBI NO: 7339534 NR Description: protein kinase MK6 [Mesembryanthemum crystallinum]
  misc_feature (1)..(491): Homolog of NCBI NO: 22331282 NR Description: putative protein kinase
MLENKLAAAEVSEEEQKNLLKDLEKKETEYMRRQRHKMGTDDFEPLTMIGKGAFGEVRICREKTTGNVYAMKKLKKSEMLRRGQVEHVKAERNLLAEVDSNCIVKLYCSFQDEEYLYLIMEYLPGGDMMTLLMRKDTLTEDEARFYVGETVLAIESIHKHNYIHRDIKPDNLLLDRSGHMKLSDFGLCKPLDCSILQEKDFVVAHNLSGALQSDGRPVAPRRTRSQMEQLQNWQRNRRMLAYSTVGTPDYIAPEVLLKKGYGMECDWWSLGAIMYEMLVGFPPFYSDEPMTTCRKIVNWKNYLKFPDEVRLSPEAKDLICRLLCNVEQRIGTKGANEIKEHPWFSGVEWEKLYQMKAAFIPQVNDELDTQNFEKFEETDKQVPKTPKSGPWRKMLSSKDINFVGYTYKNVEIVNHDQLPGIAELKKKSTKPKRPSIKSLFEDESASSTTSHQGSFMKLLPTQIEVPEKEDKSSSSSETLSSSTTRFDNATS

SEQ ID NO: 45047 - protein, 461 aa, Arabidopsis thaliana
  peptide (1)..(461): Ceres Seq. ID no. 12560167
  misc_feature (13)..(314): Pfam Name: Protein kinase domain Pfam Description: Protein kinase domain
  misc_feature (1)..(411): Homolog of NCBI NO: 15221465 NR Description: putative protein kinase; protein id: At1g30640.1
  misc_feature (1)..(391): Homolog of NCBI NO: 15225358 NR Description: putative protein kinase; protein id: At2g20470.1
  misc_feature (1)..(422): Homolog of NCBI NO: 25287691 NR Description: hypothetical protein [imported] - Arabidopsis
  misc_feature (1)..(422): Homolog of NCBI NO: 15219591 NR Description: putative protein kinase
  misc_feature (1)..(410): Homolog of NCBI NO: 37535354 NR Description: putative protein kinase [Oryza sativa (japonica
  misc_feature (1)..(439): Homolog of NCBI NO: 541816 NR Description: protein kinase (EC 2.7.1.-) - common ice plant
  misc_feature (1)..(417): Homolog of NCBI NO: 1076632 NR Description: protein kinase PKTL7 (EC 2.7.1.-) - common
  misc_feature (1)..(414): Homolog of NCBI NO: 7446413 NR Description: probable protein kinase - Arabidopsis thaliana
  misc_feature (1)..(439): Homolog of NCBI NO: 7339534 NR Description: protein kinase MK6 [Mesembryanthemum crystallinum]
  misc_feature (1)..(461): Homolog of NCBI NO: 22331282 NR Description: putative protein kinase
MRRQRHKMGTDDFEPLTMIGKGAFGEVRICREKTTGNVYAMKKLKKSEMLRRGQVEHVKAERNLLAEVDSNCIVKLYCSFQDEEYLYLIMEYLPGGDMMTLLMRKDTLTEDEARFYVGETVLAIESIHKHNYIHRDIKPDNLLLDRSGHMKLSDFGLCKPLDCSILQEKDFVVAHNLSGALQSDGRPVAPRRTRSQMEQLQNWQRNRRMLAYSTVGTPDYIAPEVLLKKGYGMECDWWSLGAIMYEMLVGFPPFYSDEPMTTCRKIVNWKNYLKFPDEVRLSPEAKDLICRLLCNVEQRIGTKGANEIKEHPWFSGVEWEKLYQMKAAFIPQVNDELDTQNFEKFEETDKQVPKTPKSGPWRKMLSSKDINFVGYTYKNVEIVNHDQLPGIAELKKKSTKPKRPSIKSLFEDESASSTTSHQGSFMKLLPTQIEVPEKEDKSSSSSETLSSSTTRFDNATS

SEQ ID NO: 45048 - DNA, 1497 bp, Arabidopsis thaliana
  misc_feature (1)..(1497): Ceres Seq. ID no. 13575818
  misc_feature: MA Experiment ID: 20000180 Result: Up-regulated in Transcription
  misc_feature: MA Experiment 20000180 PARAMETER Experiment Name: At_Germinating_Seeds_P Parameter: Age (hr) Value: 24 vs. 0
  misc_feature: MA Experiment 20000180 PARAMETER Experiment Name: At_Germinating_Seeds_P Parameter: Tissue Value: Germinating Seeds
  misc_feature: MA Experiment ID: 20000182 Result: Down-regulated in Transcription
  misc_feature: MA Experiment 20000182 PARAMETER Experiment Name: At_2mM_SA_P Parameter: Age (day) Value: 14
  misc_feature: MA Experiment 20000182 PARAMETER Experiment Name: At_2mM_SA_P Parameter: Organism Value: A. thaliana
  misc_feature: MA Experiment 20000182 PARAMETER Experiment Name: At_2mM_SA_P Parameter: Plant Line Value: WS
  misc_feature: MA Experiment 20000182 PARAMETER Experiment Name: At_2mM_SA_P Parameter: Timepoint (hr) Value: 6
  misc_feature: MA Experiment 20000182 PARAMETER Experiment Name: At_2mM_SA_P Parameter: Tissue Value: Aerial
  misc_feature: MA Experiment 20000182 PARAMETER Experiment Name: At_2mM_SA_P Parameter: Treatment Value: 2mM SA vs. No Treatment
  misc_feature: MA Experiment ID: 20000234 Result: Up-regulated in Transcription
  misc_feature: MA Experiment 20000234 PARAMETER Experiment Name: At_Siliques_P Parameter: Age (day) Value: 21
  misc_feature: MA Experiment 20000234 PARAMETER Experiment Name: At_Siliques_P Parameter: Organism Value: A. thaliana
  misc_feature: MA Experiment 20000234 PARAMETER Experiment Name: At_Siliques_P Parameter: Plant Line Value: WS
  misc_feature: MA Experiment 20000234 PARAMETER Experiment Name: At_Siliques_P Parameter: Tissue Value: Less Than 5mm Siliques vs. Whole Plant
  misc_feature: MA Experiment ID: 20000235 Result: Up-regulated in Transcription
  misc_feature: MA Experiment 20000235 PARAMETER Experiment Name: At_Siliques_P Parameter: Age (day) Value: 21
  misc_feature: MA Experiment 20000235 PARAMETER Experiment Name: At_Siliques_P Parameter: Organism Value: A. thaliana
  misc_feature: MA Experiment 20000235 PARAMETER Experiment Name: At_Siliques_P Parameter: Plant Line Value: WS
  misc_feature: MA Experiment 20000235 PARAMETER Experiment Name: At_Siliques_P Parameter: Tissue Value: 5-10mm Siliques vs. Whole Plant
  misc_feature: MA Experiment ID: 20000265 Result: Up-regulated in Transcription
  misc_feature: MA Experiment 20000265 PARAMETER Experiment Name: At_Open_Flower_P Parameter: Age (day) Value: 21
  misc_feature: MA Experiment 20000265 PARAMETER Experiment Name: At_Open_Flower_P Parameter: Plant Line Value: WS
  misc_feature: MA Experiment 20000265 PARAMETER Experiment Name: At_Open_Flower_P Parameter: Tissue Value: Closed Flower vs. Whole Plant
  misc_feature: MA Experiment ID: 20001911 Result: Down-regulated in Transcription
  misc_feature: MA Experiment 20001911 PARAMETER Experiment Name: At_Drought_Reproduction_P Parameter: Age (day) Value: 40
  misc_feature: MA Experiment 20001911 PARAMETER Experiment Name: At_Drought_Reproduction_P Parameter: Organism Value: A. thaliana
  misc_feature: MA Experiment 20001911 PARAMETER Experiment Name: At_Drought_Reproduction_P Parameter: Plant Line Value: WS
  misc_feature: MA Experiment 20001911 PARAMETER Experiment Name: At_Drought_Reproduction_P Parameter: Timepoint (day) Value: 10
  misc_feature: MA Experiment 20001911 PARAMETER Experiment Name: At_Drought_Reproduction_P Parameter: Tissue Value: Flowers
  misc_feature: MA Experiment 20001911 PARAMETER Experiment Name: At_Drought_Reproduction_P Parameter: Treatment Value: Drought vs. No Drought
ggatctcacttgccttcttcactcactctgcagcaacttcgagatcaagttaaagaatggcggcaacatcactattgtacaatcagctcaaggctgctgaaccattcttcttgttggctggtccaaatgtgattgaatccgaggaacatattcttcgaatggcaaagcacattaaagacatttccacaaaagttgggctgcccctggttttcaagtcaagttttgataaagctaacagaacttcttcaaagtcatttcgtggtcctggcatggccgagggtctgaagattcttgagaaggtgaaggtagcatatgatctaccaatagtaactgatgttcatgaatcaagccagtgtgaagcagttggcaaggttgcagatataattcagattccagcattcttatgtcgccagacagatcttctggttgcagcagcacaaaccggaaaaattatcaatattaagaaaggacaattctgtgctccttctgtcatggagaattcagctgagaagatcagactggctgggaatccaaatgttatggtttgtgaaagaggaaccatgttcggatacaatgatttgatagtagatccacgaaacttcgagtggatgagagaagctaattgtcctgttgtcgctgatataacccattcactacaacaacctgcaggcaagaagttggatggtggtggtgttgcaagtggaggccttcgcgagttaataccatgcattgcaagaacagctgtagcagttggcgtcgatggaattttcatggaggttcatgatgatcctctaagtgctccagttgatggtccaactcaatggcctttgcgccatctagaagaactcctggaagagctcattgcgattgcgagggttacaaaagggaagcagcggcttcaaatcgaccttacaccctaccgtgattaaaatcaaaggctcagtgatcgcgaggttggtgacccaaacgggcatatatgatacgactttctcatcatttaaataatccccacaaaaaaactgtttataatcttctcactttcagtagagactagttgcaaaaagggtgaacgttttaaagaagcaccatgttaatgcatcatctgtcatcactgttcttgtttacaagaagttaagagatcagagattgcttctgaagaactgaaaatgttgggcttctcttatattggcccggcaatattcttattcatttgtctgaaacttttaggtctactcgcggacatttgggtccccatcaaaatcccagagattaaagatgatctagtcagtgatgagcctttgtttctgtttcctccaccaacattcgcttcaaaataattcgaattaagaaagtattgagctctatactatagtcatactcagaaatacggttgtatatgtgtggtttctctctgattttgtacttgggataatatatctgttgaaccctgtaatttctcgtgaacgggatgatagtcgtgcttgatttgcgttggat

SEQ ID NO: 45049 - protein, 290 aa, Arabidopsis thaliana
  peptide (1)..(290): Ceres Seq. ID no. 13575819
  misc_feature (16)..(276): Homolog of NCBI NO: 33593377 NR Description: 2-dehydro-3-deoxyphosphooctonate aldolase
  misc_feature (17)..(277): Homolog of NCBI NO: 34762974 NR Description: 2-dehydro-3-deoxyphosphooctonate aldolase
  misc_feature (1)..(290): Homolog of NCBI NO: 13509333 NR Description: 3-desoxy-D-manno octulosonic acid-8-phosphate
  misc_feature (1)..(290): Homolog of NCBI NO: 29367487 NR Description: putative 2-dehydro-3-deoxyphosphooctonate
  misc_feature (1)..(290): Homolog of NCBI NO: 6647535 NR Description: 2-dehydro-3-deoxyphosphooctonate aldolase aldolase) (3-deoxy-D-manno-octulosonic acid 8-phosphate
  misc_feature (3)..(290): Homolog of NCBI NO: 25291179 NR Description: hypothetical protein F3O9.14 [imported] -
  misc_feature (3)..(290): Homolog of NCBI NO: 15219214 NR Description: 3-deoxy-D-manno-2-octulosonate-8-phosphate
  misc_feature (1)..(290): Homolog of NCBI NO: 13620976 NR Description: 2-dehydro-3-deoxyphosphooctonate aldolase
  misc_feature (1)..(290): Homolog of NCBI NO: 21360537 NR Description: AT5g09730/F17I14_80 [Arabidopsis thaliana]
  misc_feature (1)..(290): Homolog of NCBI NO: 15219400 NR Description: 2-dehydro-3-deoxyphosphooctonate aldolase
MAATSLLYNQLKAAEPFFLLAGPNVIESEEHILRMAKHIKDISTKVGLPLVFKSSFDKANRTSSKSFRGPGMAEGLKILEKVKVAYDLPIVTDVHESSQCEAVGKVADIIQIPAFLCRQTDLLVAAAQTGKIINIKKGQFCAPSVMENSAEKIRLAGNPNVMVCERGTMFGYNDLIVDPRNFEWMREANCPVVADITHSLQQPAGKKLDGGGVASGGLRELIPCIARTAVAVGVDGIFMEVHDDPLSAPVDGPTQWPLRHLEELLEELIAIARVTKGKQRLQIDLTPYRD

SEQ ID NO: 45050 - protein, 256 aa, Arabidopsis thaliana
  peptide (1)..(256): Ceres Seq. ID no. 13575820
  misc_feature (1)..(242): Homolog of NCBI NO: 33593377 NR Description: 2-dehydro-3-deoxyphosphooctonate aldolase
  misc_feature (1)..(243): Homolog of NCBI NO: 34762974 NR Description: 2-dehydro-3-deoxyphosphooctonate aldolase
  misc_feature (1)..(256): Homolog of NCBI NO: 13509333 NR Description: 3-desoxy-D-manno octulosonic acid-8-phosphate
  misc_feature (1)..(256): Homolog of NCBI NO: 29367487 NR Description: putative 2-dehydro-3-deoxyphosphooctonate
  misc_feature (1)..(256): Homolog of NCBI NO: 6647535 NR Description: 2-dehydro-3-deoxyphosphooctonate aldolase aldolase) (3-deoxy-D-manno-octulosonic acid 8-phosphate
  misc_feature (1)..(256): Homolog of NCBI NO: 25291179 NR Description: hypothetical protein F3O9.14 [imported] -
  misc_feature (1)..(256): Homolog of NCBI NO: 15219214 NR Description: 3-deoxy-D-manno-2-octulosonate-8-phosphate
  misc_feature (1)..(256): Homolog of NCBI NO: 13620976 NR Description: 2-dehydro-3-deoxyphosphooctonate aldolase
  misc_feature (1)..(256): Homolog of NCBI NO: 21360537 NR Description: AT5g09730/F17I14_80 [Arabidopsis thaliana]
  misc_feature (1)..(256): Homolog of NCBI NO: 15219400 NR Description: 2-dehydro-3-deoxyphosphooctonate aldolase
MAKHIKDISTKVGLPLVFKSSFDKANRTSSKSFRGPGMAEGLKILEKVKVAYDLPIVTDVHESSQCEAVGKVADIIQIPAFLCRQTDLLVAAAQTGKIINIKKGQFCAPSVMENSAEKIRLAGNPNVMVCERGTMFGYNDLIVDPRNFEWMREANCPVVADITHSLQQPAGKKLDGGGVASGGLRELIPCIARTAVAVGVDGIFMEVHDDPLSAPVDGPTQWPLRHLEELLEELIAIARVTKGKQRLQIDLTPYRD

SEQ ID NO: 45051 - protein, 219 aa, Arabidopsis thaliana
  peptide (1)..(219): Ceres Seq. ID no. 13575821
  misc_feature (1)..(205): Homolog of NCBI NO: 33593377 NR Description: 2-dehydro-3-deoxyphosphooctonate aldolase
  misc_feature (1)..(206): Homolog of NCBI NO: 34762974 NR Description: 2-dehydro-3-deoxyphosphooctonate aldolase
  misc_feature (1)..(219): Homolog of NCBI NO: 13509333 NR Description: 3-desoxy-D-manno octulosonic acid-8-phosphate
  misc_feature (1)..(219): Homolog of NCBI NO: 29367487 NR Description: putative 2-dehydro-3-deoxyphosphooctonate
  misc_feature (1)..(219): Homolog of NCBI NO: 6647535 NR Description: 2-dehydro-3-deoxyphosphooctonate aldolase aldolase) (3-deoxy-D-manno-octulosonic acid 8-phosphate
  misc_feature (1)..(219): Homolog of NCBI NO: 25291179 NR Description: hypothetical protein F3O9.14 [imported] -
  misc_feature (1)..(219): Homolog of NCBI NO: 15219214 NR Description: 3-deoxy-D-manno-2-octulosonate-8-phosphate
  misc_feature (1)..(219): Homolog of NCBI NO: 13620976 NR Description: 2-dehydro-3-deoxyphosphooctonate aldolase
  misc_feature (1)..(219): Homolog of NCBI NO: 21360537 NR Description: AT5g09730/F17I14_80 [Arabidopsis thaliana]
  misc_feature (1)..(219): Homolog of NCBI NO: 15219400 NR Description: 2-dehydro-3-deoxyphosphooctonate aldolase
MAEGLKILEKVKVAYDLPIVTDVHESSQCEAVGKVADIIQIPAFLCRQTDLLVAAAQTGKIINIKKGQFCAPSVMENSAEKIRLAGNPNVMVCERGTMFGYNDLIVDPRNFEWMREANCPVVADITHSLQQPAGKKLDGGGVASGGLRELIPCIARTAVAVGVDGIFMEVHDDPLSAPVDGPTQWPLRHLEELLEELIAIARVTKGKQRLQIDLTPYRD

SEQ ID NO: 45052 - DNA, 1976 bp, Arabidopsis thaliana
  misc_feature (1)..(1976): Ceres Seq. ID no. 13575822
  misc_feature: MA Experiment ID: 20001905 Result: Up-regulated in Transcription
  misc_feature: MA Experiment 20001905 PARAMETER Experiment Name: At_Drought_Reproduction_P Parameter: Age (day) Value: 40
  misc_feature: MA Experiment 20001905 PARAMETER Experiment Name: At_Drought_Reproduction_P Parameter: Organism Value: A. thaliana
  misc_feature: MA Experiment 20001905 PARAMETER Experiment Name: At_Drought_Reproduction_P Parameter: Plant Line Value: WS
  misc_feature: MA Experiment 20001905 PARAMETER Experiment Name: At_Drought_Reproduction_P Parameter: Timepoint (day) Value: 10
  misc_feature: MA Experiment 20001905 PARAMETER Experiment Name: At_Drought_Reproduction_P Parameter: Tissue Value: Rosettes
  misc_feature: MA Experiment 20001905 PARAMETER Experiment Name: At_Drought_Reproduction_P Parameter: Treatment Value: Drought vs. No Drought
gaaaagaggagagaagaaagaaaaggaaaagacccaaactttgagaaacaccttcattctcttccttccttcatcaaagcttaaccttttttaatttttatcctcgttttttcaattcgcgtgaagagacagagagagagaaagataaagctagaagagaatcgacattacgaatcttttgttccagatcgtgagagaggaggagttggaagaatgaagatgactattgggtctttgttccaaccctaattttgcagattaatttcgtttttgttgatttctgttttgggtttgcgttgctgattccggtggattaaagggttctttttggagagcacaaatttgttgggtttttttttggggaaagagaattaaaattttctcctttagagtcggcgtttgggttgagagagattattatagtttttagggttttggatttctgaattggtgattatcgatggagcctcgtgtgggaaacaaatatcgtctcggccggaaaattggaagcggttcatttggagagatctatcttggtactcatattcaaacgaatgaagaagttgcaatcaagcttgaaaatgtgaagacgaaacatcctcagctgctctatgaatccaagttatacagaattctacagggaggaactggtgttccaaatatcaagtggtttggtgttgaaggtgactacaatactctggtgatggatttacttgggcctagtcttgaagacttgttcaatttctgtagcaggaaactttccttgaagtctgtcctcatgctcgcagatcaaatgatcaaccgtgttgagtatttccattcgaaatctttccttcaccgagatcttaagccagacaattttcttatgggtttaggaaggcgcgcaaaccaggtacacatcatcgactttggtcttgcaaagaaataccgggataatactacccaccagcacattccctacagagaaaataagaatctgactggaactgcaagatatgctagtatgaacactcacttgggaattgagcaaagccgaagggatgacctagaatctcttggttacattctcatgtatttccttaaaggaagtcttccatggcaaggacttaaagctggaaccaagaaacaaaagtatgagagaatcagtgaaaagaaagtctctacatcaattgagtccttgtgccgtggttacccatccgaattcgcatcgtacttccactactgccgatcgcttcggtttgatgataaaccagattacggttacctcaaaagaatattccgggacctctttatccgcgaagggtttcaattcgattatgtctttgactggaccatattgaaatatcaacagtcacagctaaccgctcctccatcccgtggcctagtaagtcctgcggttggaaccagtgcgggtttgcctcccggactaaccagcatcgatagatacggaggcgaggaagaaggaggaagaccaccaatggattcgtcacgaaggagaatgtcaggagctcttgaaaactctggcaacttgtcatctagaggcccaatgatgccaagctcgtcactgtttgcacaatcagcaggatcatcgaggagagtaacgtcagaggagctacagagatgccgaaccggcgccggtttaagaaactctccggtagttacaacgccggaagggaagagatcttcttccaccagaaaacattacgattctgctatcaaaggcattgagactctccaagtctccgacgaaaggtttcaccaccactgatacatcatccatccatcgcttagcaaagttgtcgtatttgttcagagctttttatttgctttcgactctatattggagaaacgagaaaatttgctgatttttttttgtttgctttggttttttctaatttttattcatctggttcttttactgcggagggaaattaaattcagtgtttggaattggaacatcgtatatatagtttttt

SEQ ID NO: 45053 - protein, 435 aa, Arabidopsis thaliana
  peptide (1)..(435): Ceres Seq. ID no. 13575823
  misc_feature (1)..(426): Homolog of NCBI NO: 15229427 NR Description: casein kinase, putative [Arabidopsis thaliana]
  misc_feature (40)..(379): Homolog of NCBI NO: 6635385 NR Description: casein kinase I-like protein [Brassica oleracea]
  misc_feature (1)..(405): Homolog of NCBI NO: 15224781 NR Description: casein kinase, putative [Arabidopsis thaliana]
  misc_feature (1)..(167): Homolog of NCBI NO: 20161073 NR Description: putative casein kinase [Oryza sativa (japonica
  misc_feature (154)..(413): Homolog of NCBI NO: 20161073 NR Description: putative casein kinase [Oryza sativa (japonica
  misc_feature (1)..(431): Homolog of NCBI NO: 34910448 NR Description: putative casein kinase I [Oryza sativa (japonica
  misc_feature (1)..(408): Homolog of NCBI NO: 15218569 NR Description: casein kinase, putative [Arabidopsis thaliana]
  misc_feature (1)..(375): Homolog of NCBI NO: 549973 NR Description: casein kinase I-like protein
  misc_feature (1)..(434): Homolog of NCBI NO: 15236114 NR Description: casein kinase, putative [Arabidopsis thaliana]
  misc_feature (1)..(435): Homolog of NCBI NO: 22327902 NR Description: casein kinase, putative [Arabidopsis thaliana]
MEPRVGNKYRLGRKIGSGSFGEIYLGTHIQTNEEVAIKLENVKTKHPQLLYESKLYRILQGGTGVPNIKWFGVEGDYNTLVMDLLGPSLEDLFNFCSRKLSLKSVLMLADQMINRVEYFHSKSFLHRDLKPDNFLMGLGRRANQVHIIDFGLAKKYRDNTTHQHIPYRENKNLTGTARYASMNTHLGIEQSRRDDLESLGYILMYFLKGSLPWQGLKAGTKKQKYERISEKKVSTSIESLCRGYPSEFASYFHYCRSLRFDDKPDYGYLKRIFRDLFIREGFQFDYVFDWTILKYQQSQLTAPPSRGLVSPAVGTSAGLPPGLTSIDRYGGEEEGGRPPMDSSRRRMSGALENSGNLSSRGPMMPSSSLFAQSAGSSRRVTSEELQRCRTGAGLRNSPVVTTPEGKRSSSTRKHYDSAIKGIETLQVSDERFHHH

SEQ ID NO: 45054 - protein, 354 aa, Arabidopsis thaliana
  peptide (1)..(354): Ceres Seq. ID no. 13575824
  misc_feature (1)..(345): Homolog of NCBI NO: 15229427 NR Description: casein kinase, putative [Arabidopsis thaliana]
  misc_feature (1)..(298): Homolog of NCBI NO: 6635385 NR Description: casein kinase I-like protein [Brassica oleracea]
  misc_feature (1)..(324): Homolog of NCBI NO: 15224781 NR Description: casein kinase, putative [Arabidopsis thaliana]
  misc_feature (1)..(86): Homolog of NCBI NO: 20161073 NR Description: putative casein kinase [Oryza sativa (japonica
  misc_feature (73)..(332): Homolog of NCBI NO: 20161073 NR Description: putative casein kinase [Oryza sativa (japonica
  misc_feature (1)..(350): Homolog of NCBI NO: 34910448 NR Description: putative casein kinase I [Oryza sativa (japonica
  misc_feature (1)..(327): Homolog of NCBI NO: 15218569 NR Description: casein kinase, putative [Arabidopsis thaliana]
  misc_feature (1)..(294): Homolog of NCBI NO: 549973 NR Description: casein kinase I-like protein
  misc_feature (1)..(353): Homolog of NCBI NO: 15236114 NR Description: casein kinase, putative [Arabidopsis thaliana]
  misc_feature (1)..(354): Homolog of NCBI NO: 22327902 NR Description: casein kinase, putative [Arabidopsis thaliana]
MDLLGPSLEDLFNFCSRKLSLKSVLMLADQMINRVEYFHSKSFLHRDLKPDNFLMGLGRRANQVHIIDFGLAKKYRDNTTHQHIPYRENKNLTGTARYASMNTHLGIEQSRRDDLESLGYILMYFLKGSLPWQGLKAGTKKQKYERISEKKVSTSIESLCRGYPSEFASYFHYCRSLRFDDKPDYGYLKRIFRDLFIREGFQFDYVFDWTILKYQQSQLTAPPSRGLVSPAVGTSAGLPPGLTSIDRYGGEEEGGRPPMDSSRRRMSGALENSGNLSSRGPMMPSSSLFAQSAGSSRRVTSEELQRCRTGAGLRNSPVVTTPEGKRSSSTRKHYDSAIKGIETLQVSDERFHHH

SEQ ID NO: 45055 - protein, 329 aa, Arabidopsis thaliana
  peptide (1)..(329): Ceres Seq. ID no. 13575825
  misc_feature (1)..(320): Homolog of NCBI NO: 15229427 NR Description: casein kinase, putative [Arabidopsis thaliana]
  misc_feature (1)..(273): Homolog of NCBI NO: 6635385 NR Description: casein kinase I-like protein [Brassica oleracea]
  misc_feature (1)..(299): Homolog of NCBI NO: 15224781 NR Description: casein kinase, putative [Arabidopsis thaliana]
  misc_feature (1)..(61): Homolog of NCBI NO: 20161073 NR Description: putative casein kinase [Oryza sativa (japonica
  misc_feature (48)..(307): Homolog of NCBI NO: 20161073 NR Description: putative casein kinase [Oryza sativa (japonica
  misc_feature (1)..(325): Homolog of NCBI NO: 34910448 NR Description: putative casein kinase I [Oryza sativa (japonica
  misc_feature (1)..(302): Homolog of NCBI NO: 15218569 NR Description: casein kinase, putative [Arabidopsis thaliana]
  misc_feature (1)..(269): Homolog of NCBI NO: 549973 NR Description: casein kinase I-like protein
  misc_feature (1)..(328): Homolog of NCBI NO: 15236114 NR Description: casein kinase, putative [Arabidopsis thaliana]
  misc_feature (1)..(329): Homolog of NCBI NO: 22327902 NR Description: casein kinase, putative [Arabidopsis thaliana]
MLADQMINRVEYFHSKSFLHRDLKPDNFLMGLGRRANQVHIIDFGLAKKYRDNTTHQHIPYRENKNLTGTARYASMNTHLGIEQSRRDDLESLGYILMYFLKGSLPWQGLKAGTKKQKYERISEKKVSTSIESLCRGYPSEFASYFHYCRSLRFDDKPDYGYLKRIFRDLFIREGFQFDYVFDWTILKYQQSQLTAPPSRGLVSPAVGTSAGLPPGLTSIDRYGGEEEGGRPPMDSSRRRMSGALENSGNLSSRGPMMPSSSLFAQSAGSSRRVTSEELQRCRTGAGLRNSPVVTTPEGKRSSSTRKHYDSAIKGIETLQVSDERFHHH

SEQ ID NO: 45056 - DNA, 2186 bp, Arabidopsis thaliana
  misc_feature (1)..(2186): Ceres Seq. ID no. 13575826
  misc_feature: MA Experiment ID: 20000327 Result: Up-regulated in Transcription
  misc_feature: MA Experiment 20000327 PARAMETER Experiment Name: At_42deg_Heat_Sub_P Parameter: Age (day) Value: 14
  misc_feature: MA Experiment 20000327 PARAMETER Experiment Name: At_42deg_Heat_Sub_P Parameter: Organism Value: A. thaliana
  misc_feature: MA Experiment 20000327 PARAMETER Experiment Name: At_42deg_Heat_Sub_P Parameter: Plant Line Value: WS
  misc_feature: MA Experiment 20000327 PARAMETER Experiment Name: At_42deg_Heat_Sub_P Parameter: Temperature (deg C) Value: 42 vs. 22
  misc_feature: MA Experiment 20000327 PARAMETER Experiment Name: At_42deg_Heat_Sub_P Parameter: Timepoint (hr) Value: 1
  misc_feature: MA Experiment 20000327 PARAMETER Experiment Name: At_42deg_Heat_Sub_P Parameter: Tissue Value: Aerial
  misc_feature: MA Experiment ID: 20000328 Result: Up-regulated in Transcription
  misc_feature: MA Experiment 20000328 PARAMETER Experiment Name: At_42deg_Heat_Sub_P Parameter: Age (day) Value: 14
  misc_feature: MA Experiment 20000328 PARAMETER Experiment Name: At_42deg_Heat_Sub_P Parameter: Organism Value: A. thaliana
  misc_feature: MA Experiment 20000328 PARAMETER Experiment Name: At_42deg_Heat_Sub_P Parameter: Plant Line Value: WS
  misc_feature: MA Experiment 20000328 PARAMETER Experiment Name: At_42deg_Heat_Sub_P Parameter: Temperature (deg C) Value: 42 vs. 22
  misc_feature: MA Experiment 20000328 PARAMETER Experiment Name: At_42deg_Heat_Sub_P Parameter: Timepoint (hr) Value: 6
  misc_feature: MA Experiment 20000328 PARAMETER Experiment Name: At_42deg_Heat_Sub_P Parameter: Tissue Value: Aerial
aatacttctctctgctctcaagataattttgttctctcaatttcattcttaaaccctaattcttcgtttttatccgatctacgaaaatggcggacgcagagacctttgctttccaagctgagatcaaccagttgctttccctcatcatcaataccttttactccaacaaggagatcttcctccgtgaactcatcagtaactcctccgatgctttggacaagattaggttcgagtccttgacggataagagcaagctcgatggtcagcctgagcttttcattcatatcattccggacaagactaacaacaccttgaccattatcgatagtggtattgggatgaccaaggctgatttggtgaacaaccttggaacaattgcaaggtctggtaccaaggagttcatggaggcattggctgctggagctgatgttagcatgattggtcaatttggtgttggtttctactctgcttacttggttgctgacaaggttgttgttactaccaagcacaacgacgatgagcagtatgtgtgggagtctcaggccggtggatctttcacggtgaccagagacacctctggtgaggctcttggtagaggaacaaagatgatcctttacctcaaggaagaccagatggagtacattgaggagcgaaggcttaaggatttggtgaagaagcactctgagttcatcagctacccaatctctctctggattgagaagaccattgagaaggagatctctgatgatgaagaggaggaagagaagaaggatgaggaaggcaaggttgaggaaattgatgaggagaaagaaaaggaggagaagaaaaagaagaagattaaggaggttactcatgagtgggatttggtgaacaaacagaagcctatctggatgaggaagccagaggagatcaacaaggaggagtacgctgctttctacaagagtttgagcaatgattgggaggagcatttggctgtgaagcatttctctgttgaaggacagcttgagttcaaagctatcctctttgttcccaagagagctcctttcgatctctttgacactaagaagaagcccaacaacatcaagctctatgtccgtcgtgtcttcatcatggacaactgtgaagacatcatccctgattaccttgggtttgtcaagggtatcgttgactctgaagatcttcctctcaacatctcaagagaaacattgcagcagaacaagatcctcaaggtcatccgcaagaaccttgtgaagaagtgtcttgagctcttctttgagattgccgagaacaaggaggactacaacaagttctatgaggctttctctaaaaacctgaagctcggcatccacgaggactcccaaaacagaaccaagattgctgagttgctccgttaccactcaaccaagagcggtgatgaattgaccagtctcaaggactacgtgacaaggatgaaggaaggtcagaacgagatcttctacatcaccggtgagagcaaaaaggccgtggagaactctcccttcctagagaagctcaagaagaagggttacgaagtcctctacatggttgacgctattgatgagtatgctattggtcagctcaaggaattcgagggaaagaagcttgtctctgcaaccaaggaaggtctgaagctggaagagactgatgacgagaagaagaagaaagaagagctcaaggagaagtttgagggactctgcaaagtgattaaggacgttttgggagacaaggtcgagaaggttatcgtctctgaccgtgtggtggactcaccttgctgtctagtaacaggcgagtatggctggactgcaaacatggagaggatcatgaaagctcaagctttgaaggatagcaacacgggtggttacatgtcaagcaagaagacaatggaaattaacccagagaactcgatcatggatgagctgagaaagagagctgaagcggacaagaacgataagtctgtgaaggatcttgtgcttcttctctttgagaccgctcttctcacctctggtttcagccttgatgagcccaacacttttggaagcagaatccacaggatgttgaagcttggattgagcattgaagaggatgatgccgttgaagctgatgctgagatgcctccgcttgaagatgatgctgatgctgaaggtagcaagatggaggaagtcgactaa

SEQ ID NO: 45057 - protein, 699 aa, Arabidopsis thaliana
  peptide (1)..(699): Ceres Seq. ID no. 15222635
  misc_feature (184)..(699): Pfam Name: Hsp90 protein Pfam Description: Hsp90 protein
  misc_feature (184)..(699): Pfam Name: Hsp90 protein Pfam Description: Hsp90 protein
  misc_feature (4)..(699): Homolog of NCBI NO: 2239253 NR Description: gp96/GRP94 [Sus scrofa]
  misc_feature (4)..(699): Homolog of NCBI NO: 7441885 NR Description: protein kinase ppk98 (EC 2.7.1.-) precursor,
  misc_feature (4)..(699): Homolog of NCBI NO: 4507677 NR Description: tumor rejection antigen (gp96) 1
  misc_feature (4)..(699): Homolog of NCBI NO: 27807263 NR Description: tumor rejection antigen (gp96) 1 [Bos taurus]
  misc_feature (4)..(699): Homolog of NCBI NO: 119359 NR Description: Endoplasmin precursor (Heat shock 108 kDa
  misc_feature (4)..(699): Homolog of NCBI NO: 2239253 NR Description: gp96/GRP94 [Sus scrofa]
  misc_feature (4)..(699): Homolog of NCBI NO: 4507677 NR Description: tumor rejection antigen (gp96) 1
  misc_feature (4)..(699): Homolog of NCBI NO: 119359 NR Description: Endoplasmin precursor (Heat shock 108 kDa
  misc_feature (211)..(699): Homolog of NCBI NO: 29145077 NR Description: Hspca protein [Mus musculus]
  misc_feature (3)..(280): Homolog of NCBI NO: 29145077 NR Description: Hspca protein [Mus musculus]
  misc_feature (1)..(699): Homolog of NCBI NO: 12005809 NR Description: 90-kDa heat shock protein HSP83 [Spodoptera
  misc_feature (4)..(697): Homolog of NCBI NO: 6755863 NR Description: tumor rejection antigen gp96; tumor rejection
  misc_feature (4)..(697): Homolog of NCBI NO: 14714615 NR Description: tumor rejection antigen gp96 [Mus musculus]
  misc_feature (4)..(699): Homolog of NCBI NO: 27807263 NR Description: tumor rejection antigen (gp96) 1 [Bos taurus]
  misc_feature (4)..(699): Homolog of NCBI NO: 7441885 NR Description: protein kinase ppk98 (EC 2.7.1.-) precursor,
  misc_feature (4)..(697): Homolog of NCBI NO: 14714615 NR Description: tumor rejection antigen gp96 [Mus musculus]
  misc_feature (4)..(697): Homolog of NCBI NO: 6755863 NR Description: tumor rejection antigen gp96; tumor rejection
  misc_feature (1)..(699): Homolog of NCBI NO: 12005809 NR Description: 90-kDa heat shock protein HSP83 [Spodoptera
  misc_feature (3)..(280): Homolog of NCBI NO: 29145077 NR Description: Hspca protein [Mus musculus]
  misc_feature (211)..(699): Homolog of NCBI NO: 29145077 NR Description: Hspca protein [Mus musculus]
MADAETFAFQAEINQLLSLIINTFYSNKEIFLRELISNSSDALDKIRFESLTDKSKLDGQPELFIHIIPDKTNNTLTIIDSGIGMTKADLVNNLGTIARSGTKEFMEALAAGADVSMIGQFGVGFYSAYLVADKVVVTTKHNDDEQYVWESQAGGSFTVTRDTSGEALGRGTKMILYLKEDQMEYIEERRLKDLVKKHSEFISYPISLWIEKTIEKEISDDEEEEEKKDEEGKVEEIDEEKEKEEKKKKKIKEVTHEWDLVNKQKPIWMRKPEEINKEEYAAFYKSLSNDWEEHLAVKHFSVEGQLEFKAILFVPKRAPFDLFDTKKKPNNIKLYVRRVFIMDNCEDIIPDYLGFVKGIVDSEDLPLNISRETLQQNKILKVIRKNLVKKCLELFFEIAENKEDYNKFYEAFSKNLKLGIHEDSQNRTKIAELLRYHSTKSGDELTSLKDYVTRMKEGQNEIFYITGESKKAVENSPFLEKLKKKGYEVLYMVDAIDEYAIGQLKEFEGKKLVSATKEGLKLEETDDEKKKKEELKEKFEGLCKVIKDVLGDKVEKVIVSDRVVDSPCCLVTGEYGWTANMERIMKAQALKDSNTGGYMSSKKTMEINPENSIMDELRKRAEADKNDKSVKDLVLLLFETALLTSGFSLDEPNTFGSRIHRMLKLGLSIEEDDAVEADAEMPPLEDDADAEGSKMEEVD

SEQ ID NO: 45058 - protein, 615 aa, Arabidopsis thaliana
  peptide (1)..(615): Ceres Seq. ID no. 15222636
  misc_feature (100)..(615): Pfam Name: Hsp90 protein Pfam Description: Hsp90 protein
  misc_feature (100)..(615): Pfam Name: Hsp90 protein Pfam Description: Hsp90 protein
  misc_feature (1)..(615): Homolog of NCBI NO: 2239253 NR Description: gp96/GRP94 [Sus scrofa]
  misc_feature (1)..(615): Homolog of NCBI NO: 7441885 NR Description: protein kinase ppk98 (EC 2.7.1.-) precursor,
  misc_feature (1)..(615): Homolog of NCBI NO: 4507677 NR Description: tumor rejection antigen (gp96) 1
  misc_feature (1)..(615): Homolog of NCBI NO: 27807263 NR Description: tumor rejection antigen (gp96) 1 [Bos taurus]
  misc_feature (1)..(615): Homolog of NCBI NO: 119359 NR Description: Endoplasmin precursor (Heat shock 108 kDa
  misc_feature (1)..(615): Homolog of NCBI NO: 2239253 NR Description: gp96/GRP94 [Sus scrofa]
  misc_feature (1)..(615): Homolog of NCBI NO: 4507677 NR Description: tumor rejection antigen (gp96) 1
  misc_feature (1)..(615): Homolog of NCBI NO: 119359 NR Description: Endoplasmin precursor (Heat shock 108 kDa
  misc_feature (127)..(615): Homolog of NCBI NO: 29145077 NR Description: Hspca protein [Mus musculus]
  misc_feature (1)..(196): Homolog of NCBI NO: 29145077 NR Description: Hspca protein [Mus musculus]
  misc_feature (1)..(615): Homolog of NCBI NO: 12005809 NR Description: 90-kDa heat shock protein HSP83 [Spodoptera
  misc_feature (1)..(613): Homolog of NCBI NO: 6755863 NR Description: tumor rejection antigen gp96; tumor rejection
  misc_feature (1)..(613): Homolog of NCBI NO: 14714615 NR Description: tumor rejection antigen gp96 [Mus musculus]
  misc_feature (1)..(615): Homolog of NCBI NO: 27807263 NR Description: tumor rejection antigen (gp96) 1 [Bos taurus]
  misc_feature (1)..(615): Homolog of NCBI NO: 7441885 NR Description: protein kinase ppk98 (EC 2.7.1.-) precursor,
  misc_feature (1)..(613): Homolog of NCBI NO: 14714615 NR Description: tumor rejection antigen gp96 [Mus musculus]
  misc_feature (1)..(613): Homolog of NCBI NO: 6755863 NR Description: tumor rejection antigen gp96; tumor rejection
  misc_feature (1)..(615): Homolog of NCBI NO: 12005809 NR Description: 90-kDa heat shock protein HSP83 [Spodoptera
  misc_feature (1)..(196): Homolog of NCBI NO: 29145077 NR Description: Hspca protein [Mus musculus]
  misc_feature (127)..(615): Homolog of NCBI NO: 29145077 NR Description: Hspca protein [Mus musculus]
MTKADLVNNLGTIARSGTKEFMEALAAGADVSMIGQFGVGFYSAYLVADKVVVTTKHNDDEQYVWESQAGGSFTVTRDTSGEALGRGTKMILYLKEDQMEYIEERRLKDLVKKHSEFISYPISLWIEKTIEKEISDDEEEEEKKDEEGKVEEIDEEKEKEEKKKKKIKEVTHEWDLVNKQKPIWMRKPEEINKEEYAAFYKSLSNDWEEHLAVKHFSVEGQLEFKAILFVPKRAPFDLFDTKKKPNNIKLYVRRVFIMDNCEDIIPDYLGFVKGIVDSEDLPLNISRETLQQNKILKVIRKNLVKKCLELFFEIAENKEDYNKFYEAFSKNLKLGIHEDSQNRTKIAELLRYHSTKSGDELTSLKDYVTRMKEGQNEIFYITGESKKAVENSPFLEKLKKKGYEVLYMVDAIDEYAIGQLKEFEGKKLVSATKEGLKLEETDDEKKKKEELKEKFEGLCKVIKDVLGDKVEKVIVSDRVVDSPCCLVTGEYGWTANMERIMKAQALKDSNTGGYMSSKKTMEINPENSIMDELRKRAEADKNDKSVKDLVLLLFETALLTSGFSLDEPNTFGSRIHRMLKLGLSIEEDDAVEADAEMPPLEDDADAEGSKMEEVD

SEQ ID NO: 45059 - protein, 594 aa, Arabidopsis thaliana
  peptide (1)..(594): Ceres Seq. ID no. 15222637
  misc_feature (79)..(594): Pfam Name: Hsp90 protein Pfam Description: Hsp90 protein
  misc_feature (79)..(594): Pfam Name: Hsp90 protein Pfam Description: Hsp90 protein
  misc_feature (1)..(594): Homolog of NCBI NO: 2239253 NR Description: gp96/GRP94 [Sus scrofa]
  misc_feature (1)..(594): Homolog of NCBI NO: 7441885 NR Description: protein kinase ppk98 (EC 2.7.1.-) precursor,
  misc_feature (1)..(594): Homolog of NCBI NO: 4507677 NR Description: tumor rejection antigen (gp96) 1
  misc_feature (1)..(594): Homolog of NCBI NO: 27807263 NR Description: tumor rejection antigen (gp96) 1 [Bos taurus]
  misc_feature (1)..(594): Homolog of NCBI NO: 119359 NR Description: Endoplasmin precursor (Heat shock 108 kDa
  misc_feature (1)..(594): Homolog of NCBI NO: 2239253 NR Description: gp96/GRP94 [Sus scrofa]
  misc_feature (1)..(594): Homolog of NCBI NO: 4507677 NR Description: tumor rejection antigen (gp96) 1
  misc_feature (1)..(594): Homolog of NCBI NO: 119359 NR Description: Endoplasmin precursor (Heat shock 108 kDa
  misc_feature (106)..(594): Homolog of NCBI NO: 29145077 NR Description: Hspca protein [Mus musculus]
  misc_feature (1)..(175): Homolog of NCBI NO: 29145077 NR Description: Hspca protein [Mus musculus]
  misc_feature (1)..(594): Homolog of NCBI NO: 12005809 NR Description: 90-kDa heat shock protein HSP83 [Spodoptera
  misc_feature (1)..(592): Homolog of NCBI NO: 6755863 NR Description: tumor rejection antigen gp96; tumor rejection
  misc_feature (1)..(592): Homolog of NCBI NO: 14714615 NR Description: tumor rejection antigen gp96 [Mus musculus]
  misc_feature (1)..(594): Homolog of NCBI NO: 27807263 NR Description: tumor rejection antigen (gp96) 1 [Bos taurus]
  misc_feature (1)..(594): Homolog of NCBI NO: 7441885 NR Description: protein kinase ppk98 (EC 2.7.1.-) precursor,
  misc_feature (1)..(592): Homolog of NCBI NO: 14714615 NR Description: tumor rejection antigen gp96 [Mus musculus]
  misc_feature (1)..(592): Homolog of NCBI NO: 6755863 NR Description: tumor rejection antigen gp96; tumor rejection
  misc_feature (1)..(594): Homolog of NCBI NO: 12005809 NR Description: 90-kDa heat shock protein HSP83 [Spodoptera
  misc_feature (1)..(175): Homolog of NCBI NO: 29145077 NR Description: Hspca protein [Mus musculus]
  misc_feature (106)..(594): Homolog of NCBI NO: 29145077 NR Description: Hspca protein [Mus musculus]
MEALAAGADVSMIGQFGVGFYSAYLVADKVVVTTKHNDDEQYVWESQAGGSFTVTRDTSGEALGRGTKMILYLKEDQMEYIEERRLKDLVKKHSEFISYPISLWIEKTIEKEISDDEEEEEKKDEEGKVEEIDEEKEKEEKKKKKIKEVTHEWDLVNKQKPIWMRKPEEINKEEYAAFYKSLSNDWEEHLAVKHFSVEGQLEFKAILFVPKRAPFDLFDTKKKPNNIKLYVRRVFIMDNCEDIIPDYLGFVKGIVDSEDLPLNISRETLQQNKILKVIRKNLVKKCLELFFEIAENKEDYNKFYEAFSKNLKLGIHEDSQNRTKIAELLRYHSTKSGDELTSLKDYVTRMKEGQNEIFYITGESKKAVENSPFLEKLKKKGYEVLYMVDAIDEYAIGQLKEFEGKKLVSATKEGLKLEETDDEKKKKEELKEKFEGLCKVIKDVLGDKVEKVIVSDRVVDSPCCLVTGEYGWTANMERIMKAQALKDSNTGGYMSSKKTMEINPENSIMDELRKRAEADKNDKSVKDLVLLLFETALLTSGFSLDEPNTFGSRIHRMLKLGLSIEEDDAVEADAEMPPLEDDADAEGSKMEEVD

SEQ ID NO: 45060 - DNA, 1173 bp, Arabidopsis thaliana
  misc_feature (1)..(1173): Ceres Seq. ID no. 12560207
  misc_feature: MA Experiment ID: 20000314 Result: Up-regulated in Transcription
  misc_feature: MA Experiment 20000314 PARAMETER Experiment Name: At_14day_Shoots-Roots_Sub_P Parameter: Age (day) Value: 14
  misc_feature: MA Experiment 20000314 PARAMETER Experiment Name: At_14day_Shoots-Roots_Sub_P Parameter: Organism Value: A. thaliana
  misc_feature: MA Experiment 20000314 PARAMETER Experiment Name: At_14day_Shoots-Roots_Sub_P Parameter: Plant Line Value: WS
  misc_feature: MA Experiment 20000314 PARAMETER Experiment Name: At_14day_Shoots-Roots_Sub_P Parameter: Tissue Value: Roots vs. Whole Plant
  misc_feature: MA Experiment ID: 20000355 Result: Up-regulated in Transcription
  misc_feature: MA Experiment 20000355 PARAMETER Experiment Name: At_Siliques_Sub_P Parameter: Age (day) Value: 21
  misc_feature: MA Experiment 20000355 PARAMETER Experiment Name: At_Siliques_Sub_P Parameter: Organism Value: A. thaliana
  misc_feature: MA Experiment 20000355 PARAMETER Experiment Name: At_Siliques_Sub_P Parameter: Plant Line Value: WS
  misc_feature: MA Experiment 20000355 PARAMETER Experiment Name: At_Siliques_Sub_P Parameter: Tissue Value: Less Than 5mm Siliques vs. Whole Plant
  misc_feature: MA Experiment ID: 20000440 Result: Up-regulated in Transcription
  misc_feature: MA Experiment 20000440 PARAMETER Experiment Name: At_Closed-Flower__Sub_P Parameter: Tissue Value: Closed Flower vs. Whole Plant
atgggaagatctcctagctcagatgaaactggtctgaagaaaggtccatggttgcctgaagaagatgataaactgatcaattatattcacaaacatggccatagcagctggagtgcccttcccaagctcgctggtcttaacaggtgtgggaagagttgcaggctacgatggacaaactatttgagaccagacattaagcgaggaaaattctctgcggaggaagaagagaccatcctgaaccttcatgcggttctaggcaacaagtggtcaatgattgcaagccacttacctggacgaactgacaatgagatcaagaatttctggaatactcatttgaagaaaaagctgattcagatgggttttgaccccatgacccatcagccaagaaccgatgatatcttctcaagtttatctcagctcatgtctctgtctaacctaagaggacttgttgatctgcagcaacagtttccaatggaagaccaagcgctacttaatctccaaactgagatggctaagctccaattgttccaataccttcttcaaccttctcctgctcccatgagtatcaacaacattaaccctaacattctcaatctcctcatcaaagaaaactccgttaccagtaatatcgacctcggtttcctctcctctcatcttcaagacttcaacaacaacaacctcccttccctcaaaaccctagacgataatcacttcagtcaaaacacttctccaatatggctccatgaaccaccgagcttgaaccaaactatgttgcctacgcatgatccttgtgctcagagtgtagatggtttcggcagcaaccaagcctcctcaagccatgatcaagaagtagcagtcacagactctgtagattggcctgatcatcatctatttgatgattccatgtttccagacatttcttatcaatcttaaggtatgtatgtatgtatatgtttcacaagaagttgactggatttgtttggtgtcgctctgcatgtggttctatatctatatacgatgattcatgatgtgtgataatgtcttagaatgtagtacatgtgttcttatgtatttctcatacatgttatttgtgttcttatagaacattttatatgtttgaatgtatcttcattaccttagtatgtagagagaccaatcaacgattgttcagat

SEQ ID NO: 45061 - protein, 310 aa, Arabidopsis thaliana
  peptide (1)..(310): Ceres Seq. ID no. 12560208
  misc_feature (14)..(61): Pfam Name: Myb-like DNA-binding domain Pfam Description: Myb-like DNA-binding domain
  misc_feature (1)..(245): Homolog of NCBI NO: 15233021 NR Description: myb family transcription factor
  misc_feature (1)..(240): Homolog of NCBI NO: 30024598 NR Description: transcription factor MYB101 [Lotus japonicus]
  misc_feature (1)..(245): Homolog of NCBI NO: 15218730 NR Description: myb family transcription factor; protein id:
  misc_feature (1)..(282): Homolog of NCBI NO: 30024600 NR Description: transcription factor MYB102 [Lotus japonicus]
  misc_feature (1)..(236): Homolog of NCBI NO: 15238116 NR Description: myb family transcription factor
  misc_feature (75)..(310): Homolog of NCBI NO: 11358542 NR Description: myb-related transcription factor MYB53
  misc_feature (1)..(310): Homolog of NCBI NO: 15238370 NR Description: myb family transcription factor; protein id:
MGRSPSSDETGLKKGPWLPEEDDKLINYIHKHGHSSWSALPKLAGLNRCGKSCRLRWTNYLRPDIKRGKFSAEEEETILNLHAVLGNKWSMIASHLPGRTDNEIKNFWNTHLKKKLIQMGFDPMTHQPRTDDIFSSLSQLMSLSNLRGLVDLQQQFPMEDQALLNLQTEMAKLQLFQYLLQPSPAPMSINNINPNILNLLIKENSVTSNIDLGFLSSHLQDFNNNNLPSLKTLDDNHFSQNTSPIWLHEPPSLNQTMLPTHDPCAQSVDGFGSNQASSSHDQEVAVTDSVDWPDHHLFDDSMFPDISYQS

SEQ ID NO: 45062 - protein, 220 aa, Arabidopsis thaliana
  peptide (1)..(220): Ceres Seq. ID no. 12560209
  misc_feature (1)..(155): Homolog of NCBI NO: 15233021 NR Description: myb family transcription factor
  misc_feature (1)..(150): Homolog of NCBI NO: 30024598 NR Description: transcription factor MYB101 [Lotus japonicus]
  misc_feature (1)..(155): Homolog of NCBI NO: 15218730 NR Description: myb family transcription factor; protein id:
  misc_feature (1)..(192): Homolog of NCBI NO: 30024600 NR Description: transcription factor MYB102 [Lotus japonicus]
  misc_feature (1)..(146): Homolog of NCBI NO: 15238116 NR Description: myb family transcription factor
  misc_feature (1)..(220): Homolog of NCBI NO: 11358542 NR Description: myb-related transcription factor MYB53
  misc_feature (1)..(220): Homolog of NCBI NO: 15238370 NR Description: myb family transcription factor; protein id:
MIASHLPGRTDNEIKNFWNTHLKKKLIQMGFDPMTHQPRTDDIFSSLSQLMSLSNLRGLVDLQQQFPMEDQALLNLQTEMAKLQLFQYLLQPSPAPMSINNINPNILNLLIKENSVTSNIDLGFLSSHLQDFNNNNLPSLKTLDDNHFSQNTSPIWLHEPPSLNQTMLPTHDPCAQSVDGFGSNQASSSHDQEVAVTDSVDWPDHHLFDDSMFPDISYQS

SEQ ID NO: 45063 - protein, 192 aa, Arabidopsis thaliana
  peptide (1)..(192): Ceres Seq. ID no. 12560210
  misc_feature (1)..(127): Homolog of NCBI NO: 15233021 NR Description: myb family transcription factor
  misc_feature (1)..(122): Homolog of NCBI NO: 30024598 NR Description: transcription factor MYB101 [Lotus japonicus]
  misc_feature (1)..(127): Homolog of NCBI NO: 15218730 NR Description: myb family transcription factor; protein id:
  misc_feature (1)..(164): Homolog of NCBI NO: 30024600 NR Description: transcription factor MYB102 [Lotus japonicus]
  misc_feature (1)..(118): Homolog of NCBI NO: 15238116 NR Description: myb family transcription factor
  misc_feature (1)..(192): Homolog of NCBI NO: 11358542 NR Description: myb-related transcription factor MYB53
  misc_feature (1)..(192): Homolog of NCBI NO: 15238370 NR Description: myb family transcription factor; protein id:
MGFDPMTHQPRTDDIFSSLSQLMSLSNLRGLVDLQQQFPMEDQALLNLQTEMAKLQLFQYLLQPSPAPMSINNINPNILNLLIKENSVTSNIDLGFLSSHLQDFNNNNLPSLKTLDDNHFSQNTSPIWLHEPPSLNQTMLPTHDPCAQSVDGFGSNQASSSHDQEVAVTDSVDWPDHHLFDDSMFPDISYQS

SEQ ID NO: 45064 - DNA, 1800 bp, Arabidopsis thaliana
  misc_feature (1)..(1800): Ceres Seq. ID no. 12560219
  misc_feature: MA Experiment ID: 20000173 Result: Down-regulated in Transcription
  misc_feature: MA Experiment 20000173 PARAMETER Experiment Name: At_42deg_Heat_P Parameter: Age (day) Value: 14
  misc_feature: MA Experiment 20000173 PARAMETER Experiment Name: At_42deg_Heat_P Parameter: Organism Value: A. thaliana
  misc_feature: MA Experiment 20000173 PARAMETER Experiment Name: At_42deg_Heat_P Parameter: Plant Line Value: WS
  misc_feature: MA Experiment 20000173 PARAMETER Experiment Name: At_42deg_Heat_P Parameter: Temperature (deg C) Value: 42 vs. 22
  misc_feature: MA Experiment 20000173 PARAMETER Experiment Name: At_42deg_Heat_P Parameter: Timepoint (hr) Value: 6
  misc_feature: MA Experiment 20000173 PARAMETER Experiment Name: At_42deg_Heat_P Parameter: Tissue Value: Aerial
  misc_feature: MA Experiment ID: 20000184 Result: Down-regulated in Transcription
  misc_feature: MA Experiment 20000184 PARAMETER Experiment Name: At_Shoots__P Parameter: Age (day) Value: 7
  misc_feature: MA Experiment 20000184 PARAMETER Experiment Name: At_Shoots__P Parameter: Tissue Value: Shoots vs. Whole Plant
  misc_feature: MA Experiment ID: 20000185 Result: Down-regulated in Transcription
  misc_feature: MA Experiment 20000185 PARAMETER Experiment Name: At_Roots__P Parameter: Age (day) Value: 7 vs. 21
  misc_feature: MA Experiment 20000185 PARAMETER Experiment Name: At_Roots__P Parameter: Organism Value: A. thaliana
  misc_feature: MA Experiment 20000185 PARAMETER Experiment Name: At_Roots__P Parameter: Tissue Value: Roots vs. Whole Plant
  misc_feature: MA Experiment ID: 20000211 Result: Up-regulated in Transcription
  misc_feature: MA Experiment 20000211 PARAMETER Experiment Name: At_0.001percent_MeJA__P Parameter: Age (day) Value: 14
  misc_feature: MA Experiment 20000211 PARAMETER Experiment Name: At_0.001percent_MeJA__P Parameter: Organism Value: A. thaliana
  misc_feature: MA Experiment 20000211 PARAMETER Experiment Name: At_0.001percent_MeJA__P Parameter: Plant Line Value: WS
  misc_feature: MA Experiment 20000211 PARAMETER Experiment Name: At_0.001percent_MeJA__P Parameter: Timepoint (hr) Value: 1
  misc_feature: MA Experiment 20000211 PARAMETER Experiment Name: At_0.001percent_MeJA__P Parameter: Tissue Value: Aerial
  misc_feature: MA Experiment 20000211 PARAMETER Experiment Name: At_0.001percent_MeJA__P Parameter: Treatment Value: 0.001percent MeJA vs. No Treatment
  misc_feature: MA Experiment ID: 20000227 Result: Down-regulated in Transcription
  misc_feature: MA Experiment 20000227 PARAMETER Experiment Name: At_Root-Tips-vs-Tops_P Parameter: Tissue Value: Root Tips vs. Root Tops
  misc_feature: MA Experiment ID: 20000265 Result: Up-regulated in Transcription
  misc_feature: MA Experiment 20000265 PARAMETER Experiment Name: At_Open_Flower_P Parameter: Age (day) Value: 21
  misc_feature: MA Experiment 20000265 PARAMETER Experiment Name: At_Open_Flower_P Parameter: Plant Line Value: WS
  misc_feature: MA Experiment 20000265 PARAMETER Experiment Name: At_Open_Flower_P Parameter: Tissue Value: Closed Flower vs. Whole Plant
  misc_feature: MA Experiment ID: 20000439 Result: Down-regulated in Transcription
  misc_feature: MA Experiment 20000439 PARAMETER Experiment Name: At_Roots__P Parameter: Age (day) Value: 14 vs. 21
  misc_feature: MA Experiment 20000439 PARAMETER Experiment Name: At_Roots__P Parameter: Organism Value: A. thaliana
  misc_feature: MA Experiment 20000439 PARAMETER Experiment Name: At_Roots__P Parameter: Tissue Value: Roots vs. Whole Plant
  misc_feature: MA Experiment ID: 20000574 Result: Down-regulated in Transcription
  misc_feature: MA Experiment 20000574 PARAMETER Experiment Name: At_100uM_ABA_Mutants__P Parameter: Organism Value: A. thaliana
  misc_feature: MA Experiment 20000574 PARAMETER Experiment Name: At_100uM_ABA_Mutants__P Parameter: Plant Line Value: CS23 vs. Ler wt
  misc_feature: MA Experiment 20000574 PARAMETER Experiment Name: At_100uM_ABA_Mutants__P Parameter: Timepoint (hr) Value: N/A
  misc_feature: MA Experiment 20000574 PARAMETER Experiment Name: At_100uM_ABA_Mutants__P Parameter: Tissue Value: Whole Plant
  misc_feature: MA Experiment 20000574 PARAMETER Experiment Name: At_100uM_ABA_Mutants__P Parameter: Treatment Value: None
  misc_feature: MA Experiment ID: 20001248 Result: Down-regulated in Transcription
  misc_feature: MA Experiment 20001248 PARAMETER Experiment Name: At_Far-red-induction_P Parameter: Age (day) Value: 7
  misc_feature: MA Experiment 20001248 PARAMETER Experiment Name: At_Far-red-induction_P Parameter: Light Value: Far-red vs. White
  misc_feature: MA Experiment 20001248 PARAMETER Experiment Name: At_Far-red-induction_P Parameter: Organism Value: A. thaliana
  misc_feature: MA Experiment 20001248 PARAMETER Experiment Name: At_Far-red-induction_P Parameter: Plant Line Value: Columbia
  misc_feature: MA Experiment 20001248 PARAMETER Experiment Name: At_Far-red-induction_P Parameter: Timepoint (hr) Value: 4
  misc_feature: MA Experiment 20001248 PARAMETER Experiment Name: At_Far-red-induction_P Parameter: Tissue Value: Whole Plant
  misc_feature: MA Experiment ID: 20001450 Result: Down-regulated in Transcription
  misc_feature: MA Experiment 20001450 PARAMETER Experiment Name: At_Far-red-induction_P Parameter: Age (day) Value: 7
  misc_feature: MA Experiment 20001450 PARAMETER Experiment Name: At_Far-red-induction_P Parameter: Light Value: Far-red vs. White
  misc_feature: MA Experiment 20001450 PARAMETER Experiment Name: At_Far-red-induction_P Parameter: Organism Value: A. thaliana
  misc_feature: MA Experiment 20001450 PARAMETER Experiment Name: At_Far-red-induction_P Parameter: Plant Line Value: Columbia
  misc_feature: MA Experiment 20001450 PARAMETER Experiment Name: At_Far-red-induction_P Parameter: Timepoint (hr) Value: 8
  misc_feature: MA Experiment 20001450 PARAMETER Experiment Name: At_Far-red-induction_P Parameter: Tissue Value: Whole Plant
  misc_feature: MA Experiment ID: 20001451 Result: Down-regulated in Transcription
  misc_feature: MA Experiment 20001451 PARAMETER Experiment Name: At_Far-red-induction_P Parameter: Age (day) Value: 7
  misc_feature: MA Experiment 20001451 PARAMETER Experiment Name: At_Far-red-induction_P Parameter: Light Value: Far-red vs. White
  misc_feature: MA Experiment 20001451 PARAMETER Experiment Name: At_Far-red-induction_P Parameter: Organism Value: A. thaliana
  misc_feature: MA Experiment 20001451 PARAMETER Experiment Name: At_Far-red-induction_P Parameter: Plant Line Value: Columbia
  misc_feature: MA Experiment 20001451 PARAMETER Experiment Name: At_Far-red-induction_P Parameter: Timepoint (hr) Value: 24
  misc_feature: MA Experiment 20001451 PARAMETER Experiment Name: At_Far-red-induction_P Parameter: Tissue Value: Whole Plant
  misc_feature: MA Experiment ID: 20001555 Result: Up-regulated in Transcription
  misc_feature: MA Experiment 20001555 PARAMETER Experiment Name: At_Drought_Soil_Dry_P Parameter: Age (day) Value: 24
  misc_feature: MA Experiment 20001555 PARAMETER Experiment Name: At_Drought_Soil_Dry_P Parameter: Organism Value: A. thaliana
  misc_feature: MA Experiment 20001555 PARAMETER Experiment Name: At_Drought_Soil_Dry_P Parameter: Plant Line Value: WS
  misc_feature: MA Experiment 20001555 PARAMETER Experiment Name: At_Drought_Soil_Dry_P Parameter: Post Timepoint (hr) Value: None
  misc_feature: MA Experiment 20001555 PARAMETER Experiment Name: At_Drought_Soil_Dry_P Parameter: Post-Treatment Value: None
  misc_feature: MA Experiment 20001555 PARAMETER Experiment Name: At_Drought_Soil_Dry_P Parameter: Timepoint (day) Value: 10
  misc_feature: MA Experiment 20001555 PARAMETER Experiment Name: At_Drought_Soil_Dry_P Parameter: Treatment Value: Drought vs. No Drought
  misc_feature: MA Experiment ID: 20001556 Result: Up-regulated in Transcription
  misc_feature: MA Experiment 20001556 PARAMETER Experiment Name: At_Drought_Soil_Dry_P Parameter: Age (day) Value: 26
  misc_feature: MA Experiment 20001556 PARAMETER Experiment Name: At_Drought_Soil_Dry_P Parameter: Organism Value: A. thaliana
  misc_feature: MA Experiment 20001556 PARAMETER Experiment Name: At_Drought_Soil_Dry_P Parameter: Plant Line Value: WS
  misc_feature: MA Experiment 20001556 PARAMETER Experiment Name: At_Drought_Soil_Dry_P Parameter: Post Timepoint (hr) Value: None
  misc_feature: MA Experiment 20001556 PARAMETER Experiment Name: At_Drought_Soil_Dry_P Parameter: Post-Treatment Value: None
  misc_feature: MA Experiment 20001556 PARAMETER Experiment Name: At_Drought_Soil_Dry_P Parameter: Timepoint (day) Value: 12
  misc_feature: MA Experiment 20001556 PARAMETER Experiment Name: At_Drought_Soil_Dry_P Parameter: Treatment Value: Drought vs. No Drought
  misc_feature: MA Experiment ID: 20001557 Result: Down-regulated in Transcription
  misc_feature: MA Experiment 20001557 PARAMETER Experiment Name: At_Drought_Soil_Dry_P Parameter: Age (day) Value: 27
  misc_feature: MA Experiment 20001557 PARAMETER Experiment Name: At_Drought_Soil_Dry_P Parameter: Organism Value: A. thaliana
  misc_feature: MA Experiment 20001557 PARAMETER Experiment Name: At_Drought_Soil_Dry_P Parameter: Plant Line Value: WS
  misc_feature: MA Experiment 20001557 PARAMETER Experiment Name: At_Drought_Soil_Dry_P Parameter: Post Timepoint (hr) Value: 3
  misc_feature: MA Experiment 20001557 PARAMETER Experiment Name: At_Drought_Soil_Dry_P Parameter: Post-Treatment Value: Re-Water vs. No Drought
  misc_feature: MA Experiment 20001557 PARAMETER Experiment Name: At_Drought_Soil_Dry_P Parameter: Timepoint (day) Value: 13
  misc_feature: MA Experiment 20001557 PARAMETER Experiment Name: At_Drought_Soil_Dry_P Parameter: Treatment Value: Drought vs. No Drought
  misc_feature: MA Experiment ID: 20001905 Result: Down-regulated in Transcription
  misc_feature: MA Experiment 20001905 PARAMETER Experiment Name: At_Drought_Reproduction_P Parameter: Age (day) Value: 40
  misc_feature: MA Experiment 20001905 PARAMETER Experiment Name: At_Drought_Reproduction_P Parameter: Organism Value: A. thaliana
  misc_feature: MA Experiment 20001905 PARAMETER Experiment Name: At_Drought_Reproduction_P Parameter: Plant Line Value: WS
  misc_feature: MA Experiment 20001905 PARAMETER Experiment Name: At_Drought_Reproduction_P Parameter: Timepoint (day) Value: 10
  misc_feature: MA Experiment 20001905 PARAMETER Experiment Name: At_Drought_Reproduction_P Parameter: Tissue Value: Rosettes
  misc_feature: MA Experiment 20001905 PARAMETER Experiment Name: At_Drought_Reproduction_P Parameter: Treatment Value: Drought vs. No Drought
  misc_feature: MA Experiment ID: 20001906 Result: Down-regulated in Transcription
  misc_feature: MA Experiment 20001906 PARAMETER Experiment Name: At_Drought_Reproduction_P Parameter: Age (day) Value: 35
  misc_feature: MA Experiment 20001906 PARAMETER Experiment Name: At_Drought_Reproduction_P Parameter: Organism Value: A. thaliana
  misc_feature: MA Experiment 20001906 PARAMETER Experiment Name: At_Drought_Reproduction_P Parameter: Plant Line Value: WS
  misc_feature: MA Experiment 20001906 PARAMETER Experiment Name: At_Drought_Reproduction_P Parameter: Timepoint (day) Value: 5
  misc_feature: MA Experiment 20001906 PARAMETER Experiment Name: At_Drought_Reproduction_P Parameter: Tissue Value: Siliques
  misc_feature: MA Experiment 20001906 PARAMETER Experiment Name: At_Drought_Reproduction_P Parameter: Treatment Value: Drought vs. No Drought
  misc_feature: MA Experiment ID: 20001908 Result: Down-regulated in Transcription
  misc_feature: MA Experiment 20001908 PARAMETER Experiment Name: At_Drought_Reproduction_P Parameter: Age (day) Value: 40
  misc_feature: MA Experiment 20001908 PARAMETER Experiment Name: At_Drought_Reproduction_P Parameter: Organism Value: A. thaliana
  misc_feature: MA Experiment 20001908 PARAMETER Experiment Name: At_Drought_Reproduction_P Parameter: Plant Line Value: WS
  misc_feature: MA Experiment 20001908 PARAMETER Experiment Name: At_Drought_Reproduction_P Parameter: Timepoint (day) Value: 10
  misc_feature: MA Experiment 20001908 PARAMETER Experiment Name: At_Drought_Reproduction_P Parameter: Tissue Value: Siliques
  misc_feature: MA Experiment 20001908 PARAMETER Experiment Name: At_Drought_Reproduction_P Parameter: Treatment Value: Drought vs. No Drought
attagaaatggaacagttttttgctctgtttaccatttttctatcttttgctttccccgggagatgcagcgacgttttcagcagatctgatttccccgagggattcctcttcggagctggcacttctgcttatcagtgggaaggagctgctgcggaagatggaaggaaacctagcgtgtgggacactctttgttactctcgtaacattggtaacggagatgtaacatgtgatgggtatcacaagtataaggaagatgtgaagctgatggtagacactaacttagatgccttcagattctctatatcttggtctaggctaatacctaatggaagaggctctgttaaccaaaagggtctacagttctacaagaacctcatcagcgaattaataacccatgggattgaaccacatgttacactgtatcactacgatcatcctcagtatcttgaggatgaatatggaggatgggtcaacaatatgatgatcaaagacttcactgcttatgtagatgtttgtttcagagagtttgggaactatgtcaaattctggaccactatcaatgaggctaatgtatttactattggaggttacaacgatggggatacaccgcctggtcgttgttctttaccgggcaaaaactgcttgttagggaactcttctactgaaacatatattgtaggccataacttacttcttgcgcacgcctctgcttcaagactatataagcaaaagtacaaggataagcagggtggttccataggctttggcttatatttaatggggttgactccttctacaagctccaaggatgatgccattgcaactcaaagagccaaagatttctatttcggttggtgagtcaggcacaaacagttctaaaaggtttttcaaattgggcaacatgtgcaagatcttaagctgaaaagaaagaaaatctgctctttaaaactcaggttccttggacctcttatatttggagactatccagatacaatgaaaagaaccattggatcaagactgccagttttctcagaggaagaatcagaacaagttaaaggctcatctgacttcataggaatcaatcattagtttgcggcttctgtcacaaacatcaaattcaaaccttctatttctggaaacccggacttctactcagacatgggcgcatatgtgacttgtatgaatcagactcattcttttgtataacaaaaaaaaaacctcttttatctttataatttgttactactcattttttcttcgttttactggttagaagaccttgggaatttttcagttatagaggtatcctgttgctccgtggactatggaagctgtcctagagtatataaagcagagctatgacaatcctcctgtctacattcttgagaatggtacaccgatgacgcaacacaaggatacacatagggtggaatacatgaatgcttacattggtggtgtgctcaaatccataaggaatggatcagacactagaggctattttgtatggtcatttatggatttattcgagcttatagggcggtacgattatggttatggattgtactctgtaaatttcagtgatccacatcgcaagagatctcctagactctctgctcattggtactctgattttctcaagggcaaaacttcttttcttgattccaaaggcatcaaggaattgcagagcaacttctcttcttcctcttagtactgtgatgaaataactcttatgttctactgaatttagactacttgtcatgagagccacttctttttttctataaattctaaattaaact

SEQ ID NO: 45065 - protein, 285 aa, Arabidopsis thaliana
  peptide (1)..(285): Ceres Seq. ID no. 12560220
  misc_feature (83)..(133): Homolog of NCBI NO: 7435448 NR Description: hypothetical protein T13D8.16 - Arabidopsis
  misc_feature (3)..(285): Homolog of NCBI NO: 11264219 NR Description: glucosidase like protein - Arabidopsis thaliana
  misc_feature (3)..(109): Homolog of NCBI NO: 7435448 NR Description: hypothetical protein T13D8.16 - Arabidopsis
  misc_feature (128)..(285): Homolog of NCBI NO: 7435448 NR Description: hypothetical protein T13D8.16 - Arabidopsis
  misc_feature (3)..(285): Homolog of NCBI NO: 22328869 NR Description: glycosyl hydrolase family 1; protein id:
  misc_feature (3)..(285): Homolog of NCBI NO: 15219037 NR Description: glycosyl hydrolase family 1; protein id:
  misc_feature (3)..(285): Homolog of NCBI NO: 22330338 NR Description: glycosyl hydrolase family 1; protein id:
  misc_feature (3)..(285): Homolog of NCBI NO: 25289447 NR Description: hypothetical protein T2K10.15 [imported] -
  misc_feature (45)..(285): Homolog of NCBI NO: 7435457 NR Description: hypothetical protein T13D8.15 - Arabidopsis
  misc_feature (3)..(285): Homolog of NCBI NO: 15219036 NR Description: glycosyl hydrolase family 1; protein id:
LEMEQFFALFTIFLSFAFPGRCSDVFSRSDFPEGFLFGAGTSAYQWEGAAAEDGRKPSVWDTLCYSRNIGNGDVTCDGYHKYKEDVKLMVDTNLDAFRFSISWSRLIPNGRGSVNQKGLQFYKNLISELITHGIEPHVTLYHYDHPQYLEDEYGGWVNNMMIKDFTAYVDVCFREFGNYVKFWTTINEANVFTIGGYNDGDTPPGRCSLPGKNCLLGNSSTETYIVGHNLLLAHASASRLYKQKYKDKQGGSIGFGLYLMGLTPSTSSKDDAIATQRAKDFYFGW

SEQ ID NO: 45066 - protein, 283 aa, Arabidopsis thaliana
  peptide (1)..(283): Ceres Seq. ID no. 12560221
  misc_feature (81)..(131): Homolog of NCBI NO: 7435448 NR Description: hypothetical protein T13D8.16 - Arabidopsis
  misc_feature (1)..(283): Homolog of NCBI NO: 11264219 NR Description: glucosidase like protein - Arabidopsis thaliana
  misc_feature (1)..(107): Homolog of NCBI NO: 7435448 NR Description: hypothetical protein T13D8.16 - Arabidopsis
  misc_feature (126)..(283): Homolog of NCBI NO: 7435448 NR Description: hypothetical protein T13D8.16 - Arabidopsis
  misc_feature (1)..(283): Homolog of NCBI NO: 22328869 NR Description: glycosyl hydrolase family 1; protein id:
  misc_feature (1)..(283): Homolog of NCBI NO: 15219037 NR Description: glycosyl hydrolase family 1; protein id:
  misc_feature (1)..(283): Homolog of NCBI NO: 22330338 NR Description: glycosyl hydrolase family 1; protein id:
  misc_feature (1)..(283): Homolog of NCBI NO: 25289447 NR Description: hypothetical protein T2K10.15 [imported] -
  misc_feature (43)..(283): Homolog of NCBI NO: 7435457 NR Description: hypothetical protein T13D8.15 - Arabidopsis
  misc_feature (1)..(283): Homolog of NCBI NO: 15219036 NR Description: glycosyl hydrolase family 1; protein id:
MEQFFALFTIFLSFAFPGRCSDVFSRSDFPEGFLFGAGTSAYQWEGAAAEDGRKPSVWDTLCYSRNIGNGDVTCDGYHKYKEDVKLMVDTNLDAFRFSISWSRLIPNGRGSVNQKGLQFYKNLISELITHGIEPHVTLYHYDHPQYLEDEYGGWVNNMMIKDFTAYVDVCFREFGNYVKFWTTINEANVFTIGGYNDGDTPPGRCSLPGKNCLLGNSSTETYIVGHNLLLAHASASRLYKQKYKDKQGGSIGFGLYLMGLTPSTSSKDDAIATQRAKDFYFGW

SEQ ID NO: 45067 - protein, 197 aa, Arabidopsis thaliana
  peptide (1)..(197): Ceres Seq. ID no. 12560222
  misc_feature (1)..(45): Homolog of NCBI NO: 7435448 NR Description: hypothetical protein T13D8.16 - Arabidopsis
  misc_feature (1)..(197): Homolog of NCBI NO: 11264219 NR Description: glucosidase like protein - Arabidopsis thaliana
  misc_feature (1)..(21): Homolog of NCBI NO: 7435448 NR Description: hypothetical protein T13D8.16 - Arabidopsis
  misc_feature (40)..(197): Homolog of NCBI NO: 7435448 NR Description: hypothetical protein T13D8.16 - Arabidopsis
  misc_feature (1)..(197): Homolog of NCBI NO: 22328869 NR Description: glycosyl hydrolase family 1; protein id:
  misc_feature (1)..(197): Homolog of NCBI NO: 15219037 NR Description: glycosyl hydrolase family 1; protein id:
  misc_feature (1)..(197): Homolog of NCBI NO: 22330338 NR Description: glycosyl hydrolase family 1; protein id:
  misc_feature (1)..(197): Homolog of NCBI NO: 25289447 NR Description: hypothetical protein T2K10.15 [imported] -
  misc_feature (1)..(197): Homolog of NCBI NO: 7435457 NR Description: hypothetical protein T13D8.15 - Arabidopsis
  misc_feature (1)..(197): Homolog of NCBI NO: 15219036 NR Description: glycosyl hydrolase family 1; protein id:
MVDTNLDAFRFSISWSRLIPNGRGSVNQKGLQFYKNLISELITHGIEPHVTLYHYDHPQYLEDEYGGWVNNMMIKDFTAYVDVCFREFGNYVKFWTTINEANVFTIGGYNDGDTPPGRCSLPGKNCLLGNSSTETYIVGHNLLLAHASASRLYKQKYKDKQGGSIGFGLYLMGLTPSTSSKDDAIATQRAKDFYFGW

SEQ ID NO: 45068 - DNA, 2794 bp, Arabidopsis thaliana
  misc_feature (1)..(2794): Ceres Seq. ID no. 12600170
  misc_feature: MA Experiment ID: 20000185 Result: Up-regulated in Transcription
  misc_feature: MA Experiment 20000185 PARAMETER Experiment Name: At_Roots__P Parameter: Age (day) Value: 7 vs. 21
  misc_feature: MA Experiment 20000185 PARAMETER Experiment Name: At_Roots__P Parameter: Organism Value: A. thaliana
  misc_feature: MA Experiment 20000185 PARAMETER Experiment Name: At_Roots__P Parameter: Tissue Value: Roots vs. Whole Plant
  misc_feature: MA Experiment ID: 20000438 Result: Down-regulated in Transcription
  misc_feature: MA Experiment 20000438 PARAMETER Experiment Name: At_Shoots__P Parameter: Age (day) Value: 14
  misc_feature: MA Experiment 20000438 PARAMETER Experiment Name: At_Shoots__P Parameter: Tissue Value: Shoots vs. Whole Plant
  misc_feature: MA Experiment ID: 20000439 Result: Up-regulated in Transcription
  misc_feature: MA Experiment 20000439 PARAMETER Experiment Name: At_Roots__P Parameter: Age (day) Value: 14 vs. 21
  misc_feature: MA Experiment 20000439 PARAMETER Experiment Name: At_Roots__P Parameter: Organism Value: A. thaliana
  misc_feature: MA Experiment 20000439 PARAMETER Experiment Name: At_Roots__P Parameter: Tissue Value: Roots vs. Whole Plant
  misc_feature: MA Experiment ID: 20000495 Result: Up-regulated in Transcription
  misc_feature: MA Experiment 20000495 PARAMETER Experiment Name: At_Guard_Cells_P Parameter: Harvest Date Value: 8/2/2002
  misc_feature: MA Experiment 20000495 PARAMETER Experiment Name: At_Guard_Cells_P Parameter: Organism Value: A. thaliana
  misc_feature: MA Experiment 20000495 PARAMETER Experiment Name: At_Guard_Cells_P Parameter: Tissue Value: Guard Cells vs. Leaves
  misc_feature: MA Experiment ID: 20000794 Result: Down-regulated in Transcription
  misc_feature: MA Experiment 20000794 PARAMETER Experiment Name: At_Petals_P Parameter: Age (day) Value: 23-25 days
  misc_feature: MA Experiment 20000794 PARAMETER Experiment Name: At_Petals_P Parameter: Plant Line Value: WS
  misc_feature: MA Experiment 20000794 PARAMETER Experiment Name: At_Petals_P Parameter: Tissue Value: Petals vs. Whole plant
  misc_feature: MA Experiment ID: 20001556 Result: Down-regulated in Transcription
  misc_feature: MA Experiment 20001556 PARAMETER Experiment Name: At_Drought_Soil_Dry_P Parameter: Age (day) Value: 26
  misc_feature: MA Experiment 20001556 PARAMETER Experiment Name: At_Drought_Soil_Dry_P Parameter: Organism Value: A. thaliana
  misc_feature: MA Experiment 20001556 PARAMETER Experiment Name: At_Drought_Soil_Dry_P Parameter: Plant Line Value: WS
  misc_feature: MA Experiment 20001556 PARAMETER Experiment Name: At_Drought_Soil_Dry_P Parameter: Post Timepoint (hr) Value: None
  misc_feature: MA Experiment 20001556 PARAMETER Experiment Name: At_Drought_Soil_Dry_P Parameter: Post-Treatment Value: None
  misc_feature: MA Experiment 20001556 PARAMETER Experiment Name: At_Drought_Soil_Dry_P Parameter: Timepoint (day) Value: 12
  misc_feature: MA Experiment 20001556 PARAMETER Experiment Name: At_Drought_Soil_Dry_P Parameter: Treatment Value: Drought vs. No Drought
  misc_feature: MA Experiment ID: 20001906 Result: Up-regulated in Transcription
  misc_feature: MA Experiment 20001906 PARAMETER Experiment Name: At_Drought_Reproduction_P Parameter: Age (day) Value: 35
  misc_feature: MA Experiment 20001906 PARAMETER Experiment Name: At_Drought_Reproduction_P Parameter: Organism Value: A. thaliana
  misc_feature: MA Experiment 20001906 PARAMETER Experiment Name: At_Drought_Reproduction_P Parameter: Plant Line Value: WS
  misc_feature: MA Experiment 20001906 PARAMETER Experiment Name: At_Drought_Reproduction_P Parameter: Timepoint (day) Value: 5
  misc_feature: MA Experiment 20001906 PARAMETER Experiment Name: At_Drought_Reproduction_P Parameter: Tissue Value: Siliques
  misc_feature: MA Experiment 20001906 PARAMETER Experiment Name: At_Drought_Reproduction_P Parameter: Treatment Value: Drought vs. No Drought
gaaaaagaacattcttataatcacacatctctctctcttcattccccaagcatagaatctctccctctctatctatctctctttcaccttttcttgattcttactcagagaaaattctgcaatatatatcgccatgatccacaccgacatcgcagagatcttatgcgtcaaacccaagacaacgaagaagacaaaaacaatggaggaagatgtcaagaagacgacgacgatgaagatagaaggagaagttgttgtgatgaagaagaatctccttgatttcaaagacgttatggcttctcttcttgatcgtgtcaatgagcttcttggtcgtcgtgtctctctccacctcatcagctctcaccaacccgacccggccaatgagaagagaggaagacttggaaaagcagcacatctggaaaaatgggtaacaaaaataaaaacgtcagtaaccgctgaggaaactgcgtttggagtaacgtttgattgggacgagtcaatgggaccaccggctgcatttgtgatcaagaaccaccaccatagtcaattctaccttaagtccctcaccctccgcggcttccctgatggcgaaggtggtgccactgcgatacatttcatctgcaattcttggatttacccgaatcatcgataccgctccgaccgcgttttcttctctaacaaggcatatcttccaagtgaaacaccggagctaatcaaagagctaagagaagaagagctaaagaatctaagaggcaatgagaaaggaggagaattcaaagaatgggacagagtttacgactacgcttattacaacgacttgggtgctcctgacaagggtcctgactcagttcgtccggttcttggcggttcacctgagctgccttatcctcgccgtggcaaaaccggccgtaaatccaccaaatcagaccctaagtctgaaagcaggctggctttactaaacctaaacatatacgtgccaagggacgagcgatttagccatgtgaagttttcagacttcctcgcttatgcactcaagtccgtgactcaagtgcttgtccctgagatcgcctctgtttgcgacaagaccatcaacgagtttgactccttcgaagatgtttttcacctctatgacggtagtattaagctcgccaatggtcacaccatttctaagctccgtgatgttatcccgtgggagatgtttagagagctagttcgcaacgacggagaacggttcttgaagtatcccttgcctgacatcctcaaagagagcagatcggcttggaggactgacgaagagtttgctcgagaaatgctggccggtcttaatccggtggtgattagccgtcttcaggaatttccaccaaagagctgtctggactctgcaaagtatggaaaccaacactcttccatacgaacagagcacatagaatcaaacatgaacggcctcaatgtccaagaagctttggaacagaataagctatacatattggatcatcacgacgcattgatgccttacctgacacggataaactcaacaaacactaaaacctatgcgacccgaaccctgctgttgcttcaagcagacggaacactgaagcctctcgccatagagctgagtcttccacacgcacaaggcgaatcatatggatcggtcagcaaagttttcacaccagcagagaaaggtgtcgagggatcggtttggcaacttgctaaggcttatgctgcggtcaatgactctggttatcatcagcttataagccattggttgcaaacgcatgcggtgattgaaccgttcataatcgcgtccaataggcagctcagcgtggtccatccgatccataaacttctacatcctcatttccgtgacactatgaacatcaacgcattagcgcgtcatgtactcataaactcagacggagttcttgagagaacagtcttccctagtcgatacgccatggaaatgtcttcttcaatttacaagaattgggttttcaccgagcaggctctcccaaaagacctcctcaaacgaggagttgctgttgaagatccaaacagtgacaacggcgttaagcttctgatcgaagattacccgtttgcggtcgacggtttagagatttggtcagcgatcaaaacatgggtcacagagtactgcacattctactacaataatgacaaaaccgtccaaacggatacagagatccaatcatggtggaccgagctccgaaccaaaggccacggcgacaaacgacacgagtcatggtggccttcgatgcaaacccgcgacgacctaatcgaaacctgcacgatcatcatctggatcgcctctgctcttcacgcagcagtaaatttcggacagtacccttacgccggttttctccctaaccgtcctaccgtcagccgccggtttatgcctgaaccaggtacggatgagtatgctgagctggaggaagatgctgacgtagcgttcttgaagacgatcacgccgcagttacagactctacttggtatctccatcatagagatattgtctatgcattcaacggacgagatctacttagggcaaagagattcaccgaattggacggcggatgatgagcctttggaggcgtttaagcggtttgggaaagaacttgagctgatagagaacaatattatacgaagaaacaatgacaagaggttcaagaacagaaccggaccggttaacataccgtacacattgttgtacccgaatactacggattatacgagagaaggtgggattactgggaaagggatcccgaacagtgtctcaatctaa

SEQ ID NO: 45069 - protein, 886 aa, Arabidopsis thaliana
  peptide (1)..(886): Ceres Seq. ID no. 12600171
  misc_feature (68)..(178): Pfam Name: PLAT/LH2 domain Pfam Description: PLAT/LH2 domain
  misc_feature (68)..(178): Pfam Name: PLAT/LH2 domain Pfam Description: PLAT/LH2 domain
  misc_feature (22)..(886): Homolog of NCBI NO: 28411860 NR Description: putative lipoxygenase [Oryza sativa (japonica
  misc_feature (109)..(886): Homolog of NCBI NO: 7433169 NR Description: probable lipoxygenase (EC 1.13.11.12) (clone H1)
  misc_feature (102)..(886): Homolog of NCBI NO: 7433160 NR Description: probable lipoxygenase (EC 1.13.11.12) CPRD46,
  misc_feature (1)..(886): Homolog of NCBI NO: 6002055 NR Description: lipoxygenase [Arabidopsis thaliana]
  misc_feature (28)..(886): Homolog of NCBI NO: 7433165 NR Description: lipoxygenase (EC 1.13.11.12) loxD - tomato
  misc_feature (22)..(886): Homolog of NCBI NO: 28411860 NR Description: putative lipoxygenase [Oryza sativa (japonica
  misc_feature (102)..(886): Homolog of NCBI NO: 7433160 NR Description: probable lipoxygenase (EC 1.13.11.12) CPRD46,
  misc_feature (28)..(886): Homolog of NCBI NO: 7433165 NR Description: lipoxygenase (EC 1.13.11.12) loxD - tomato
  misc_feature (34)..(886): Homolog of NCBI NO: 8649004 NR Description: lipoxygenase [Prunus dulcis]
  misc_feature (34)..(886): Homolog of NCBI NO: 7433144 NR Description: lipoxygenase (EC 1.13.11.12) - potato
  misc_feature (34)..(886): Homolog of NCBI NO: 1407703 NR Description: lipoxygenase [Solanum tuberosum]
  misc_feature (28)..(886): Homolog of NCBI NO: 7433167 NR Description: probable lipoxygenase (EC 1.13.11.12) (clone H3)
  misc_feature (1)..(886): Homolog of NCBI NO: 15218506 NR Description: putative lipoxygenase
  misc_feature (1)..(886): Homolog of NCBI NO: 6002055 NR Description: lipoxygenase [Arabidopsis thaliana]
  misc_feature (109)..(886): Homolog of NCBI NO: 7433169 NR Description: probable lipoxygenase (EC 1.13.11.12) (clone H1)
  misc_feature (1)..(886): Homolog of NCBI NO: 15218506 NR Description: putative lipoxygenase
  misc_feature (28)..(886): Homolog of NCBI NO: 7433167 NR Description: probable lipoxygenase (EC 1.13.11.12) (clone H3)
  misc_feature (34)..(886): Homolog of NCBI NO: 1407703 NR Description: lipoxygenase [Solanum tuberosum]
  misc_feature (34)..(886): Homolog of NCBI NO: 7433144 NR Description: lipoxygenase (EC 1.13.11.12) - potato
  misc_feature (34)..(886): Homolog of NCBI NO: 8649004 NR Description: lipoxygenase [Prunus dulcis]
MIHTDIAEILCVKPKTTKKTKTMEEDVKKTTTMKIEGEVVVMKKNLLDFKDVMASLLDRVNELLGRRVSLHLISSHQPDPANEKRGRLGKAAHLEKWVTKIKTSVTAEETAFGVTFDWDESMGPPAAFVIKNHHHSQFYLKSLTLRGFPDGEGGATAIHFICNSWIYPNHRYRSDRVFFSNKAYLPSETPELIKELREEELKNLRGNEKGGEFKEWDRVYDYAYYNDLGAPDKGPDSVRPVLGGSPELPYPRRGKTGRKSTKSDPKSESRLALLNLNIYVPRDERFSHVKFSDFLAYALKSVTQVLVPEIASVCDKTINEFDSFEDVFHLYDGSIKLANGHTISKLRDVIPWEMFRELVRNDGERFLKYPLPDILKESRSAWRTDEEFAREMLAGLNPVVISRLQEFPPKSCLDSAKYGNQHSSIRTEHIESNMNGLNVQEALEQNKLYILDHHDALMPYLTRINSTNTKTYATRTLLLLQADGTLKPLAIELSLPHAQGESYGSVSKVFTPAEKGVEGSVWQLAKAYAAVNDSGYHQLISHWLQTHAVIEPFIIASNRQLSVVHPIHKLLHPHFRDTMNINALARHVLINSDGVLERTVFPSRYAMEMSSSIYKNWVFTEQALPKDLLKRGVAVEDPNSDNGVKLLIEDYPFAVDGLEIWSAIKTWVTEYCTFYYNNDKTVQTDTEIQSWWTELRTKGHGDKRHESWWPSMQTRDDLIETCTIIIWIASALHAAVNFGQYPYAGFLPNRPTVSRRFMPEPGTDEYAELEEDADVAFLKTITPQLQTLLGISIIEILSMHSTDEIYLGQRDSPNWTADDEPLEAFKRFGKELELIENNIIRRNNDKRFKNRTGPVNIPYTLLYPNTTDYTREGGITGKGIPNSVSI

SEQ ID NO: 45070 - protein, 864 aa, Arabidopsis thaliana
  peptide (1)..(864): Ceres Seq. ID no. 12600172
  misc_feature (46)..(156): Pfam Name: PLAT/LH2 domain Pfam Description: PLAT/LH2 domain
  misc_feature (46)..(156): Pfam Name: PLAT/LH2 domain Pfam Description: PLAT/LH2 domain
  misc_feature (1)..(864): Homolog of NCBI NO: 28411860 NR Description: putative lipoxygenase [Oryza sativa (japonica
  misc_feature (87)..(864): Homolog of NCBI NO: 7433169 NR Description: probable lipoxygenase (EC 1.13.11.12) (clone H1)
  misc_feature (80)..(864): Homolog of NCBI NO: 7433160 NR Description: probable lipoxygenase (EC 1.13.11.12) CPRD46,
  misc_feature (1)..(864): Homolog of NCBI NO: 6002055 NR Description: lipoxygenase [Arabidopsis thaliana]
  misc_feature (6)..(864): Homolog of NCBI NO: 7433165 NR Description: lipoxygenase (EC 1.13.11.12) loxD - tomato
  misc_feature (1)..(864): Homolog of NCBI NO: 28411860 NR Description: putative lipoxygenase [Oryza sativa (japonica
  misc_feature (80)..(864): Homolog of NCBI NO: 7433160 NR Description: probable lipoxygenase (EC 1.13.11.12) CPRD46,
  misc_feature (6)..(864): Homolog of NCBI NO: 7433165 NR Description: lipoxygenase (EC 1.13.11.12) loxD - tomato
  misc_feature (12)..(864): Homolog of NCBI NO: 8649004 NR Description: lipoxygenase [Prunus dulcis]
  misc_feature (12)..(864): Homolog of NCBI NO: 7433144 NR Description: lipoxygenase (EC 1.13.11.12) - potato
  misc_feature (12)..(864): Homolog of NCBI NO: 1407703 NR Description: lipoxygenase [Solanum tuberosum]
  misc_feature (6)..(864): Homolog of NCBI NO: 7433167 NR Description: probable lipoxygenase (EC 1.13.11.12) (clone H3)
  misc_feature (1)..(864): Homolog of NCBI NO: 15218506 NR Description: putative lipoxygenase
  misc_feature (1)..(864): Homolog of NCBI NO: 6002055 NR Description: lipoxygenase [Arabidopsis thaliana]
  misc_feature (87)..(864): Homolog of NCBI NO: 7433169 NR Description: probable lipoxygenase (EC 1.13.11.12) (clone H1)
  misc_feature (1)..(864): Homolog of NCBI NO: 15218506 NR Description: putative lipoxygenase
  misc_feature (6)..(864): Homolog of NCBI NO: 7433167 NR Description: probable lipoxygenase (EC 1.13.11.12) (clone H3)
  misc_feature (12)..(864): Homolog of NCBI NO: 1407703 NR Description: lipoxygenase [Solanum tuberosum]
  misc_feature (12)..(864): Homolog of NCBI NO: 7433144 NR Description: lipoxygenase (EC 1.13.11.12) - potato
  misc_feature (12)..(864): Homolog of NCBI NO: 8649004 NR Description: lipoxygenase [Prunus dulcis]
MEEDVKKTTTMKIEGEVVVMKKNLLDFKDVMASLLDRVNELLGRRVSLHLISSHQPDPANEKRGRLGKAAHLEKWVTKIKTSVTAEETAFGVTFDWDESMGPPAAFVIKNHHHSQFYLKSLTLRGFPDGEGGATAIHFICNSWIYPNHRYRSDRVFFSNKAYLPSETPELIKELREEELKNLRGNEKGGEFKEWDRVYDYAYYNDLGAPDKGPDSVRPVLGGSPELPYPRRGKTGRKSTKSDPKSESRLALLNLNIYVPRDERFSHVKFSDFLAYALKSVTQVLVPEIASVCDKTINEFDSFEDVFHLYDGSIKLANGHTISKLRDVIPWEMFRELVRNDGERFLKYPLPDILKESRSAWRTDEEFAREMLAGLNPVVISRLQEFPPKSCLDSAKYGNQHSSIRTEHIESNMNGLNVQEALEQNKLYILDHHDALMPYLTRINSTNTKTYATRTLLLLQADGTLKPLAIELSLPHAQGESYGSVSKVFTPAEKGVEGSVWQLAKAYAAVNDSGYHQLISHWLQTHAVIEPFIIASNRQLSVVHPIHKLLHPHFRDTMNINALARHVLINSDGVLERTVFPSRYAMEMSSSIYKNWVFTEQALPKDLLKRGVAVEDPNSDNGVKLLIEDYPFAVDGLEIWSAIKTWVTEYCTFYYNNDKTVQTDTEIQSWWTELRTKGHGDKRHESWWPSMQTRDDLIETCTIIIWIASALHAAVNFGQYPYAGFLPNRPTVSRRFMPEPGTDEYAELEEDADVAFLKTITPQLQTLLGISIIEILSMHSTDEIYLGQRDSPNWTADDEPLEAFKRFGKELELIENNIIRRNNDKRFKNRTGPVNIPYTLLYPNTTDYTREGGITGKGIPNSVSI

SEQ ID NO: 45071 - protein, 854 aa, Arabidopsis thaliana
  peptide (1)..(854): Ceres Seq. ID no. 12600173
  misc_feature (36)..(146): Pfam Name: PLAT/LH2 domain Pfam Description: PLAT/LH2 domain
  misc_feature (36)..(146): Pfam Name: PLAT/LH2 domain Pfam Description: PLAT/LH2 domain
  misc_feature (1)..(854): Homolog of NCBI NO: 28411860 NR Description: putative lipoxygenase [Oryza sativa (japonica
  misc_feature (77)..(854): Homolog of NCBI NO: 7433169 NR Description: probable lipoxygenase (EC 1.13.11.12) (clone H1)
  misc_feature (70)..(854): Homolog of NCBI NO: 7433160 NR Description: probable lipoxygenase (EC 1.13.11.12) CPRD46,
  misc_feature (1)..(854): Homolog of NCBI NO: 6002055 NR Description: lipoxygenase [Arabidopsis thaliana]
  misc_feature (1)..(854): Homolog of NCBI NO: 7433165 NR Description: lipoxygenase (EC 1.13.11.12) loxD - tomato
  misc_feature (1)..(854): Homolog of NCBI NO: 28411860 NR Description: putative lipoxygenase [Oryza sativa (japonica
  misc_feature (70)..(854): Homolog of NCBI NO: 7433160 NR Description: probable lipoxygenase (EC 1.13.11.12) CPRD46,
  misc_feature (1)..(854): Homolog of NCBI NO: 7433165 NR Description: lipoxygenase (EC 1.13.11.12) loxD - tomato
  misc_feature (2)..(854): Homolog of NCBI NO: 8649004 NR Description: lipoxygenase [Prunus dulcis]
  misc_feature (2)..(854): Homolog of NCBI NO: 7433144 NR Description: lipoxygenase (EC 1.13.11.12) - potato
  misc_feature (2)..(854): Homolog of NCBI NO: 1407703 NR Description: lipoxygenase [Solanum tuberosum]
  misc_feature (1)..(854): Homolog of NCBI NO: 7433167 NR Description: probable lipoxygenase (EC 1.13.11.12) (clone H3)
  misc_feature (1)..(854): Homolog of NCBI NO: 15218506 NR Description: putative lipoxygenase
  misc_feature (1)..(854): Homolog of NCBI NO: 6002055 NR Description: lipoxygenase [Arabidopsis thaliana]
  misc_feature (77)..(854): Homolog of NCBI NO: 7433169 NR Description: probable lipoxygenase (EC 1.13.11.12) (clone H1)
  misc_feature (1)..(854): Homolog of NCBI NO: 15218506 NR Description: putative lipoxygenase
  misc_feature (1)..(854): Homolog of NCBI NO: 7433167 NR Description: probable lipoxygenase (EC 1.13.11.12) (clone H3)
  misc_feature (2)..(854): Homolog of NCBI NO: 1407703 NR Description: lipoxygenase [Solanum tuberosum]
  misc_feature (2)..(854): Homolog of NCBI NO: 7433144 NR Description: lipoxygenase (EC 1.13.11.12) - potato
  misc_feature (2)..(854): Homolog of NCBI NO: 8649004 NR Description: lipoxygenase [Prunus dulcis]
MKIEGEVVVMKKNLLDFKDVMASLLDRVNELLGRRVSLHLISSHQPDPANEKRGRLGKAAHLEKWVTKIKTSVTAEETAFGVTFDWDESMGPPAAFVIKNHHHSQFYLKSLTLRGFPDGEGGATAIHFICNSWIYPNHRYRSDRVFFSNKAYLPSETPELIKELREEELKNLRGNEKGGEFKEWDRVYDYAYYNDLGAPDKGPDSVRPVLGGSPELPYPRRGKTGRKSTKSDPKSESRLALLNLNIYVPRDERFSHVKFSDFLAYALKSVTQVLVPEIASVCDKTINEFDSFEDVFHLYDGSIKLANGHTISKLRDVIPWEMFRELVRNDGERFLKYPLPDILKESRSAWRTDEEFAREMLAGLNPVVISRLQEFPPKSCLDSAKYGNQHSSIRTEHIESNMNGLNVQEALEQNKLYILDHHDALMPYLTRINSTNTKTYATRTLLLLQADGTLKPLAIELSLPHAQGESYGSVSKVFTPAEKGVEGSVWQLAKAYAAVNDSGYHQLISHWLQTHAVIEPFIIASNRQLSVVHPIHKLLHPHFRDTMNINALARHVLINSDGVLERTVFPSRYAMEMSSSIYKNWVFTEQALPKDLLKRGVAVEDPNSDNGVKLLIEDYPFAVDGLEIWSAIKTWVTEYCTFYYNNDKTVQTDTEIQSWWTELRTKGHGDKRHESWWPSMQTRDDLIETCTIIIWIASALHAAVNFGQYPYAGFLPNRPTVSRRFMPEPGTDEYAELEEDADVAFLKTITPQLQTLLGISIIEILSMHSTDEIYLGQRDSPNWTADDEPLEAFKRFGKELELIENNIIRRNNDKRFKNRTGPVNIPYTLLYPNTTDYTREGGITGKGIPNSVSI

SEQ ID NO: 45072 - DNA, 1837 bp, Arabidopsis thaliana
  misc_feature (1)..(1837): Ceres Seq. ID no. 12560230
  misc_feature: MA Experiment ID: 20000184 Result: Down-regulated in Transcription
  misc_feature: MA Experiment 20000184 PARAMETER Experiment Name: At_Shoots__P Parameter: Age (day) Value: 7
  misc_feature: MA Experiment 20000184 PARAMETER Experiment Name: At_Shoots__P Parameter: Tissue Value: Shoots vs. Whole Plant
  misc_feature: MA Experiment ID: 20000185 Result: Down-regulated in Transcription
  misc_feature: MA Experiment 20000185 PARAMETER Experiment Name: At_Roots__P Parameter: Age (day) Value: 7 vs. 21
  misc_feature: MA Experiment 20000185 PARAMETER Experiment Name: At_Roots__P Parameter: Organism Value: A. thaliana
  misc_feature: MA Experiment 20000185 PARAMETER Experiment Name: At_Roots__P Parameter: Tissue Value: Roots vs. Whole Plant
  misc_feature: MA Experiment ID: 20000264 Result: Down-regulated in Transcription
  misc_feature: MA Experiment 20000264 PARAMETER Experiment Name: At_Open_Flower_P Parameter: Age (day) Value: 21
  misc_feature: MA Experiment 20000264 PARAMETER Experiment Name: At_Open_Flower_P Parameter: Plant Line Value: WS
  misc_feature: MA Experiment 20000264 PARAMETER Experiment Name: At_Open_Flower_P Parameter: Tissue Value: Open Flower vs. Whole Plant
  misc_feature: MA Experiment ID: 20000265 Result: Down-regulated in Transcription
  misc_feature: MA Experiment 20000265 PARAMETER Experiment Name: At_Open_Flower_P Parameter: Age (day) Value: 21
  misc_feature: MA Experiment 20000265 PARAMETER Experiment Name: At_Open_Flower_P Parameter: Plant Line Value: WS
  misc_feature: MA Experiment 20000265 PARAMETER Experiment Name: At_Open_Flower_P Parameter: Tissue Value: Closed Flower vs. Whole Plant
  misc_feature: MA Experiment ID: 20000286 Result: Down-regulated in Transcription
  misc_feature: MA Experiment 20000286 PARAMETER Experiment Name: At_Open_Flower_P Parameter: Age (day) Value: 21
  misc_feature: MA Experiment 20000286 PARAMETER Experiment Name: At_Open_Flower_P Parameter: Plant Line Value: WS
  misc_feature: MA Experiment 20000286 PARAMETER Experiment Name: At_Open_Flower_P Parameter: Tissue Value: Half Open vs. Whole Plant
  misc_feature: MA Experiment ID: 20000438 Result: Down-regulated in Transcription
  misc_feature: MA Experiment 20000438 PARAMETER Experiment Name: At_Shoots__P Parameter: Age (day) Value: 14
  misc_feature: MA Experiment 20000438 PARAMETER Experiment Name: At_Shoots__P Parameter: Tissue Value: Shoots vs. Whole Plant
  misc_feature: MA Experiment ID: 20000439 Result: Down-regulated in Transcription
  misc_feature: MA Experiment 20000439 PARAMETER Experiment Name: At_Roots__P Parameter: Age (day) Value: 14 vs. 21
  misc_feature: MA Experiment 20000439 PARAMETER Experiment Name: At_Roots__P Parameter: Organism Value: A. thaliana
  misc_feature: MA Experiment 20000439 PARAMETER Experiment Name: At_Roots__P Parameter: Tissue Value: Roots vs. Whole Plant
  misc_feature: MA Experiment ID: 20000527 Result: Down-regulated in Transcription
  misc_feature: MA Experiment 20000527 PARAMETER Experiment Name: At_10percent_PEG_P Parameter: Age (day) Value: 20
  misc_feature: MA Experiment 20000527 PARAMETER Experiment Name: At_10percent_PEG_P Parameter: Organism Value: A. thaliana
  misc_feature: MA Experiment 20000527 PARAMETER Experiment Name: At_10percent_PEG_P Parameter: Plant Line Value: WS
  misc_feature: MA Experiment 20000527 PARAMETER Experiment Name: At_10percent_PEG_P Parameter: Timepoint (day) Value: 20
  misc_feature: MA Experiment 20000527 PARAMETER Experiment Name: At_10percent_PEG_P Parameter: Tissue Value: Whole Plant
  misc_feature: MA Experiment 20000527 PARAMETER Experiment Name: At_10percent_PEG_P Parameter: Treatment Value: 10percent PEG vs. No Treatment
  misc_feature: MA Experiment ID: 20000794 Result: Down-regulated in Transcription
  misc_feature: MA Experiment 20000794 PARAMETER Experiment Name: At_Petals_P Parameter: Age (day) Value: 23-25 days
  misc_feature: MA Experiment 20000794 PARAMETER Experiment Name: At_Petals_P Parameter: Plant Line Value: WS
  misc_feature: MA Experiment 20000794 PARAMETER Experiment Name: At_Petals_P Parameter: Tissue Value: Petals vs. Whole plant
  misc_feature: MA Experiment ID: 20001248 Result: Down-regulated in Transcription
  misc_feature: MA Experiment 20001248 PARAMETER Experiment Name: At_Far-red-induction_P Parameter: Age (day) Value: 7
  misc_feature: MA Experiment 20001248 PARAMETER Experiment Name: At_Far-red-induction_P Parameter: Light Value: Far-red vs. White
  misc_feature: MA Experiment 20001248 PARAMETER Experiment Name: At_Far-red-induction_P Parameter: Organism Value: A. thaliana
  misc_feature: MA Experiment 20001248 PARAMETER Experiment Name: At_Far-red-induction_P Parameter: Plant Line Value: Columbia
  misc_feature: MA Experiment 20001248 PARAMETER Experiment Name: At_Far-red-induction_P Parameter: Timepoint (hr) Value: 4
  misc_feature: MA Experiment 20001248 PARAMETER Experiment Name: At_Far-red-induction_P Parameter: Tissue Value: Whole Plant
  misc_feature: MA Experiment ID: 20001450 Result: Down-regulated in Transcription
  misc_feature: MA Experiment 20001450 PARAMETER Experiment Name: At_Far-red-induction_P Parameter: Age (day) Value: 7
  misc_feature: MA Experiment 20001450 PARAMETER Experiment Name: At_Far-red-induction_P Parameter: Light Value: Far-red vs. White
  misc_feature: MA Experiment 20001450 PARAMETER Experiment Name: At_Far-red-induction_P Parameter: Organism Value: A. thaliana
  misc_feature: MA Experiment 20001450 PARAMETER Experiment Name: At_Far-red-induction_P Parameter: Plant Line Value: Columbia
  misc_feature: MA Experiment 20001450 PARAMETER Experiment Name: At_Far-red-induction_P Parameter: Timepoint (hr) Value: 8
  misc_feature: MA Experiment 20001450 PARAMETER Experiment Name: At_Far-red-induction_P Parameter: Tissue Value: Whole Plant
  misc_feature: MA Experiment ID: 20001451 Result: Down-regulated in Transcription
  misc_feature: MA Experiment 20001451 PARAMETER Experiment Name: At_Far-red-induction_P Parameter: Age (day) Value: 7
  misc_feature: MA Experiment 20001451 PARAMETER Experiment Name: At_Far-red-induction_P Parameter: Light Value: Far-red vs. White
  misc_feature: MA Experiment 20001451 PARAMETER Experiment Name: At_Far-red-induction_P Parameter: Organism Value: A. thaliana
  misc_feature: MA Experiment 20001451 PARAMETER Experiment Name: At_Far-red-induction_P Parameter: Plant Line Value: Columbia
  misc_feature: MA Experiment 20001451 PARAMETER Experiment Name: At_Far-red-induction_P Parameter: Timepoint (hr) Value: 24
  misc_feature: MA Experiment 20001451 PARAMETER Experiment Name: At_Far-red-induction_P Parameter: Tissue Value: Whole Plant
  misc_feature: MA Experiment ID: 20001458 Result: Down-regulated in Transcription
  misc_feature: MA Experiment 20001458 PARAMETER Experiment Name: At_50mM_NH4NO3_L-to-H_P Parameter: Age (day) Value: Undefined
  misc_feature: MA Experiment 20001458 PARAMETER Experiment Name: At_50mM_NH4NO3_L-to-H_P Parameter: Organism Value: Undefined
  misc_feature: MA Experiment 20001458 PARAMETER Experiment Name: At_50mM_NH4NO3_L-to-H_P Parameter: Plant Line Value: Undefined
  misc_feature: MA Experiment 20001458 PARAMETER Experiment Name: At_50mM_NH4NO3_L-to-H_P Parameter: Timepoint (hr) Value: 2
  misc_feature: MA Experiment 20001458 PARAMETER Experiment Name: At_50mM_NH4NO3_L-to-H_P Parameter: Tissue Value: Siliques
  misc_feature: MA Experiment 20001458 PARAMETER Experiment Name: At_50mM_NH4NO3_L-to-H_P Parameter: Treatment Value: 50mM NH4NO3 vs. 100mM Manitol
  misc_feature: MA Experiment ID: 20001556 Result: Down-regulated in Transcription
  misc_feature: MA Experiment 20001556 PARAMETER Experiment Name: At_Drought_Soil_Dry_P Parameter: Age (day) Value: 26
  misc_feature: MA Experiment 20001556 PARAMETER Experiment Name: At_Drought_Soil_Dry_P Parameter: Organism Value: A. thaliana
  misc_feature: MA Experiment 20001556 PARAMETER Experiment Name: At_Drought_Soil_Dry_P Parameter: Plant Line Value: WS
  misc_feature: MA Experiment 20001556 PARAMETER Experiment Name: At_Drought_Soil_Dry_P Parameter: Post Timepoint (hr) Value: None
  misc_feature: MA Experiment 20001556 PARAMETER Experiment Name: At_Drought_Soil_Dry_P Parameter: Post-Treatment Value: None
  misc_feature: MA Experiment 20001556 PARAMETER Experiment Name: At_Drought_Soil_Dry_P Parameter: Timepoint (day) Value: 12
  misc_feature: MA Experiment 20001556 PARAMETER Experiment Name: At_Drought_Soil_Dry_P Parameter: Treatment Value: Drought vs. No Drought
  misc_feature: MA Experiment ID: 20001558 Result: Down-regulated in Transcription
  misc_feature: MA Experiment 20001558 PARAMETER Experiment Name: At_Drought_Soil_Dry_P Parameter: Age (day) Value: 27
  misc_feature: MA Experiment 20001558 PARAMETER Experiment Name: At_Drought_Soil_Dry_P Parameter: Organism Value: A. thaliana
  misc_feature: MA Experiment 20001558 PARAMETER Experiment Name: At_Drought_Soil_Dry_P Parameter: Plant Line Value: WS
  misc_feature: MA Experiment 20001558 PARAMETER Experiment Name: At_Drought_Soil_Dry_P Parameter: Post Timepoint (hr) Value: 6
  misc_feature: MA Experiment 20001558 PARAMETER Experiment Name: At_Drought_Soil_Dry_P Parameter: Post-Treatment Value: Re-Water vs. No Drought
  misc_feature: MA Experiment 20001558 PARAMETER Experiment Name: At_Drought_Soil_Dry_P Parameter: Timepoint (day) Value: 13
  misc_feature: MA Experiment 20001558 PARAMETER Experiment Name: At_Drought_Soil_Dry_P Parameter: Treatment Value: Drought vs. No Drought
  misc_feature: MA Experiment ID: 20001905 Result: Down-regulated in Transcription
  misc_feature: MA Experiment 20001905 PARAMETER Experiment Name: At_Drought_Reproduction_P Parameter: Age (day) Value: 40
  misc_feature: MA Experiment 20001905 PARAMETER Experiment Name: At_Drought_Reproduction_P Parameter: Organism Value: A. thaliana
  misc_feature: MA Experiment 20001905 PARAMETER Experiment Name: At_Drought_Reproduction_P Parameter: Plant Line Value: WS
  misc_feature: MA Experiment 20001905 PARAMETER Experiment Name: At_Drought_Reproduction_P Parameter: Timepoint (day) Value: 10
  misc_feature: MA Experiment 20001905 PARAMETER Experiment Name: At_Drought_Reproduction_P Parameter: Tissue Value: Rosettes
  misc_feature: MA Experiment 20001905 PARAMETER Experiment Name: At_Drought_Reproduction_P Parameter: Treatment Value: Drought vs. No Drought
  misc_feature: MA Experiment ID: 20001906 Result: Down-regulated in Transcription
  misc_feature: MA Experiment 20001906 PARAMETER Experiment Name: At_Drought_Reproduction_P Parameter: Age (day) Value: 35
  misc_feature: MA Experiment 20001906 PARAMETER Experiment Name: At_Drought_Reproduction_P Parameter: Organism Value: A. thaliana
  misc_feature: MA Experiment 20001906 PARAMETER Experiment Name: At_Drought_Reproduction_P Parameter: Plant Line Value: WS
  misc_feature: MA Experiment 20001906 PARAMETER Experiment Name: At_Drought_Reproduction_P Parameter: Timepoint (day) Value: 5
  misc_feature: MA Experiment 20001906 PARAMETER Experiment Name: At_Drought_Reproduction_P Parameter: Tissue Value: Siliques
  misc_feature: MA Experiment 20001906 PARAMETER Experiment Name: At_Drought_Reproduction_P Parameter: Treatment Value: Drought vs. No Drought
  misc_feature: MA Experiment ID: 20001908 Result: Down-regulated in Transcription
  misc_feature: MA Experiment 20001908 PARAMETER Experiment Name: At_Drought_Reproduction_P Parameter: Age (day) Value: 40
  misc_feature: MA Experiment 20001908 PARAMETER Experiment Name: At_Drought_Reproduction_P Parameter: Organism Value: A. thaliana
  misc_feature: MA Experiment 20001908 PARAMETER Experiment Name: At_Drought_Reproduction_P Parameter: Plant Line Value: WS
  misc_feature: MA Experiment 20001908 PARAMETER Experiment Name: At_Drought_Reproduction_P Parameter: Timepoint (day) Value: 10
  misc_feature: MA Experiment 20001908 PARAMETER Experiment Name: At_Drought_Reproduction_P Parameter: Tissue Value: Siliques
  misc_feature: MA Experiment 20001908 PARAMETER Experiment Name: At_Drought_Reproduction_P Parameter: Treatment Value: Drought vs. No Drought
  misc_feature: MA Experiment ID: 20001911 Result: Down-regulated in Transcription
  misc_feature: MA Experiment 20001911 PARAMETER Experiment Name: At_Drought_Reproduction_P Parameter: Age (day) Value: 40
  misc_feature: MA Experiment 20001911 PARAMETER Experiment Name: At_Drought_Reproduction_P Parameter: Organism Value: A. thaliana
  misc_feature: MA Experiment 20001911 PARAMETER Experiment Name: At_Drought_Reproduction_P Parameter: Plant Line Value: WS
  misc_feature: MA Experiment 20001911 PARAMETER Experiment Name: At_Drought_Reproduction_P Parameter: Timepoint (day) Value: 10
  misc_feature: MA Experiment 20001911 PARAMETER Experiment Name: At_Drought_Reproduction_P Parameter: Tissue Value: Flowers
  misc_feature: MA Experiment 20001911 PARAMETER Experiment Name: At_Drought_Reproduction_P Parameter: Treatment Value: Drought vs. No Drought
actacacacgaatcatcaaagttgcacatatatcacaatggcaactacatcattctcattaccaaatcataagttcgggatcaaactaatgttgttcctagtcttgaacctcttgtcccttcagacttcagtatttgcccattcatcaaactctaaattcacaaaaatctcaagacacccaaactccgattcatcttcgagaaccaaaccctcaacttcttccaacaaagggtttctcagctcagtccaactcagcttggaccacgctctctttgctcgttctctcgcctttaatctcacgctttcgcaccgtacttctcaaaccctcatgctagatcctgtcaacgactgccttgagctgcttgacgacaccctcgacatgttgtatcgcatcgttgtcatcaagcgtaaagatcacgtcaatgatgatgtacatacgtggctaagcgcggcgttgactaatcaagagacatgtaagcaaagcctcagtgagaaatctagcttcaacaaagaaggaattgcgatagattctttcgcaagaaacctcaccggtttactgaccaattcactagacatgttcgtgtctgataaacagaagagttcttcttcgtctaatctaactggtggccggaaactgttgtccgatcatgattttccgacgtgggtttcttcgtcagaccggaagcttttagaagcttcagtagaagagctgagacctcacgctgtggtggcagccgacggaagcgggactcacatgagcgtagccgaagcgttggcgtctttggagaagggaagtggcagaagcgtaatccatttaacagccggaacctataaagagaatctgaatattccgagcaaacagaagaacgttatgttggtcggtgacgggaagggcaaaacagtcattgtcggtagcagaagtaacagaggcggctggaatacttaccaatccgctactgtcgccgccatgggagatggattcatagctcgagacataacattcgtgaacagtgccggaccaaactcggagcaagctgtagcattacgggtcggatcagataggtccgtggtatacagatgctcaatagatgggtaccaagactcactctacactctctccaaacgacagttctatagagaaaccgacataacaggcaccgtcgatttcatcttcggaaactctgccgtcgttttccaaagctgcaacctcgtatctcgtaaaggctcctcggaccagaactacgtcacggcccaaggccggtccgacccgaaccagaacaccggtatttctatccataattgcagaataaccggttcgaccaagacttacttgggtcgtccatggaagcagtattcgaggactgttgtgatgcaatcgtttatagacggctcgattcacccttcgggttggtctccttggtcgagtaactttgctttgaagactctttattacggagaatttgggaattcgggtcctggatcatcggtgtcgggtcgggttagttgggccgggtatcacccggcgttgacgttgactgaagctcaagggtttactgtttcgggtttcattgacgggaattcttggttgccgtcaacaggtgtcgttttcgactctggccttttataatttaagtgacgttttaaatgaatttttactctgatcatgatattcatatactgctttaaattgatattaactaatcaatcatgtggtaaaaaaaaaaaaacgtaaatgtaattaaatatagttgtgtattgcattttgtgattggttgtatactcctatcatagttgtaaatgttcttgtcatgaataaaagtgtgaaaattggtattgt

SEQ ID NO: 45073 - protein, 541 aa, Arabidopsis thaliana
  peptide (1)..(541): Ceres Seq. ID no. 12560231
  misc_feature (240)..(526): Pfam Name: Pectinesterase Pfam Description: Pectinesterase
  misc_feature (114)..(540): Homolog of NCBI NO: 6689892 NR Description: pectin methyl esterase [Solanum tuberosum]
  misc_feature (17)..(540): Homolog of NCBI NO: 6689890 NR Description: pectin methyl esterase [Solanum tuberosum]
  misc_feature (114)..(540): Homolog of NCBI NO: 29539387 NR Description: pectin methylesterase [Pisum sativum]
  misc_feature (101)..(540): Homolog of NCBI NO: 20269071 NR Description: pectin methylesterase [Sesbania rostrata]
  misc_feature (38)..(540): Homolog of NCBI NO: 29539385 NR Description: pectin methylesterase [Pisum sativum]
  misc_feature (38)..(540): Homolog of NCBI NO: 7447372 NR Description: pectinesterase (EC 3.1.1.11) precursor - garden
  misc_feature (38)..(540): Homolog of NCBI NO: 7447371 NR Description: probable pectinesterase (EC 3.1.1.11) precursor -
  misc_feature (200)..(541): Homolog of NCBI NO: 14582864 NR Description: putative pectin methylesterase LuPME1 [Linum
  misc_feature (13)..(541): Homolog of NCBI NO: 15224207 NR Description: pectinesterase family; protein id: At2g43050.1
  misc_feature (13)..(541): Homolog of NCBI NO: 15231618 NR Description: pectinesterase family
LHTNHQSCTYITMATTSFSLPNHKFGIKLMLFLVLNLLSLQTSVFAHSSNSKFTKISRHPNSDSSSRTKPSTSSNKGFLSSVQLSLDHALFARSLAFNLTLSHRTSQTLMLDPVNDCLELLDDTLDMLYRIVVIKRKDHVNDDVHTWLSAALTNQETCKQSLSEKSSFNKEGIAIDSFARNLTGLLTNSLDMFVSDKQKSSSSSNLTGGRKLLSDHDFPTWVSSSDRKLLEASVEELRPHAVVAADGSGTHMSVAEALASLEKGSGRSVIHLTAGTYKENLNIPSKQKNVMLVGDGKGKTVIVGSRSNRGGWNTYQSATVAAMGDGFIARDITFVNSAGPNSEQAVALRVGSDRSVVYRCSIDGYQDSLYTLSKRQFYRETDITGTVDFIFGNSAVVFQSCNLVSRKGSSDQNYVTAQGRSDPNQNTGISIHNCRITGSTKTYLGRPWKQYSRTVVMQSFIDGSIHPSGWSPWSSNFALKTLYYGEFGNSGPGSSVSGRVSWAGYHPALTLTEAQGFTVSGFIDGNSWLPSTGVVFDSGLL

SEQ ID NO: 45074 - protein, 529 aa, Arabidopsis thaliana
  peptide (1)..(529): Ceres Seq. ID no. 12560232
  misc_feature (228)..(514): Pfam Name: Pectinesterase Pfam Description: Pectinesterase
  misc_feature (102)..(528): Homolog of NCBI NO: 6689892 NR Description: pectin methyl esterase [Solanum tuberosum]
  misc_feature (5)..(528): Homolog of NCBI NO: 6689890 NR Description: pectin methyl esterase [Solanum tuberosum]
  misc_feature (102)..(528): Homolog of NCBI NO: 29539387 NR Description: pectin methylesterase [Pisum sativum]
  misc_feature (89)..(528): Homolog of NCBI NO: 20269071 NR Description: pectin methylesterase [Sesbania rostrata]
  misc_feature (26)..(528): Homolog of NCBI NO: 29539385 NR Description: pectin methylesterase [Pisum sativum]
  misc_feature (26)..(528): Homolog of NCBI NO: 7447372 NR Description: pectinesterase (EC 3.1.1.11) precursor - garden
  misc_feature (26)..(528): Homolog of NCBI NO: 7447371 NR Description: probable pectinesterase (EC 3.1.1.11) precursor -
  misc_feature (188)..(529): Homolog of NCBI NO: 14582864 NR Description: putative pectin methylesterase LuPME1 [Linum
  misc_feature (1)..(529): Homolog of NCBI NO: 15224207 NR Description: pectinesterase family; protein id: At2g43050.1
  misc_feature (1)..(529): Homolog of NCBI NO: 15231618 NR Description: pectinesterase family
MATTSFSLPNHKFGIKLMLFLVLNLLSLQTSVFAHSSNSKFTKISRHPNSDSSSRTKPSTSSNKGFLSSVQLSLDHALFARSLAFNLTLSHRTSQTLMLDPVNDCLELLDDTLDMLYRIVVIKRKDHVNDDVHTWLSAALTNQETCKQSLSEKSSFNKEGIAIDSFARNLTGLLTNSLDMFVSDKQKSSSSSNLTGGRKLLSDHDFPTWVSSSDRKLLEASVEELRPHAVVAADGSGTHMSVAEALASLEKGSGRSVIHLTAGTYKENLNIPSKQKNVMLVGDGKGKTVIVGSRSNRGGWNTYQSATVAAMGDGFIARDITFVNSAGPNSEQAVALRVGSDRSVVYRCSIDGYQDSLYTLSKRQFYRETDITGTVDFIFGNSAVVFQSCNLVSRKGSSDQNYVTAQGRSDPNQNTGISIHNCRITGSTKTYLGRPWKQYSRTVVMQSFIDGSIHPSGWSPWSSNFALKTLYYGEFGNSGPGSSVSGRVSWAGYHPALTLTEAQGFTVSGFIDGNSWLPSTGVVFDSGLL

SEQ ID NO: 45075 - protein, 512 aa, Arabidopsis thaliana
  peptide (1)..(512): Ceres Seq. ID no. 12560233
  misc_feature (211)..(497): Pfam Name: Pectinesterase Pfam Description: Pectinesterase
  misc_feature (85)..(511): Homolog of NCBI NO: 6689892 NR Description: pectin methyl esterase [Solanum tuberosum]
  misc_feature (1)..(511): Homolog of NCBI NO: 6689890 NR Description: pectin methyl esterase [Solanum tuberosum]
  misc_feature (85)..(511): Homolog of NCBI NO: 29539387 NR Description: pectin methylesterase [Pisum sativum]
  misc_feature (72)..(511): Homolog of NCBI NO: 20269071 NR Description: pectin methylesterase [Sesbania rostrata]
  misc_feature (9)..(511): Homolog of NCBI NO: 29539385 NR Description: pectin methylesterase [Pisum sativum]
  misc_feature (9)..(511): Homolog of NCBI NO: 7447372 NR Description: pectinesterase (EC 3.1.1.11) precursor - garden
  misc_feature (9)..(511): Homolog of NCBI NO: 7447371 NR Description: probable pectinesterase (EC 3.1.1.11) precursor -
  misc_feature (171)..(512): Homolog of NCBI NO: 14582864 NR Description: putative pectin methylesterase LuPME1 [Linum
  misc_feature (1)..(512): Homolog of NCBI NO: 15224207 NR Description: pectinesterase family; protein id: At2g43050.1
  misc_feature (1)..(512): Homolog of NCBI NO: 15231618 NR Description: pectinesterase family
MLFLVLNLLSLQTSVFAHSSNSKFTKISRHPNSDSSSRTKPSTSSNKGFLSSVQLSLDHALFARSLAFNLTLSHRTSQTLMLDPVNDCLELLDDTLDMLYRIVVIKRKDHVNDDVHTWLSAALTNQETCKQSLSEKSSFNKEGIAIDSFARNLTGLLTNSLDMFVSDKQKSSSSSNLTGGRKLLSDHDFPTWVSSSDRKLLEASVEELRPHAVVAADGSGTHMSVAEALASLEKGSGRSVIHLTAGTYKENLNIPSKQKNVMLVGDGKGKTVIVGSRSNRGGWNTYQSATVAAMGDGFIARDITFVNSAGPNSEQAVALRVGSDRSVVYRCSIDGYQDSLYTLSKRQFYRETDITGTVDFIFGNSAVVFQSCNLVSRKGSSDQNYVTAQGRSDPNQNTGISIHNCRITGSTKTYLGRPWKQYSRTVVMQSFIDGSIHPSGWSPWSSNFALKTLYYGEFGNSGPGSSVSGRVSWAGYHPALTLTEAQGFTVSGFIDGNSWLPSTGVVFDSGLL

SEQ ID NO: 45076 - DNA, 2701 bp, Arabidopsis thaliana; identical to SEQ ID NO: 38826
  misc_feature (1)..(2701): Ceres Seq. ID no. 12599860
  misc_feature: MA Experiment ID: 20000171 Result: Up-regulated in Transcription
  misc_feature: MA Experiment 20000171 PARAMETER Experiment Name: At_42deg_Heat_P Parameter: Age (day) Value: 14
  misc_feature: MA Experiment 20000171 PARAMETER Experiment Name: At_42deg_Heat_P Parameter: Organism Value: A. thaliana
  misc_feature: MA Experiment 20000171 PARAMETER Experiment Name: At_42deg_Heat_P Parameter: Plant Line Value: WS
  misc_feature: MA Experiment 20000171 PARAMETER Experiment Name: At_42deg_Heat_P Parameter: Temperature (deg C) Value: 42 vs. 22
  misc_feature: MA Experiment 20000171 PARAMETER Experiment Name: At_42deg_Heat_P Parameter: Timepoint (hr) Value: 1
  misc_feature: MA Experiment 20000171 PARAMETER Experiment Name: At_42deg_Heat_P Parameter: Tissue Value: Aerial
  misc_feature: MA Experiment ID: 20000180 Result: Up-regulated in Transcription
  misc_feature: MA Experiment 20000180 PARAMETER Experiment Name: At_Germinating_Seeds_P Parameter: Age (hr) Value: 24 vs. 0
  misc_feature: MA Experiment 20000180 PARAMETER Experiment Name: At_Germinating_Seeds_P Parameter: Tissue Value: Germinating Seeds
  misc_feature: MA Experiment ID: 20000184 Result: Down-regulated in Transcription
  misc_feature: MA Experiment 20000184 PARAMETER Experiment Name: At_Shoots__P Parameter: Age (day) Value: 7
  misc_feature: MA Experiment 20000184 PARAMETER Experiment Name: At_Shoots__P Parameter: Tissue Value: Shoots vs. Whole Plant
  misc_feature: MA Experiment ID: 20000227 Result: Up-regulated in Transcription
  misc_feature: MA Experiment 20000227 PARAMETER Experiment Name: At_Root-Tips-vs-Tops_P Parameter: Tissue Value: Root Tips vs. Root Tops
  misc_feature: MA Experiment ID: 20000234 Result: Up-regulated in Transcription
  misc_feature: MA Experiment 20000234 PARAMETER Experiment Name: At_Siliques_P Parameter: Age (day) Value: 21
  misc_feature: MA Experiment 20000234 PARAMETER Experiment Name: At_Siliques_P Parameter: Organism Value: A. thaliana
  misc_feature: MA Experiment 20000234 PARAMETER Experiment Name: At_Siliques_P Parameter: Plant Line Value: WS
  misc_feature: MA Experiment 20000234 PARAMETER Experiment Name: At_Siliques_P Parameter: Tissue Value: Less Than 5mm Siliques vs. Whole Plant
  misc_feature: MA Experiment ID: 20000265 Result: Up-regulated in Transcription
  misc_feature: MA Experiment 20000265 PARAMETER Experiment Name: At_Open_Flower_P Parameter: Age (day) Value: 21
  misc_feature: MA Experiment 20000265 PARAMETER Experiment Name: At_Open_Flower_P Parameter: Plant Line Value: WS
  misc_feature: MA Experiment 20000265 PARAMETER Experiment Name: At_Open_Flower_P Parameter: Tissue Value: Closed Flower vs. Whole Plant
  misc_feature: MA Experiment ID: 20000445 Result: Up-regulated in Transcription
  misc_feature: MA Experiment 20000445 PARAMETER Experiment Name: At_100uM_NAA__P Parameter: Age (day) Value: 14
  misc_feature: MA Experiment 20000445 PARAMETER Experiment Name: At_100uM_NAA__P Parameter: Organism Value: A. thaliana
  misc_feature: MA Experiment 20000445 PARAMETER Experiment Name: At_100uM_NAA__P Parameter: Plant Line Value: WS
  misc_feature: MA Experiment 20000445 PARAMETER Experiment Name: At_100uM_NAA__P Parameter: Timepoint (hr) Value: 6
  misc_feature: MA Experiment 20000445 PARAMETER Experiment Name: At_100uM_NAA__P Parameter: Tissue Value: Aerial
  misc_feature: MA Experiment 20000445 PARAMETER Experiment Name: At_100uM_NAA__P Parameter: Treatment Value: 100uM NAA vs. No Treatment
  misc_feature: MA Experiment ID: 20000794 Result: Down-regulated in Transcription
  misc_feature: MA Experiment 20000794 PARAMETER Experiment Name: At_Petals_P Parameter: Age (day) Value: 23-25 days
  misc_feature: MA Experiment 20000794 PARAMETER Experiment Name: At_Petals_P Parameter: Plant Line Value: WS
  misc_feature: MA Experiment 20000794 PARAMETER Experiment Name: At_Petals_P Parameter: Tissue Value: Petals vs. Whole plant
  misc_feature: MA Experiment ID: 20001248 Result: Down-regulated in Transcription
  misc_feature: MA Experiment 20001248 PARAMETER Experiment Name: At_Far-red-induction_P Parameter: Age (day) Value: 7
  misc_feature: MA Experiment 20001248 PARAMETER Experiment Name: At_Far-red-induction_P Parameter: Light Value: Far-red vs. White
  misc_feature: MA Experiment 20001248 PARAMETER Experiment Name: At_Far-red-induction_P Parameter: Organism Value: A. thaliana
  misc_feature: MA Experiment 20001248 PARAMETER Experiment Name: At_Far-red-induction_P Parameter: Plant Line Value: Columbia
  misc_feature: MA Experiment 20001248 PARAMETER Experiment Name: At_Far-red-induction_P Parameter: Timepoint (hr) Value: 4
  misc_feature: MA Experiment 20001248 PARAMETER Experiment Name: At_Far-red-induction_P Parameter: Tissue Value: Whole Plant
  misc_feature: MA Experiment ID: 20001451 Result: Down-regulated in Transcription
  misc_feature: MA Experiment 20001451 PARAMETER Experiment Name: At_Far-red-induction_P Parameter: Age (day) Value: 7
  misc_feature: MA Experiment 20001451 PARAMETER Experiment Name: At_Far-red-induction_P Parameter: Light Value: Far-red vs. White
  misc_feature: MA Experiment 20001451 PARAMETER Experiment Name: At_Far-red-induction_P Parameter: Organism Value: A. thaliana
  misc_feature: MA Experiment 20001451 PARAMETER Experiment Name: At_Far-red-induction_P Parameter: Plant Line Value: Columbia
  misc_feature: MA Experiment 20001451 PARAMETER Experiment Name: At_Far-red-induction_P Parameter: Timepoint (hr) Value: 24
  misc_feature: MA Experiment 20001451 PARAMETER Experiment Name: At_Far-red-induction_P Parameter: Tissue Value: Whole Plant
  misc_feature: MA Experiment ID: 20001905 Result: Down-regulated in Transcription
  misc_feature: MA Experiment 20001905 PARAMETER Experiment Name: At_Drought_Reproduction_P Parameter: Age (day) Value: 40
  misc_feature: MA Experiment 20001905 PARAMETER Experiment Name: At_Drought_Reproduction_P Parameter: Organism Value: A. thaliana
  misc_feature: MA Experiment 20001905 PARAMETER Experiment Name: At_Drought_Reproduction_P Parameter: Plant Line Value: WS
  misc_feature: MA Experiment 20001905 PARAMETER Experiment Name: At_Drought_Reproduction_P Parameter: Timepoint (day) Value: 10
  misc_feature: MA Experiment 20001905 PARAMETER Experiment Name: At_Drought_Reproduction_P Parameter: Tissue Value: Rosettes
  misc_feature: MA Experiment 20001905 PARAMETER Experiment Name: At_Drought_Reproduction_P Parameter: Treatment Value: Drought vs. No Drought

SEQ ID NO: 45077 - protein, 823 aa, Arabidopsis thaliana; identical to SEQ ID NO: 38827
  peptide (1)..(823): Ceres Seq. ID no. 12599861
  misc_feature (258)..(806): Pfam Name: Hsp90 protein Pfam Description: Hsp90 protein
  misc_feature (258)..(806): Pfam Name: Hsp90 protein Pfam Description: Hsp90 protein
  misc_feature (498)..(818): Homolog of NCBI NO: 20453106 NR Description: At2g04030/F3C11.14 [Arabidopsis thaliana]
  misc_feature (71)..(489): Homolog of NCBI NO: 20453106 NR Description: At2g04030/F3C11.14 [Arabidopsis thaliana]
  misc_feature (498)..(818): Homolog of NCBI NO: 15228059 NR Description: putative heat shock protein
  misc_feature (71)..(489): Homolog of NCBI NO: 15228059 NR Description: putative heat shock protein
  misc_feature (495)..(795): Homolog of NCBI NO: 22086553 NR Description: heat shock protein Hsp90 [Achlya ambisexualis]
  misc_feature (498)..(818): Homolog of NCBI NO: 20453106 NR Description: At2g04030/F3C11.14 [Arabidopsis thaliana]
  misc_feature (498)..(818): Homolog of NCBI NO: 15228059 NR Description: putative heat shock protein
  misc_feature (495)..(795): Homolog of NCBI NO: 22086553 NR Description: heat shock protein Hsp90 [Achlya ambisexualis]
  misc_feature (33)..(485): Homolog of NCBI NO: 27803582 NR Description: heat shock protein gp96 [Xenopus laevis]
  misc_feature (495)..(822): Homolog of NCBI NO: 27803582 NR Description: heat shock protein gp96 [Xenopus laevis]
  misc_feature (29)..(522): Homolog of NCBI NO: 21357739 NR Description: Glycoprotein 93 CG5520-PA
  misc_feature (494)..(817): Homolog of NCBI NO: 21357739 NR Description: Glycoprotein 93 CG5520-PA
  misc_feature (76)..(485): Homolog of NCBI NO: 22086553 NR Description: heat shock protein Hsp90 [Achlya ambisexualis]
  misc_feature (71)..(489): Homolog of NCBI NO: 15228059 NR Description: putative heat shock protein
  misc_feature (71)..(489): Homolog of NCBI NO: 20453106 NR Description: At2g04030/F3C11.14 [Arabidopsis thaliana]
  misc_feature (76)..(485): Homolog of NCBI NO: 22086553 NR Description: heat shock protein Hsp90 [Achlya ambisexualis]
  misc_feature (494)..(817): Homolog of NCBI NO: 21357739 NR Description: Glycoprotein 93 CG5520-PA
  misc_feature (29)..(522): Homolog of NCBI NO: 21357739 NR Description: Glycoprotein 93 CG5520-PA
  misc_feature (495)..(822): Homolog of NCBI NO: 27803582 NR Description: heat shock protein gp96 [Xenopus laevis]
  misc_feature (33)..(485): Homolog of NCBI NO: 27803582 NR Description: heat shock protein gp96 [Xenopus laevis]

SEQ ID NO: 45078 - protein, 757 aa, Arabidopsis thaliana; identical to SEQ ID NO: 38828
  peptide (1)..(757): Ceres Seq. ID no. 12599862
  misc_feature (192)..(740): Pfam Name: Hsp90 protein Pfam Description: Hsp90 protein
  misc_feature (192)..(740): Pfam Name: Hsp90 protein Pfam Description: Hsp90 protein
  misc_feature (432)..(752): Homolog of NCBI NO: 20453106 NR Description: At2g04030/F3C11.14 [Arabidopsis thaliana]
  misc_feature (5)..(423): Homolog of NCBI NO: 20453106 NR Description: At2g04030/F3C11.14 [Arabidopsis thaliana]
  misc_feature (432)..(752): Homolog of NCBI NO: 15228059 NR Description: putative heat shock protein
  misc_feature (5)..(423): Homolog of NCBI NO: 15228059 NR Description: putative heat shock protein
  misc_feature (429)..(729): Homolog of NCBI NO: 22086553 NR Description: heat shock protein Hsp90 [Achlya ambisexualis]
  misc_feature (432)..(752): Homolog of NCBI NO: 20453106 NR Description: At2g04030/F3C11.14 [Arabidopsis thaliana]
  misc_feature (432)..(752): Homolog of NCBI NO: 15228059 NR Description: putative heat shock protein
  misc_feature (429)..(729): Homolog of NCBI NO: 22086553 NR Description: heat shock protein Hsp90 [Achlya ambisexualis]
  misc_feature (1)..(419): Homolog of NCBI NO: 27803582 NR Description: heat shock protein gp96 [Xenopus laevis]
  misc_feature (429)..(756): Homolog of NCBI NO: 27803582 NR Description: heat shock protein gp96 [Xenopus laevis]
  misc_feature (1)..(456): Homolog of NCBI NO: 21357739 NR Description: Glycoprotein 93 CG5520-PA
  misc_feature (428)..(751): Homolog of NCBI NO: 21357739 NR Description: Glycoprotein 93 CG5520-PA
  misc_feature (10)..(419): Homolog of NCBI NO: 22086553 NR Description: heat shock protein Hsp90 [Achlya ambisexualis]
  misc_feature (5)..(423): Homolog of NCBI NO: 15228059 NR Description: putative heat shock protein
  misc_feature (5)..(423): Homolog of NCBI NO: 20453106 NR Description: At2g04030/F3C11.14 [Arabidopsis thaliana]
  misc_feature (10)..(419): Homolog of NCBI NO: 22086553 NR Description: heat shock protein Hsp90 [Achlya ambisexualis]
  misc_feature (428)..(751): Homolog of NCBI NO: 21357739 NR Description: Glycoprotein 93 CG5520-PA
  misc_feature (1)..(456): Homolog of NCBI NO: 21357739 NR Description: Glycoprotein 93 CG5520-PA
  misc_feature (429)..(756): Homolog of NCBI NO: 27803582 NR Description: heat shock protein gp96 [Xenopus laevis]
  misc_feature (1)..(419): Homolog of NCBI NO: 27803582 NR Description: heat shock protein gp96 [Xenopus laevis]

SEQ ID NO: 45079 - protein, 735 aa, Arabidopsis thaliana; identical to SEQ ID NO: 38829
  peptide (1)..(735): Ceres Seq. ID no. 12599863
  misc_feature (170)..(718): Pfam Name: Hsp90 protein Pfam Description: Hsp90 protein
  misc_feature (170)..(718): Pfam Name: Hsp90 protein Pfam Description: Hsp90 protein
  misc_feature (410)..(730): Homolog of NCBI NO: 20453106 NR Description: At2g04030/F3C11.14 [Arabidopsis thaliana]
  misc_feature (1)..(401): Homolog of NCBI NO: 20453106 NR Description: At2g04030/F3C11.14 [Arabidopsis thaliana]
  misc_feature (410)..(730): Homolog of NCBI NO: 15228059 NR Description: putative heat shock protein
  misc_feature (1)..(401): Homolog of NCBI NO: 15228059 NR Description: putative heat shock protein
  misc_feature (407)..(707): Homolog of NCBI NO: 22086553 NR Description: heat shock protein Hsp90 [Achlya ambisexualis]
  misc_feature (410)..(730): Homolog of NCBI NO: 20453106 NR Description: At2g04030/F3C11.14 [Arabidopsis thaliana]
  misc_feature (410)..(730): Homolog of NCBI NO: 15228059 NR Description: putative heat shock protein
  misc_feature (407)..(707): Homolog of NCBI NO: 22086553 NR Description: heat shock protein Hsp90 [Achlya ambisexualis]
  misc_feature (1)..(397): Homolog of NCBI NO: 27803582 NR Description: heat shock protein gp96 [Xenopus laevis]
  misc_feature (407)..(734): Homolog of NCBI NO: 27803582 NR Description: heat shock protein gp96 [Xenopus laevis]
  misc_feature (1)..(434): Homolog of NCBI NO: 21357739 NR Description: Glycoprotein 93 CG5520-PA
  misc_feature (406)..(729): Homolog of NCBI NO: 21357739 NR Description: Glycoprotein 93 CG5520-PA
  misc_feature (1)..(397): Homolog of NCBI NO: 22086553 NR Description: heat shock protein Hsp90 [Achlya ambisexualis]
  misc_feature (1)..(401): Homolog of NCBI NO: 15228059 NR Description: putative heat shock protein
  misc_feature (1)..(401): Homolog of NCBI NO: 20453106 NR Description: At2g04030/F3C11.14 [Arabidopsis thaliana]
  misc_feature (1)..(397): Homolog of NCBI NO: 22086553 NR Description: heat shock protein Hsp90 [Achlya ambisexualis]
  misc_feature (406)..(729): Homolog of NCBI NO: 21357739 NR Description: Glycoprotein 93 CG5520-PA
  misc_feature (1)..(434): Homolog of NCBI NO: 21357739 NR Description: Glycoprotein 93 CG5520-PA
  misc_feature (407)..(734): Homolog of NCBI NO: 27803582 NR Description: heat shock protein gp96 [Xenopus laevis]
  misc_feature (1)..(397): Homolog of NCBI NO: 27803582 NR Description: heat shock protein gp96 [Xenopus laevis]

SEQ ID NO: 45080 - DNA, 1195 bp, Arabidopsis thaliana
  misc_feature (1)..(1195): Ceres Seq. ID no. 13575811
  misc_feature: MA Experiment ID: 20000179 Result: Up-regulated in Transcription
  misc_feature: MA Experiment 20000179 PARAMETER Experiment Name: At_Germinating_Seeds_P Parameter: Age (hr) Value: 6 vs. 0
  misc_feature: MA Experiment 20000179 PARAMETER Experiment Name: At_Germinating_Seeds_P Parameter: Tissue Value: Germinating Seeds
  misc_feature: MA Experiment ID: 20000180 Result: Up-regulated in Transcription
  misc_feature: MA Experiment 20000180 PARAMETER Experiment Name: At_Germinating_Seeds_P Parameter: Age (hr) Value: 24 vs. 0
  misc_feature: MA Experiment 20000180 PARAMETER Experiment Name: At_Germinating_Seeds_P Parameter: Tissue Value: Germinating Seeds
  misc_feature: MA Experiment ID: 20000184 Result: Up-regulated in Transcription
  misc_feature: MA Experiment 20000184 PARAMETER Experiment Name: At_Shoots__P Parameter: Age (day) Value: 7
  misc_feature: MA Experiment 20000184 PARAMETER Experiment Name: At_Shoots__P Parameter: Tissue Value: Shoots vs. Whole Plant
  misc_feature: MA Experiment ID: 20000234 Result: Up-regulated in Transcription
  misc_feature: MA Experiment 20000234 PARAMETER Experiment Name: At_Siliques_P Parameter: Age (day) Value: 21
  misc_feature: MA Experiment 20000234 PARAMETER Experiment Name: At_Siliques_P Parameter: Organism Value: A. thaliana
  misc_feature: MA Experiment 20000234 PARAMETER Experiment Name: At_Siliques_P Parameter: Plant Line Value: WS
  misc_feature: MA Experiment 20000234 PARAMETER Experiment Name: At_Siliques_P Parameter: Tissue Value: Less Than 5mm Siliques vs. Whole Plant
  misc_feature: MA Experiment ID: 20000235 Result: Up-regulated in Transcription
  misc_feature: MA Experiment 20000235 PARAMETER Experiment Name: At_Siliques_P Parameter: Age (day) Value: 21
  misc_feature: MA Experiment 20000235 PARAMETER Experiment Name: At_Siliques_P Parameter: Organism Value: A. thaliana
  misc_feature: MA Experiment 20000235 PARAMETER Experiment Name: At_Siliques_P Parameter: Plant Line Value: WS
  misc_feature: MA Experiment 20000235 PARAMETER Experiment Name: At_Siliques_P Parameter: Tissue Value: 5-10mm Siliques vs. Whole Plant
  misc_feature: MA Experiment ID: 20000264 Result: Up-regulated in Transcription
  misc_feature: MA Experiment 20000264 PARAMETER Experiment Name: At_Open_Flower_P Parameter: Age (day) Value: 21
  misc_feature: MA Experiment 20000264 PARAMETER Experiment Name: At_Open_Flower_P Parameter: Plant Line Value: WS
  misc_feature: MA Experiment 20000264 PARAMETER Experiment Name: At_Open_Flower_P Parameter: Tissue Value: Open Flower vs. Whole Plant
  misc_feature: MA Experiment ID: 20000265 Result: Up-regulated in Transcription
  misc_feature: MA Experiment 20000265 PARAMETER Experiment Name: At_Open_Flower_P Parameter: Age (day) Value: 21
  misc_feature: MA Experiment 20000265 PARAMETER Experiment Name: At_Open_Flower_P Parameter: Plant Line Value: WS
  misc_feature: MA Experiment 20000265 PARAMETER Experiment Name: At_Open_Flower_P Parameter: Tissue Value: Closed Flower vs. Whole Plant
  misc_feature: MA Experiment ID: 20000286 Result: Up-regulated in Transcription
  misc_feature: MA Experiment 20000286 PARAMETER Experiment Name: At_Open_Flower_P Parameter: Age (day) Value: 21
  misc_feature: MA Experiment 20000286 PARAMETER Experiment Name: At_Open_Flower_P Parameter: Plant Line Value: WS
  misc_feature: MA Experiment 20000286 PARAMETER Experiment Name: At_Open_Flower_P Parameter: Tissue Value: Half Open vs. Whole Plant
  misc_feature: MA Experiment ID: 20000438 Result: Up-regulated in Transcription
  misc_feature: MA Experiment 20000438 PARAMETER Experiment Name: At_Shoots__P Parameter: Age (day) Value: 14
  misc_feature: MA Experiment 20000438 PARAMETER Experiment Name: At_Shoots__P Parameter: Tissue Value: Shoots vs. Whole Plant
  misc_feature: MA Experiment ID: 20001911 Result: Down-regulated in Transcription
  misc_feature: MA Experiment 20001911 PARAMETER Experiment Name: At_Drought_Reproduction_P Parameter: Age (day) Value: 40
  misc_feature: MA Experiment 20001911 PARAMETER Experiment Name: At_Drought_Reproduction_P Parameter: Organism Value: A. thaliana
  misc_feature: MA Experiment 20001911 PARAMETER Experiment Name: At_Drought_Reproduction_P Parameter: Plant Line Value: WS
  misc_feature: MA Experiment 20001911 PARAMETER Experiment Name: At_Drought_Reproduction_P Parameter: Timepoint (day) Value: 10
  misc_feature: MA Experiment 20001911 PARAMETER Experiment Name: At_Drought_Reproduction_P Parameter: Tissue Value: Flowers
  misc_feature: MA Experiment 20001911 PARAMETER Experiment Name: At_Drought_Reproduction_P Parameter: Treatment Value: Drought vs. No Drought
tctctcaagctcaagagttctgaatctcccttcaacaatggcggaacaatctcaactcaagaatctcaccatcatcctcctcctcctctgcttatccttccaatcactatccttcgccgccgaatctcacctaaccgtcgatttctactccaaatcatgccctaaattcctcgacattatccgcgaaaccatcaccaacaaacagatctcaactccaacaaccgccgccgcagctctccgcctcttcttccacgactgtttccccaacggctgcgacgcctccgtcctcgtttcttccaccgctttcaacaccgccgaacgcgattcatcaatcaatctctctctccccggagacggattcgacgtagtaatccgagctaaaacagctctcgaactcgcttgtcccaacacagtctcttgctccgatatcatcgccgtcgcggtacgtgatctcctcgtaaccgtcggtggaccttactacgaaatctccctcggccgtcgcgattcacgaacttcgaaatcatctctcgtctccgatctcctcccgctcccgtcgatgcagatatcgaagctcatcgatcaattcagctccagaggcttctccgttcaagaaatggttgctttgagtggtgctcacaccatcggattctcacattgcaaggagttcacgaaccgggtcaacccgaataatagtaccgggtataacccgagattcgcggtagctttaaagaaagcttgttcgaattccaaaaatgaccctacgatatctgtcttcaacgacgttatgactccgaacaaattcgataatatgtatttccagaatattccgaaaggtctcgggttacttgaatcggatcacggtttattctccgacccgagaacccgtccgttcgttgagttatacgcgagagaccaatctcggttctttaacgactttgccggagctatgcagaagttgagtcttcacggtgttttgaccggacggcgaggagagatccgacgaaggtgtgatgcgatcaactaaaacgtcttagagattcttcttaattgttattacgatttgtgagatttcgtttttgtttatttttttaattgttgattagttagtttagagcaaatgtttgagatttcggcgagattgaattgttgatctaaggctcatgtgtgattatttatatatgattataattagtcg

SEQ ID NO: 45081 - protein, 340 aa, Arabidopsis thaliana
  peptide (1)..(340): Ceres Seq. ID no. 13575812
  misc_feature (60)..(304): Pfam Name: Peroxidase Pfam Description: Peroxidase
  misc_feature (17)..(340): Homolog of NCBI NO: 7433082 NR Description: probable peroxidase (EC 1.11.1.7) (clone PC55) -
  misc_feature (29)..(340): Homolog of NCBI NO: 15221670 NR Description: peroxidase, putative [Arabidopsis thaliana]
  misc_feature (26)..(340): Homolog of NCBI NO: 21593687 NR Description: peroxidase [Arabidopsis thaliana]
  misc_feature (26)..(340): Homolog of NCBI NO: 18422742 NR Description: peroxidase, putative [Arabidopsis thaliana]
  misc_feature (26)..(340): Homolog of NCBI NO: 9759442 NR Description: peroxidase [Arabidopsis thaliana]
  misc_feature (25)..(340): Homolog of NCBI NO: 15236620 NR Description: peroxidase, putative [Arabidopsis thaliana]
  misc_feature (26)..(340): Homolog of NCBI NO: 14334600 NR Description: putative peroxidase [Arabidopsis thaliana]
  misc_feature (26)..(340): Homolog of NCBI NO: 15232929 NR Description: peroxidase, putative [Arabidopsis thaliana]
  misc_feature (65)..(340): Homolog of NCBI NO: 1890317 NR Description: peroxidase ATP26a [Arabidopsis thaliana]
  misc_feature (13)..(340): Homolog of NCBI NO: 15242580 NR Description: peroxidase, putative [Arabidopsis thaliana]
LSSSRVLNLPSTMAEQSQLKNLTIILLLLCLSFQSLSFAAESHLTVDFYSKSCPKFLDIIRETITNKQISTPTTAAAALRLFFHDCFPNGCDASVLVSSTAFNTAERDSSINLSLPGDGFDVVIRAKTALELACPNTVSCSDIIAVAVRDLLVTVGGPYYEISLGRRDSRTSKSSLVSDLLPLPSMQISKLIDQFSSRGFSVQEMVALSGAHTIGFSHCKEFTNRVNPNNSTGYNPRFAVALKKACSNSKNDPTISVFNDVMTPNKFDNMYFQNIPKGLGLLESDHGLFSDPRTRPFVELYARDQSRFFNDFAGAMQKLSLHGVLTGRRGEIRRRCDAIN

SEQ ID NO: 45082 - protein, 328 aa, Arabidopsis thaliana
  peptide (1)..(328): Ceres Seq. ID no. 13575813
  misc_feature (48)..(292): Pfam Name: Peroxidase Pfam Description: Peroxidase
  misc_feature (5)..(328): Homolog of NCBI NO: 7433082 NR Description: probable peroxidase (EC 1.11.1.7) (clone PC55) -
  misc_feature (17)..(328): Homolog of NCBI NO: 15221670 NR Description: peroxidase, putative [Arabidopsis thaliana]
  misc_feature (14)..(328): Homolog of NCBI NO: 21593687 NR Description: peroxidase [Arabidopsis thaliana]
  misc_feature (14)..(328): Homolog of NCBI NO: 18422742 NR Description: peroxidase, putative [Arabidopsis thaliana]
  misc_feature (14)..(328): Homolog of NCBI NO: 9759442 NR Description: peroxidase [Arabidopsis thaliana]
  misc_feature (13)..(328): Homolog of NCBI NO: 15236620 NR Description: peroxidase, putative [Arabidopsis thaliana]
  misc_feature (14)..(328): Homolog of NCBI NO: 14334600 NR Description: putative peroxidase [Arabidopsis thaliana]
  misc_feature (14)..(328): Homolog of NCBI NO: 15232929 NR Description: peroxidase, putative [Arabidopsis thaliana]
  misc_feature (53)..(328): Homolog of NCBI NO: 1890317 NR Description: peroxidase ATP26a [Arabidopsis thaliana]
  misc_feature (1)..(328): Homolog of NCBI NO: 15242580 NR Description: peroxidase, putative [Arabidopsis thaliana]
MAEQSQLKNLTIILLLLCLSFQSLSFAAESHLTVDFYSKSCPKFLDIIRETITNKQISTPTTAAAALRLFFHDCFPNGCDASVLVSSTAFNTAERDSSINLSLPGDGFDVVIRAKTALELACPNTVSCSDIIAVAVRDLLVTVGGPYYEISLGRRDSRTSKSSLVSDLLPLPSMQISKLIDQFSSRGFSVQEMVALSGAHTIGFSHCKEFTNRVNPNNSTGYNPRFAVALKKACSNSKNDPTISVFNDVMTPNKFDNMYFQNIPKGLGLLESDHGLFSDPRTRPFVELYARDQSRFFNDFAGAMQKLSLHGVLTGRRGEIRRRCDAIN

SEQ ID NO: 45083 - DNA, 1730 bp, Arabidopsis thaliana
  misc_feature (1)..(1730): Ceres Seq. ID no. 13575843
  misc_feature: MA Experiment ID: 20000184 Result: Down-regulated in Transcription
  misc_feature: MA Experiment 20000184 PARAMETER Experiment Name: At_Shoots__P Parameter: Age (day) Value: 7
  misc_feature: MA Experiment 20000184 PARAMETER Experiment Name: At_Shoots__P Parameter: Tissue Value: Shoots vs. Whole Plant
  misc_feature: MA Experiment ID: 20000437 Result: Up-regulated in Transcription
  misc_feature: MA Experiment 20000437 PARAMETER Experiment Name: At_Drought_P Parameter: Age (day) Value: 8
  misc_feature: MA Experiment 20000437 PARAMETER Experiment Name: At_Drought_P Parameter: Organism Value: A. thaliana
  misc_feature: MA Experiment 20000437 PARAMETER Experiment Name: At_Drought_P Parameter: Plant Line Value: WS
  misc_feature: MA Experiment 20000437 PARAMETER Experiment Name: At_Drought_P Parameter: Timepoint (hr) Value: 24
  misc_feature: MA Experiment 20000437 PARAMETER Experiment Name: At_Drought_P Parameter: Tissue Value: Whole Plant
  misc_feature: MA Experiment 20000437 PARAMETER Experiment Name: At_Drought_P Parameter: Treatment Value: Drought vs. No Drought
  misc_feature: MA Experiment ID: 20000794 Result: Up-regulated in Transcription
  misc_feature: MA Experiment 20000794 PARAMETER Experiment Name: At_Petals_P Parameter: Age (day) Value: 23-25 days
  misc_feature: MA Experiment 20000794 PARAMETER Experiment Name: At_Petals_P Parameter: Plant Line Value: WS
  misc_feature: MA Experiment 20000794 PARAMETER Experiment Name: At_Petals_P Parameter: Tissue Value: Petals vs. Whole plant
  misc_feature: MA Experiment ID: 20001558 Result: Down-regulated in Transcription
  misc_feature: MA Experiment 20001558 PARAMETER Experiment Name: At_Drought_Soil_Dry_P Parameter: Age (day) Value: 27
  misc_feature: MA Experiment 20001558 PARAMETER Experiment Name: At_Drought_Soil_Dry_P Parameter: Organism Value: A. thaliana
  misc_feature: MA Experiment 20001558 PARAMETER Experiment Name: At_Drought_Soil_Dry_P Parameter: Plant Line Value: WS
  misc_feature: MA Experiment 20001558 PARAMETER Experiment Name: At_Drought_Soil_Dry_P Parameter: Post Timepoint (hr) Value: 6
  misc_feature: MA Experiment 20001558 PARAMETER Experiment Name: At_Drought_Soil_Dry_P Parameter: Post-Treatment Value: Re-Water vs. No Drought
  misc_feature: MA Experiment 20001558 PARAMETER Experiment Name: At_Drought_Soil_Dry_P Parameter: Timepoint (day) Value: 13
  misc_feature: MA Experiment 20001558 PARAMETER Experiment Name: At_Drought_Soil_Dry_P Parameter: Treatment Value: Drought vs. No Drought
  misc_feature: MA Experiment ID: 20001911 Result: Up-regulated in Transcription
  misc_feature: MA Experiment 20001911 PARAMETER Experiment Name: At_Drought_Reproduction_P Parameter: Age (day) Value: 40
  misc_feature: MA Experiment 20001911 PARAMETER Experiment Name: At_Drought_Reproduction_P Parameter: Organism Value: A. thaliana
  misc_feature: MA Experiment 20001911 PARAMETER Experiment Name: At_Drought_Reproduction_P Parameter: Plant Line Value: WS
  misc_feature: MA Experiment 20001911 PARAMETER Experiment Name: At_Drought_Reproduction_P Parameter: Timepoint (day) Value: 10
  misc_feature: MA Experiment 20001911 PARAMETER Experiment Name: At_Drought_Reproduction_P Parameter: Tissue Value: Flowers
  misc_feature: MA Experiment 20001911 PARAMETER Experiment Name: At_Drought_Reproduction_P Parameter: Treatment Value: Drought vs. No Drought
gaaaaaccataaaaataaaaataagtggagaaatcaaaatcatcgattctcctttgtttcgcctaacccaattcctaaatctcagcatctttcatcaatccaatctctcaaataagcgagagagaaacaaagattatcgaatccttggagacgaaaacatactccaatttgttttaggacatttgggttaccctgaggcttaaggagaatagtggtttagttatttatactgaattttgtgtcattcagactttccgaggattttctgtttggtaccgtttgcctcgtctgtgttttcatttgagctgcatcttaaagtgaaagttcagtgcttaaacagtaataaagtagtatttcaacaggctgctaataagattgctccctttcgcttacacagtgcttaacaagatggctggtgtaaagcgaaaattaagtaccgagtcagatgttcatgctcttcacaaagaactggatgaggtttcatgtcctgtttgcatggatcacccacataatgctgttctactgctgtgcagctctcatgacaaaggttgcaggtcctacatctgtgataccagttaccgacattccaattgccttgaccggtttaagaaattgcattctgaatccgcaaatgaccctactcccgaggcgaacttggcttcaagggaacataataacgaatctctatacgagcatggtacagccagtcgaagcagttttcaccgtgagtctggaaaccgaggctcttcttgggattccgaatcactgaggaggaggaggagagttgaggaagaagttgagtcagaagatatcacaaatttgaaatgtcctctatgccggggtactgttttaggatggaaggttgtagaagaagtaagaacgtatcttgatcataagaaccgaagttgctcccgagaatcctgctcatttactggcaactaccaggatctgcgccgccatgccaggaggactcacccaacaactcgtccttcagacactgatccatcaagagagagagcttggaggcggcttgagaaccagagggagtatggagatatagtcagtgcaatccgttctgccatgcccggtgctgttgtagtaggagattatgttatagaaaacggagataggtttgcaggtgagagggaaacgggaaatggtgggagcgacctttggaccactttactattgtttcagatgattggctctcttgacaatggaggttctagcgctagtgggagtggtggtggatcaagatcccacaggtcaagggcatggaggaatcatcggcgttcatcttcagataggccgtacctttggggggagaatctattgggtctacaagatgagcgcaataacaacgatgatgaagagtttcgtttgcagaatgatgcaggcggtgcttctactcctgttccaagaagaagaaggagatttggacgtcctagatcaagcggaaatcatccgcgataagctgaagcgtcccggtgatatcgatatctctcgggtcagaaccaggccgatgcaaagggaaaggttttactaaaaacccgagaggcttaggattgtttggttttatgtaaatgtcattttgagccttggctcattgtatactactaagtatggcttcttatgcaatgtcttttgttacttaactcgtggattattttcttttgcgttgtgatgaagtttgttatttaggaaatcgaccacgtataaatattttatct

SEQ ID NO: 45084 - protein, 354 aa, Arabidopsis thaliana
  peptide (1)..(354): Ceres Seq. ID no. 13575844
  misc_feature (1)..(68): Homolog of NCBI NO: 15221290 NR Description: expressed protein [Arabidopsis thaliana]
  misc_feature (128)..(254): Homolog of NCBI NO: 15221290 NR Description: expressed protein [Arabidopsis thaliana]
  misc_feature (22)..(80): Homolog of NCBI NO: 7486671 NR Description: hypothetical protein F8F16.230 - Arabidopsis
  misc_feature (140)..(334): Homolog of NCBI NO: 7486671 NR Description: hypothetical protein F8F16.230 - Arabidopsis
  misc_feature (22)..(80): Homolog of NCBI NO: 18417801 NR Description: expressed protein [Arabidopsis thaliana]
  misc_feature (140)..(342): Homolog of NCBI NO: 18417801 NR Description: expressed protein [Arabidopsis thaliana]
  misc_feature (19)..(134): Homolog of NCBI NO: 18404727 NR Description: expressed protein [Arabidopsis thaliana]
  misc_feature (127)..(322): Homolog of NCBI NO: 18404727 NR Description: expressed protein [Arabidopsis thaliana]
  misc_feature (54)..(348): Homolog of NCBI NO: 38346521 NR Description: OSJNBa0027H09.16 [Oryza sativa (japonica
  misc_feature (1)..(354): Homolog of NCBI NO: 15230170 NR Description: expressed protein [Arabidopsis thaliana]
MAGVKRKLSTESDVHALHKELDEVSCPVCMDHPHNAVLLLCSSHDKGCRSYICDTSYRHSNCLDRFKKLHSESANDPTPEANLASREHNNESLYEHGTASRSSFHRESGNRGSSWDSESLRRRRRVEEEVESEDITNLKCPLCRGTVLGWKVVEEVRTYLDHKNRSCSRESCSFTGNYQDLRRHARRTHPTTRPSDTDPSRERAWRRLENQREYGDIVSAIRSAMPGAVVVGDYVIENGDRFAGERETGNGGSDLWTTLLLFQMIGSLDNGGSSASGSGGGSRSHRSRAWRNHRRSSSDRPYLWGENLLGLQDERNNNDDEEFRLQNDAGGASTPVPRRRRRFGRPRSSGNHPR

SEQ ID NO: 45085 - protein, 325 aa, Arabidopsis thaliana
  peptide (1)..(325): Ceres Seq. ID no. 13575845
  misc_feature (1)..(39): Homolog of NCBI NO: 15221290 NR Description: expressed protein [Arabidopsis thaliana]
  misc_feature (99)..(225): Homolog of NCBI NO: 15221290 NR Description: expressed protein [Arabidopsis thaliana]
  misc_feature (1)..(51): Homolog of NCBI NO: 7486671 NR Description: hypothetical protein F8F16.230 - Arabidopsis
  misc_feature (111)..(305): Homolog of NCBI NO: 7486671 NR Description: hypothetical protein F8F16.230 - Arabidopsis
  misc_feature (1)..(51): Homolog of NCBI NO: 18417801 NR Description: expressed protein [Arabidopsis thaliana]
  misc_feature (111)..(313): Homolog of NCBI NO: 18417801 NR Description: expressed protein [Arabidopsis thaliana]
  misc_feature (1)..(105): Homolog of NCBI NO: 18404727 NR Description: expressed protein [Arabidopsis thaliana]
  misc_feature (98)..(293): Homolog of NCBI NO: 18404727 NR Description: expressed protein [Arabidopsis thaliana]
  misc_feature (25)..(319): Homolog of NCBI NO: 38346521 NR Description: OSJNBa0027H09.16 [Oryza sativa (japonica
  misc_feature (1)..(325): Homolog of NCBI NO: 15230170 NR Description: expressed protein [Arabidopsis thaliana]
MDHPHNAVLLLCSSHDKGCRSYICDTSYRHSNCLDRFKKLHSESANDPTPEANLASREHNNESLYEHGTASRSSFHRESGNRGSSWDSESLRRRRRVEEEVESEDITNLKCPLCRGTVLGWKVVEEVRTYLDHKNRSCSRESCSFTGNYQDLRRHARRTHPTTRPSDTDPSRERAWRRLENQREYGDIVSAIRSAMPGAVVVGDYVIENGDRFAGERETGNGGSDLWTTLLLFQMIGSLDNGGSSASGSGGGSRSHRSRAWRNHRRSSSDRPYLWGENLLGLQDERNNNDDEEFRLQNDAGGASTPVPRRRRRFGRPRSSGNHPR

SEQ ID NO: 45086 - DNA, 1954 bp, Arabidopsis thaliana
  misc_feature (1)..(1954): Ceres Seq. ID no. 12560262
  misc_feature: MA Experiment ID: 20000166 Result: Up-regulated in Transcription
  misc_feature: MA Experiment 20000166 PARAMETER Experiment Name: At_100uM_ABA_P Parameter: Age (day) Value: 14
  misc_feature: MA Experiment 20000166 PARAMETER Experiment Name: At_100uM_ABA_P Parameter: Organism Value: A. thaliana
  misc_feature: MA Experiment 20000166 PARAMETER Experiment Name: At_100uM_ABA_P Parameter: Plant Line Value: WS
  misc_feature: MA Experiment 20000166 PARAMETER Experiment Name: At_100uM_ABA_P Parameter: Timepoint (hr) Value: 1
  misc_feature: MA Experiment 20000166 PARAMETER Experiment Name: At_100uM_ABA_P Parameter: Tissue Value: Aerial
  misc_feature: MA Experiment 20000166 PARAMETER Experiment Name: At_100uM_ABA_P Parameter: Treatment Value: 100uM ABA vs. No Treatment
  misc_feature: MA Experiment ID: 20000169 Result: Up-regulated in Transcription
  misc_feature: MA Experiment 20000169 PARAMETER Experiment Name: At_100uM_ABA_P Parameter: Age (day) Value: 14
  misc_feature: MA Experiment 20000169 PARAMETER Experiment Name: At_100uM_ABA_P Parameter: Organism Value: A. thaliana
  misc_feature: MA Experiment 20000169 PARAMETER Experiment Name: At_100uM_ABA_P Parameter: Plant Line Value: WS
  misc_feature: MA Experiment 20000169 PARAMETER Experiment Name: At_100uM_ABA_P Parameter: Timepoint (hr) Value: 6
  misc_feature: MA Experiment 20000169 PARAMETER Experiment Name: At_100uM_ABA_P Parameter: Tissue Value: Aerial
  misc_feature: MA Experiment 20000169 PARAMETER Experiment Name: At_100uM_ABA_P Parameter: Treatment Value: 100uM ABA vs. No Treatment
  misc_feature: MA Experiment ID: 20000182 Result: Up-regulated in Transcription
  misc_feature: MA Experiment 20000182 PARAMETER Experiment Name: At_2mM_SA_P Parameter: Age (day) Value: 14
  misc_feature: MA Experiment 20000182 PARAMETER Experiment Name: At_2mM_SA_P Parameter: Organism Value: A. thaliana
  misc_feature: MA Experiment 20000182 PARAMETER Experiment Name: At_2mM_SA_P Parameter: Plant Line Value: WS
  misc_feature: MA Experiment 20000182 PARAMETER Experiment Name: At_2mM_SA_P Parameter: Timepoint (hr) Value: 6
  misc_feature: MA Experiment 20000182 PARAMETER Experiment Name: At_2mM_SA_P Parameter: Tissue Value: Aerial
  misc_feature: MA Experiment 20000182 PARAMETER Experiment Name: At_2mM_SA_P Parameter: Treatment Value: 2mM SA vs. No Treatment
  misc_feature: MA Experiment ID: 20000267 Result: Up-regulated in Transcription
  misc_feature: MA Experiment 20000267 PARAMETER Experiment Name: At_Drought_P Parameter: Age (day) Value: 7
  misc_feature: MA Experiment 20000267 PARAMETER Experiment Name: At_Drought_P Parameter: Organism Value: A. thaliana
  misc_feature: MA Experiment 20000267 PARAMETER Experiment Name: At_Drought_P Parameter: Plant Line Value: WS
  misc_feature: MA Experiment 20000267 PARAMETER Experiment Name: At_Drought_P Parameter: Timepoint (hr) Value: 6
  misc_feature: MA Experiment 20000267 PARAMETER Experiment Name: At_Drought_P Parameter: Tissue Value: Whole Plant
  misc_feature: MA Experiment 20000267 PARAMETER Experiment Name: At_Drought_P Parameter: Treatment Value: Drought vs. No Drought
  misc_feature: MA Experiment ID: 20000436 Result: Up-regulated in Transcription
  misc_feature: MA Experiment 20000436 PARAMETER Experiment Name: At_Drought_P Parameter: Age (day) Value: 7
  misc_feature: MA Experiment 20000436 PARAMETER Experiment Name: At_Drought_P Parameter: Organism Value: A. thaliana
  misc_feature: MA Experiment 20000436 PARAMETER Experiment Name: At_Drought_P Parameter: Plant Line Value: WS
  misc_feature: MA Experiment 20000436 PARAMETER Experiment Name: At_Drought_P Parameter: Timepoint (hr) Value: 12
  misc_feature: MA Experiment 20000436 PARAMETER Experiment Name: At_Drought_P Parameter: Tissue Value: Whole Plant
  misc_feature: MA Experiment 20000436 PARAMETER Experiment Name: At_Drought_P Parameter: Treatment Value: Drought vs. No Drought
  misc_feature: MA Experiment ID: 20000794 Result: Up-regulated in Transcription
  misc_feature: MA Experiment 20000794 PARAMETER Experiment Name: At_Petals_P Parameter: Age (day) Value: 23-25 days
  misc_feature: MA Experiment 20000794 PARAMETER Experiment Name: At_Petals_P Parameter: Plant Line Value: WS
  misc_feature: MA Experiment 20000794 PARAMETER Experiment Name: At_Petals_P Parameter: Tissue Value: Petals vs. Whole plant
  misc_feature: MA Experiment ID: 20001554 Result: Up-regulated in Transcription
  misc_feature: MA Experiment 20001554 PARAMETER Experiment Name: At_Drought_Soil_Dry_P Parameter: Age (day) Value: 21
  misc_feature: MA Experiment 20001554 PARAMETER Experiment Name: At_Drought_Soil_Dry_P Parameter: Organism Value: A. thaliana
  misc_feature: MA Experiment 20001554 PARAMETER Experiment Name: At_Drought_Soil_Dry_P Parameter: Plant Line Value: WS
  misc_feature: MA Experiment 20001554 PARAMETER Experiment Name: At_Drought_Soil_Dry_P Parameter: Post Timepoint (hr) Value: None
  misc_feature: MA Experiment 20001554 PARAMETER Experiment Name: At_Drought_Soil_Dry_P Parameter: Post-Treatment Value: None
  misc_feature: MA Experiment 20001554 PARAMETER Experiment Name: At_Drought_Soil_Dry_P Parameter: Timepoint (day) Value: 7
  misc_feature: MA Experiment 20001554 PARAMETER Experiment Name: At_Drought_Soil_Dry_P Parameter: Treatment Value: Drought vs. No Drought
  misc_feature: MA Experiment ID: 20001555 Result: Up-regulated in Transcription
  misc_feature: MA Experiment 20001555 PARAMETER Experiment Name: At_Drought_Soil_Dry_P Parameter: Age (day) Value: 24
  misc_feature: MA Experiment 20001555 PARAMETER Experiment Name: At_Drought_Soil_Dry_P Parameter: Organism Value: A. thaliana
  misc_feature: MA Experiment 20001555 PARAMETER Experiment Name: At_Drought_Soil_Dry_P Parameter: Plant Line Value: WS
  misc_feature: MA Experiment 20001555 PARAMETER Experiment Name: At_Drought_Soil_Dry_P Parameter: Post Timepoint (hr) Value: None
  misc_feature: MA Experiment 20001555 PARAMETER Experiment Name: At_Drought_Soil_Dry_P Parameter: Post-Treatment Value: None
  misc_feature: MA Experiment 20001555 PARAMETER Experiment Name: At_Drought_Soil_Dry_P Parameter: Timepoint (day) Value: 10
  misc_feature: MA Experiment 20001555 PARAMETER Experiment Name: At_Drought_Soil_Dry_P Parameter: Treatment Value: Drought vs. No Drought
  misc_feature: MA Experiment ID: 20001559 Result: Up-regulated in Transcription
  misc_feature: MA Experiment 20001559 PARAMETER Experiment Name: At_Drought_Soil_Dry_P Parameter: Age (day) Value: 28
  misc_feature: MA Experiment 20001559 PARAMETER Experiment Name: At_Drought_Soil_Dry_P Parameter: Organism Value: A. thaliana
  misc_feature: MA Experiment 20001559 PARAMETER Experiment Name: At_Drought_Soil_Dry_P Parameter: Plant Line Value: WS
  misc_feature: MA Experiment 20001559 PARAMETER Experiment Name: At_Drought_Soil_Dry_P Parameter: Post Timepoint (hr) Value: 29
  misc_feature: MA Experiment 20001559 PARAMETER Experiment Name: At_Drought_Soil_Dry_P Parameter: Post-Treatment Value: Re-Water vs. No Drought
  misc_feature: MA Experiment 20001559 PARAMETER Experiment Name: At_Drought_Soil_Dry_P Parameter: Timepoint (day) Value: 14
  misc_feature: MA Experiment 20001559 PARAMETER Experiment Name: At_Drought_Soil_Dry_P Parameter: Treatment Value: Drought vs. No Drought
  misc_feature: MA Experiment ID: 20001560 Result: Down-regulated in Transcription
  misc_feature: MA Experiment 20001560 PARAMETER Experiment Name: At_Drought_Soil_Dry_P Parameter: Age (day) Value: 28
  misc_feature: MA Experiment 20001560 PARAMETER Experiment Name: At_Drought_Soil_Dry_P Parameter: Organism Value: A. thaliana
  misc_feature: MA Experiment 20001560 PARAMETER Experiment Name: At_Drought_Soil_Dry_P Parameter: Plant Line Value: WS
  misc_feature: MA Experiment 20001560 PARAMETER Experiment Name: At_Drought_Soil_Dry_P Parameter: Post Timepoint (hr) Value: None
  misc_feature: MA Experiment 20001560 PARAMETER Experiment Name: At_Drought_Soil_Dry_P Parameter: Post-Treatment Value: None
  misc_feature: MA Experiment 20001560 PARAMETER Experiment Name: At_Drought_Soil_Dry_P Parameter: Timepoint (day) Value: 14
  misc_feature: MA Experiment 20001560 PARAMETER Experiment Name: At_Drought_Soil_Dry_P Parameter: Treatment Value: Drought vs. No Drought
atccgacggcaaaaggagaattaagatttttaactttaaacgagagtttcgtttatttactcaaaaatttacttctgaaatctctatttgaatttcggggaaaaaaatcctaagtaagggaatgcagagagatggtcggagtatcgccggtgaagactaagctgtgtgatcggtttaaccgatccgtcggcggcaggaattgccaccggaaacacgtcgaggacgggtgatccagttttctaaactctcgtctctcgaattcttcgaagatatcgaaaaactgtaaatcttttttttcttctacttttttacaaaattctctaatcatcgttgtaaagtaaaaaaccatggtcggagcaaaaccggtggagaatggatctgacggtggtagtagtacggggctgcttcacggccgttacgagctagggcgtcttctaggtcacggaacattcgcgaaggtgtaccacgctcgtaacatacaaaccggaaaaagcgtggcgatgaaagtcgtcggaaaagagaaagtggtgaaagttggtatggttgatcagatcaaacgagagatctctgtgatgaggatggtgaaacatccaaacatcgtcgagcttcacgaagtcatggcgagtaaatccaagatctatttcgccatggagcttgtacgaggcggtgagttattcgctaaggtggctaaaggaagactacgtgaagacgtagctcgtgtttatttccagcaattgatctcagccgttgatttctgtcatagccgtggtgtttatcaccgagatctgaaaccggagaatctcttgttagatgaagaaggtaatctcaaggtgactgattttggtctctctgctttcactgagcatttgaaacaagacggacttcttcatacaacttgtggaactccggcttatgttgcgccggaggttatattgaagaaaggatacgacggagctaaggcggatctgtggtcttgtggtgttatactttttgtgcttcttgctggttatttgccgtttcaagatgataatcttgtgaatatgtataggaagatttacagaggagatttcaaatgtcctggttggctttcttctgatgctagacggcttgtgactaagcttcttgatccgaatccgaatacgaggattactattgagaaggttatggattcgccttggttcaagaaacaagcaacgagatcaagaaacgaaccagtggctgccacaatcacaaccacggaagaggatgttgatttcttggtgcacaagtcgaaggaagagacggagacgttaaacgcgtttcatataatcgcgttatcggaagggtttgatttgtcgccgttgtttgaggagaagaagaaagaggagaaaagagagatgagattcgcgacgtctcggccagcgagtagcgtgatttcgagtttggaagaagcggcgagagttgggaataagtttgatgtgaggaagagtgagagtagagtaaggattgaaggtaaacagaatggtcggaaagggaaattggcggtggaagcggagatattcgcggtggctccgtcgtttgttgtcgtggaagtgaagaaagatcatggagatacgcttgagtacaacaacttctgcagtactgctcttagaccagctctcaaggacattttctggacctctacacctgcttgaatttgatgaattcttgcgtgtttcaaatttttatgttgtaatatatattgttggattctagattcgattcgtgattcttgtttttgattcttaatgtggtatcatagtttggatcgttcaaaaagttgtaagtcttttgtgtgtgtttgagtcgtggccgatatgttgcgtcacgaagcagagaatgttgtgtgtggtgtagaatggtgtgttaaagattccatcatcaacaaataataatcatgactcttttaagaatgttaaagagtcaatttttatgc

SEQ ID NO: 45087 - protein, 441 aa, Arabidopsis thaliana [sequence omitted]

SEQ ID NO: 45088 - protein, 390 aa, Arabidopsis thaliana
  peptide (1)..(390): Ceres Seq. ID no. 12560264
  misc_feature (1)..(227): Pfam Name: Protein kinase domain Pfam Description: Protein kinase domain
  misc_feature (1)..(390): Homolog of NCBI NO: 17224924 NR Description: CBL-interacting protein kinase [Brassica napus]
  misc_feature (1)..(390): Homolog of NCBI NO: 15235768 NR Description: (NM_119244) putative protein kinase
MKVVGKEKVVKVGMVDQIKREISVMRMVKHPNIVELHEVMASKSKIYFAMELVRGGELFAKVAKGRLREDVARVYFQQLISAVDFCHSRGVYHRDLKPENLLLDEEGNLKVTDFGLSAFTEHLKQDGLLHTTCGTPAYVAPEVILKKGYDGAKADLWSCGVILFVLLAGYLPFQDDNLVNMYRKIYRGDFKCPGWLSSDARRLVTKLLDPNPNTRITIEKVMDSPWFKKQATRSRNEPVAATITTTEEDVDFLVHKSKEETETLNAFHIIALSEGFDLSPLFEEKKKEEKREMRFATSRPASSVISSLEEAARVGNKFDVRKSESRVRIEGKQNGRKGKLAVEAEIFAVAPSFVVVEVKKDHGDTLEYNNFCSTALRPALKDIFWTSTPA

SEQ ID NO: 45089 - protein, 377 aa, Arabidopsis thaliana
  peptide (1)..(377): Ceres Seq. ID no. 12560265
  misc_feature (1)..(214): Pfam Name: Protein kinase domain Pfam Description: Protein kinase domain
  misc_feature (1)..(377): Homolog of NCBI NO: 17224924 NR Description: CBL-interacting protein kinase [Brassica napus]
  misc_feature (1)..(377): Homolog of NCBI NO: 15235768 NR Description: (NM_119244) putative protein kinase
MVDQIKREISVMRMVKHPNIVELHEVMASKSKIYFAMELVRGGELFAKVAKGRLREDVARVYFQQLISAVDFCHSRGVYHRDLKPENLLLDEEGNLKVTDFGLSAFTEHLKQDGLLHTTCGTPAYVAPEVILKKGYDGAKADLWSCGVILFVLLAGYLPFQDDNLVNMYRKIYRGDFKCPGWLSSDARRLVTKLLDPNPNTRITIEKVMDSPWFKKQATRSRNEPVAATITTTEEDVDFLVHKSKEETETLNAFHIIALSEGFDLSPLFEEKKKEEKREMRFATSRPASSVISSLEEAARVGNKFDVRKSESRVRIEGKQNGRKGKLAVEAEIFAVAPSFVVVEVKKDHGDTLEYNNFCSTALRPALKDIFWTSTPA

SEQ ID NO: 45090 - DNA, 2474 bp, Arabidopsis thaliana
  misc_feature (1)..(2474): Ceres Seq. ID no. 12560266
  misc_feature: MA Experiment ID: 20000315 Result: Down-regulated in Transcription
  misc_feature: MA Experiment 20000315 PARAMETER Experiment Name: At_14day_Shoots-Roots_Sub_P Parameter: Age (day) Value: 14
  misc_feature: MA Experiment 20000315 PARAMETER Experiment Name: At_14day_Shoots-Roots_Sub_P Parameter: Organism Value: A. thaliana
  misc_feature: MA Experiment 20000315 PARAMETER Experiment Name: At_14day_Shoots-Roots_Sub_P Parameter: Plant Line Value: WS
  misc_feature: MA Experiment 20000315 PARAMETER Experiment Name: At_14day_Shoots-Roots_Sub_P Parameter: Tissue Value: Shoots vs. Whole Plant
  misc_feature: MA Experiment ID: 20000328 Result: Down-regulated in Transcription
  misc_feature: MA Experiment 20000328 PARAMETER Experiment Name: At_42deg_Heat_Sub_P Parameter: Age (day) Value: 14
  misc_feature: MA Experiment 20000328 PARAMETER Experiment Name: At_42deg_Heat_Sub_P Parameter: Organism Value: A. thaliana
  misc_feature: MA Experiment 20000328 PARAMETER Experiment Name: At_42deg_Heat_Sub_P Parameter: Plant Line Value: WS
  misc_feature: MA Experiment 20000328 PARAMETER Experiment Name: At_42deg_Heat_Sub_P Parameter: Temperature (deg C) Value: 42 vs. 22
  misc_feature: MA Experiment 20000328 PARAMETER Experiment Name: At_42deg_Heat_Sub_P Parameter: Timepoint (hr) Value: 6
  misc_feature: MA Experiment 20000328 PARAMETER Experiment Name: At_42deg_Heat_Sub_P Parameter: Tissue Value: Aerial
  misc_feature: MA Experiment ID: 20000355 Result: Up-regulated in Transcription
  misc_feature: MA Experiment 20000355 PARAMETER Experiment Name: At_Siliques_Sub_P Parameter: Age (day) Value: 21
  misc_feature: MA Experiment 20000355 PARAMETER Experiment Name: At_Siliques_Sub_P Parameter: Organism Value: A. thaliana
  misc_feature: MA Experiment 20000355 PARAMETER Experiment Name: At_Siliques_Sub_P Parameter: Plant Line Value: WS
  misc_feature: MA Experiment 20000355 PARAMETER Experiment Name: At_Siliques_Sub_P Parameter: Tissue Value: Less Than 5mm Siliques vs. Whole Plant
  misc_feature: MA Experiment ID: 20000440 Result: Up-regulated in Transcription
  misc_feature: MA Experiment 20000440 PARAMETER Experiment Name: At_Closed-Flower__Sub_P Parameter: Tissue Value: Closed Flower vs. Whole Plant
gatcatattcatcaccaaccgaaaacgcctctggatctcgccagatccaattcggaccaaatcagaacccaaaattcgactcacttgtctcactcgactcgaatctccattctttgtctgaaagtttcttcctttttgtttaaccaatggcgacctttatcaatctggaggattccccaatgtttcagaaacaggtttgttccttggaggggacagctgacgagcttaaagatcgttgtcagaagctatacaaaggtgttaagaagtttatggggactttgggagaggcatctaaaggagaaagtgcttttgcagcttgtctggaagaatttgggggtggacctgatgatcctatcagtctttcaattggagggcccgttatatccaaattcataaatgcacttcgagagcttgcctcttataaggagtttctttgctcacaggtggagcatgtgctacttgagaggttgatgaactttattagtgttgatctacaagaagctaaggagtctcgccatcgatttgataaagctgctcattcgtatgatcagtcgcgcgaaaagtttgtgtctttaaagaagaatacaagaggagaaattgtggcagagttggaagaggatctggagaattcaaagtcaacatttgagaagagccgtttcaatctagtgaattcactgatgactattgaagcgaaaaagaagtatgagtttttagaatctattagcgcaattatggatgcccatctgagatatttcaaacttggatatgacttgttgaatcaactggaaccatttatccatcagatattaacatatgctcagcaatcaaaagaacagtctaagattgaacaagatcgactagcaagacgcattcaagaattcaggacccagtctgaattagacagccaacagctggtcgctaatgcagagtcgtctggtgctaacgggaaccgtgttggtgggaatatcccttacaaaaataccgaaacaagtttaacagcagacaaggaagtaattaaacaggggtatctattaaagcgttcgtcaagtttgagaactgattggaaaagaaagttttttgtccttgatagtcatggctccatgtactattacagaactaatggtaataaatcaatgggatctcatcatcactatagtggatcatctgaccataatactggagtttttggtcgatttcgggcaagacataatcgatcaggttcgctcactgagggcagcttaggctataatactattgatcttcgcacttctttgataaaactagacgcagaagacatggatcttcgtctctgtttcagaattatttctcctcaaaaaacttacacacttcaggctgaaaatggagcagataggatggactgggtaaataagatcacaaaagctatagggacgcttctcaattctcattttctgcaacagtcacctgtgcgatacttggataaagacaactccagttctgctcctgctaatgctgtcgtctccggggatcaaattcgacataatgattcaagacaaaatatcggggatgatgtctcaacaatactcagaggacttccgggaaataatgcatgtgcagagtgcaatgctcctgagcccgattgggcatcgttaaatcttggagttttgttgtgcattcaatgctctggtgttcacaggaatctcggggttcatatatccaaggtgaggtccctctcattagatgtgaaagtgtgggagccaacgatcttggacttatttagaaatttgggtaatgtatactgtaattcactgtgggagggactacttcaccttgacgatgactgcgaagacggatcagcattgtcgcatgcttcagtttcaaaaccatgtccagaagattcctttagtgtgaaggagaaatacattctaggaaagtacctggagaaagcattagtcatcaaggatgaaagtgaagcaaacctttctgctgcgagtagaatatgggaagctgttcaaagcagaaacatacgagaaatctatcgacttatagttactactggggatgtaaatatcatcaataccaagtttgatgatataactgatatcgatgcatatcaccatattgatgcagcagagaaagcagtaaagaaaagacatgatccaactgtatgtcagagaattaaagaatccaacgaaccaagaagctgtcttcaaggatgctccttgctccatgtggcttgtcacattggtgactctgtcttgcttgaattgttgttgcagtttggtgctgacctaaacataagagattatcacggaaggactccgttgcaccattgcatatcatcagggaaccacaaatttgcaaagattctactgcgaagaggagcacgtccgtcgatagaggacgatggagggctaagcgttctagaaagagcgatggaaatgggagcgataactgatgaagagctctttcttctcttagccgagtgcgcataa

SEQ ID NO: 45091 - protein, 775 aa, Arabidopsis thaliana
  peptide (1)..(775): Ceres Seq. ID no. 12560267
  misc_feature (467)..(603): Pfam Name: Putative GTPase activating protein for Arf Pfam Description: Putative GTPase activating protein for Arf
  misc_feature (466)..(773): Homolog of NCBI NO: 11358303 NR Description: hypothetical protein T31B5.120 - Arabidopsis
  misc_feature (20)..(346): Homolog of NCBI NO: 11358303 NR Description: hypothetical protein T31B5.120 - Arabidopsis
  misc_feature (570)..(773): Homolog of NCBI NO: 15240398 NR Description: GCN4-complementing protein - like; protein id:
  misc_feature (466)..(773): Homolog of NCBI NO: 30684352 NR Description: ARF GTPase-activating domain-containing protein
  misc_feature (4)..(346): Homolog of NCBI NO: 30684352 NR Description: ARF GTPase-activating domain-containing protein
  misc_feature (4)..(204): Homolog of NCBI NO: 15240398 NR Description: GCN4-complementing protein - like; protein id:
  misc_feature (440)..(636): Homolog of NCBI NO: 15240398 NR Description: GCN4-complementing protein - like; protein id:
  misc_feature (159)..(480): Homolog of NCBI NO: 15240398 NR Description: GCN4-complementing protein - like; protein id:
  misc_feature (206)..(288): Homolog of NCBI NO: 25402625 NR Description: hypothetical protein [imported] - Arabidopsis
  misc_feature (331)..(775): Homolog of NCBI NO: 25402625 NR Description: hypothetical protein [imported] - Arabidopsis
MATFINLEDSPMFQKQVCSLEGTADELKDRCQKLYKGVKKFMGTLGEASKGESAFAACLEEFGGGPDDPISLSIGGPVISKFINALRELASYKEFLCSQVEHVLLERLMNFISVDLQEAKESRHRFDKAAHSYDQSREKFVSLKKNTRGEIVAELEEDLENSKSTFEKSRFNLVNSLMTIEAKKKYEFLESISAIMDAHLRYFKLGYDLLNQLEPFIHQILTYAQQSKEQSKIEQDRLARRIQEFRTQSELDSQQLVANAESSGANGNRVGGNIPYKNTETSLTADKEVIKQGYLLKRSSSLRTDWKRKFFVLDSHGSMYYYRTNGNKSMGSHHHYSGSSDHNTGVFGRFRARHNRSGSLTEGSLGYNTIDLRTSLIKLDAEDMDLRLCFRIISPQKTYTLQAENGADRMDWVNKITKAIGTLLNSHFLQQSPVRYLDKDNSSSAPANAVVSGDQIRHNDSRQNIGDDVSTILRGLPGNNACAECNAPEPDWASLNLGVLLCIQCSGVHRNLGVHISKVRSLSLDVKVWEPTILDLFRNLGNVYCNSLWEGLLHLDDDCEDGSALSHASVSKPCPEDSFSVKEKYILGKYLEKALVIKDESEANLSAASRIWEAVQSRNIREIYRLIVTTGDVNIINTKFDDITDIDAYHHIDAAEKAVKKRHDPTVCQRIKESNEPRSCLQGCSLLHVACHIGDSVLLELLLQFGADLNIRDYHGRTPLHHCISSGNHKFAKILLRRGARPSIEDDGGLSVLERAMEMGAITDEELFLLLAECA

SEQ ID NO: 45092 - protein, 764 aa, Arabidopsis thaliana
  peptide (1)..(764): Ceres Seq. ID no. 12560268
  misc_feature (456)..(592): Pfam Name: Putative GTPase activating protein for Arf Pfam Description: Putative GTPase activating protein for Arf
  misc_feature (455)..(762): Homolog of NCBI NO: 11358303 NR Description: hypothetical protein T31B5.120 - Arabidopsis
  misc_feature (9)..(335): Homolog of NCBI NO: 11358303 NR Description: hypothetical protein T31B5.120 - Arabidopsis
  misc_feature (559)..(762): Homolog of NCBI NO: 15240398 NR Description: GCN4-complementing protein - like; protein id:
  misc_feature (455)..(762): Homolog of NCBI NO: 30684352 NR Description: ARF GTPase-activating domain-containing protein
  misc_feature (1)..(335): Homolog of NCBI NO: 30684352 NR Description: ARF GTPase-activating domain-containing protein
  misc_feature (1)..(193): Homolog of NCBI NO: 15240398 NR Description: GCN4-complementing protein - like; protein id:
  misc_feature (429)..(625): Homolog of NCBI NO: 15240398 NR Description: GCN4-complementing protein - like; protein id:
  misc_feature (148)..(469): Homolog of NCBI NO: 15240398 NR Description: GCN4-complementing protein - like; protein id:
  misc_feature (195)..(277): Homolog of NCBI NO: 25402625 NR Description: hypothetical protein [imported] - Arabidopsis
  misc_feature (320)..(764): Homolog of NCBI NO: 25402625 NR Description: hypothetical protein [imported] - Arabidopsis
MFQKQVCSLEGTADELKDRCQKLYKGVKKFMGTLGEASKGESAFAACLEEFGGGPDDPISLSIGGPVISKFINALRELASYKEFLCSQVEHVLLERLMNFISVDLQEAKESRHRFDKAAHSYDQSREKFVSLKKNTRGEIVAELEEDLENSKSTFEKSRFNLVNSLMTIEAKKKYEFLESISAIMDAHLRYFKLGYDLLNQLEPFIHQILTYAQQSKEQSKIEQDRLARRIQEFRTQSELDSQQLVANAESSGANGNRVGGNIPYKNTETSLTADKEVIKQGYLLKRSSSLRTDWKRKFFVLDSHGSMYYYRTNGNKSMGSHHHYSGSSDHNTGVFGRFRARHNRSGSLTEGSLGYNTIDLRTSLIKLDAEDMDLRLCFRIISPQKTYTLQAENGADRMDWVNKITKAIGTLLNSHFLQQSPVRYLDKDNSSSAPANAVVSGDQIRHNDSRQNIGDDVSTILRGLPGNNACAECNAPEPDWASLNLGVLLCIQCSGVHRNLGVHISKVRSLSLDVKVWEPTILDLFRNLGNVYCNSLWEGLLHLDDDCEDGSALSHASVSKPCPEDSFSVKEKYILGKYLEKALVIKDESEANLSAASRIWEAVQSRNIREIYRLIVTTGDVNIINTKFDDITDIDAYHHIDAAEKAVKKRHDPTVCQRIKESNEPRSCLQGCSLLHVACHIGDSVLLELLLQFGADLNIRDYHGRTPLHHCISSGNHKFAKILLRRGARPSIEDDGGLSVLERAMEMGAITDEELFLLLAECA

SEQ ID NO: 45093 - protein, 734 aa, Arabidopsis thaliana
  peptide (1)..(734): Ceres Seq. ID no. 12560269
  misc_feature (426)..(562): Pfam Name: Putative GTPase activating protein for Arf Pfam Description: Putative GTPase activating protein for Arf
  misc_feature (425)..(732): Homolog of NCBI NO: 11358303 NR Description: hypothetical protein T31B5.120 - Arabidopsis
  misc_feature (1)..(305): Homolog of NCBI NO: 11358303 NR Description: hypothetical protein T31B5.120 - Arabidopsis
  misc_feature (529)..(732): Homolog of NCBI NO: 15240398 NR Description: GCN4-complementing protein - like; protein id:
  misc_feature (425)..(732): Homolog of NCBI NO: 30684352 NR Description: ARF GTPase-activating domain-containing protein
  misc_feature (1)..(305): Homolog of NCBI NO: 30684352 NR Description: ARF GTPase-activating domain-containing protein
  misc_feature (1)..(163): Homolog of NCBI NO: 15240398 NR Description: GCN4-complementing protein - like; protein id:
  misc_feature (399)..(595): Homolog of NCBI NO: 15240398 NR Description: GCN4-complementing protein - like; protein id:
  misc_feature (118)..(439): Homolog of NCBI NO: 15240398 NR Description: GCN4-complementing protein - like; protein id:
  misc_feature (165)..(247): Homolog of NCBI NO: 25402625 NR Description: hypothetical protein [imported] - Arabidopsis
  misc_feature (290)..(734): Homolog of NCBI NO: 25402625 NR Description: hypothetical protein [imported] - Arabidopsis
MGTLGEASKGESAFAACLEEFGGGPDDPISLSIGGPVISKFINALRELASYKEFLCSQVEHVLLERLMNFISVDLQEAKESRHRFDKAAHSYDQSREKFVSLKKNTRGEIVAELEEDLENSKSTFEKSRFNLVNSLMTIEAKKKYEFLESISAIMDAHLRYFKLGYDLLNQLEPFIHQILTYAQQSKEQSKIEQDRLARRIQEFRTQSELDSQQLVANAESSGANGNRVGGNIPYKNTETSLTADKEVIKQGYLLKRSSSLRTDWKRKFFVLDSHGSMYYYRTNGNKSMGSHHHYSGSSDHNTGVFGRFRARHNRSGSLTEGSLGYNTIDLRTSLIKLDAEDMDLRLCFRIISPQKTYTLQAENGADRMDWVNKITKAIGTLLNSHFLQQSPVRYLDKDNSSSAPANAVVSGDQIRHNDSRQNIGDDVSTILRGLPGNNACAECNAPEPDWASLNLGVLLCIQCSGVHRNLGVHISKVRSLSLDVKVWEPTILDLFRNLGNVYCNSLWEGLLHLDDDCEDGSALSHASVSKPCPEDSFSVKEKYILGKYLEKALVIKDESEANLSAASRIWEAVQSRNIREIYRLIVTTGDVNIINTKFDDITDIDAYHHIDAAEKAVKKRHDPTVCQRIKESNEPRSCLQGCSLLHVACHIGDSVLLELLLQFGADLNIRDYHGRTPLHHCISSGNHKFAKILLRRGARPSIEDDGGLSVLERAMEMGAITDEELFLLLAECA

SEQ ID NO: 45094 - DNA, 1319 bp, Arabidopsis thaliana
  misc_feature (1)..(1319): Ceres Seq. ID no. 12560286
  misc_feature: MA Experiment ID: 20000185 Result: Down-regulated in Transcription
  misc_feature: MA Experiment 20000185 PARAMETER Experiment Name: At_Roots__P Parameter: Age (day) Value: 7 vs. 21
  misc_feature: MA Experiment 20000185 PARAMETER Experiment Name: At_Roots__P Parameter: Organism Value: A. thaliana
  misc_feature: MA Experiment 20000185 PARAMETER Experiment Name: At_Roots__P Parameter: Tissue Value: Roots vs. Whole Plant
  misc_feature: MA Experiment ID: 20000437 Result: Down-regulated in Transcription
  misc_feature: MA Experiment 20000437 PARAMETER Experiment Name: At_Drought_P Parameter: Age (day) Value: 8
  misc_feature: MA Experiment 20000437 PARAMETER Experiment Name: At_Drought_P Parameter: Organism Value: A. thaliana
  misc_feature: MA Experiment 20000437 PARAMETER Experiment Name: At_Drought_P Parameter: Plant Line Value: WS
  misc_feature: MA Experiment 20000437 PARAMETER Experiment Name: At_Drought_P Parameter: Timepoint (hr) Value: 24
  misc_feature: MA Experiment 20000437 PARAMETER Experiment Name: At_Drought_P Parameter: Tissue Value: Whole Plant
  misc_feature: MA Experiment 20000437 PARAMETER Experiment Name: At_Drought_P Parameter: Treatment Value: Drought vs. No Drought
  misc_feature: MA Experiment ID: 20000438 Result: Up-regulated in Transcription
  misc_feature: MA Experiment 20000438 PARAMETER Experiment Name: At_Shoots__P Parameter: Age (day) Value: 14
  misc_feature: MA Experiment 20000438 PARAMETER Experiment Name: At_Shoots__P Parameter: Tissue Value: Shoots vs. Whole Plant
  misc_feature: MA Experiment ID: 20000439 Result: Down-regulated in Transcription
  misc_feature: MA Experiment 20000439 PARAMETER Experiment Name: At_Roots__P Parameter: Age (day) Value: 14 vs. 21
  misc_feature: MA Experiment 20000439 PARAMETER Experiment Name: At_Roots__P Parameter: Organism Value: A. thaliana
  misc_feature: MA Experiment 20000439 PARAMETER Experiment Name: At_Roots__P Parameter: Tissue Value: Roots vs. Whole Plant
  misc_feature: MA Experiment ID: 20000495 Result: Down-regulated in Transcription
  misc_feature: MA Experiment 20000495 PARAMETER Experiment Name: At_Guard_Cells_P Parameter: Harvest Date Value: 8/2/2002
  misc_feature: MA Experiment 20000495 PARAMETER Experiment Name: At_Guard_Cells_P Parameter: Organism Value: A. thaliana
  misc_feature: MA Experiment 20000495 PARAMETER Experiment Name: At_Guard_Cells_P Parameter: Tissue Value: Guard Cells vs. Leaves
  misc_feature: MA Experiment ID: 20000794 Result: Down-regulated in Transcription
  misc_feature: MA Experiment 20000794 PARAMETER Experiment Name: At_Petals_P Parameter: Age (day) Value: 23-25 days
  misc_feature: MA Experiment 20000794 PARAMETER Experiment Name: At_Petals_P Parameter: Plant Line Value: WS
  misc_feature: MA Experiment 20000794 PARAMETER Experiment Name: At_Petals_P Parameter: Tissue Value: Petals vs. Whole plant
  misc_feature: MA Experiment ID: 20001451 Result: Down-regulated in Transcription
  misc_feature: MA Experiment 20001451 PARAMETER Experiment Name: At_Far-red-induction_P Parameter: Age (day) Value: 7
  misc_feature: MA Experiment 20001451 PARAMETER Experiment Name: At_Far-red-induction_P Parameter: Light Value: Far-red vs. White
  misc_feature: MA Experiment 20001451 PARAMETER Experiment Name: At_Far-red-induction_P Parameter: Organism Value: A. thaliana
  misc_feature: MA Experiment 20001451 PARAMETER Experiment Name: At_Far-red-induction_P Parameter: Plant Line Value: Columbia
  misc_feature: MA Experiment 20001451 PARAMETER Experiment Name: At_Far-red-induction_P Parameter: Timepoint (hr) Value: 24
  misc_feature: MA Experiment 20001451 PARAMETER Experiment Name: At_Far-red-induction_P Parameter: Tissue Value: Whole Plant
  misc_feature: MA Experiment ID: 20001556 Result: Up-regulated in Transcription
  misc_feature: MA Experiment 20001556 PARAMETER Experiment Name: At_Drought_Soil_Dry_P Parameter: Age (day) Value: 26
  misc_feature: MA Experiment 20001556 PARAMETER Experiment Name: At_Drought_Soil_Dry_P Parameter: Organism Value: A. thaliana
  misc_feature: MA Experiment 20001556 PARAMETER Experiment Name: At_Drought_Soil_Dry_P Parameter: Plant Line Value: WS
  misc_feature: MA Experiment 20001556 PARAMETER Experiment Name: At_Drought_Soil_Dry_P Parameter: Post Timepoint (hr) Value: None
  misc_feature: MA Experiment 20001556 PARAMETER Experiment Name: At_Drought_Soil_Dry_P Parameter: Post-Treatment Value: None
  misc_feature: MA Experiment 20001556 PARAMETER Experiment Name: At_Drought_Soil_Dry_P Parameter: Timepoint (day) Value: 12
  misc_feature: MA Experiment 20001556 PARAMETER Experiment Name: At_Drought_Soil_Dry_P Parameter: Treatment Value: Drought vs. No Drought
  misc_feature: MA Experiment ID: 20001558 Result: Up-regulated in Transcription
  misc_feature: MA Experiment 20001558 PARAMETER Experiment Name: At_Drought_Soil_Dry_P Parameter: Age (day) Value: 27
  misc_feature: MA Experiment 20001558 PARAMETER Experiment Name: At_Drought_Soil_Dry_P Parameter: Organism Value: A. thaliana
  misc_feature: MA Experiment 20001558 PARAMETER Experiment Name: At_Drought_Soil_Dry_P Parameter: Plant Line Value: WS
  misc_feature: MA Experiment 20001558 PARAMETER Experiment Name: At_Drought_Soil_Dry_P Parameter: Post Timepoint (hr) Value: 6
  misc_feature: MA Experiment 20001558 PARAMETER Experiment Name: At_Drought_Soil_Dry_P Parameter: Post-Treatment Value: Re-Water vs. No Drought
  misc_feature: MA Experiment 20001558 PARAMETER Experiment Name: At_Drought_Soil_Dry_P Parameter: Timepoint (day) Value: 13
  misc_feature: MA Experiment 20001558 PARAMETER Experiment Name: At_Drought_Soil_Dry_P Parameter: Treatment Value: Drought vs. No Drought
  misc_feature: MA Experiment ID: 20001757 Result: Up-regulated in Transcription
  misc_feature: MA Experiment 20001757 PARAMETER Experiment Name: At_50mM_NH4NO3_L-to-H_P Parameter: Timepoint (hr) Value: 6
  misc_feature: MA Experiment 20001757 PARAMETER Experiment Name: At_50mM_NH4NO3_L-to-H_P Parameter: Tissue Value: Leaf
  misc_feature: MA Experiment 20001757 PARAMETER Experiment Name: At_50mM_NH4NO3_L-to-H_P Parameter: Treatment Value: 50mM NH4NO3 vs 100mM Mannitol
  misc_feature: MA Experiment ID: 20001911 Result: Down-regulated in Transcription
  misc_feature: MA Experiment 20001911 PARAMETER Experiment Name: At_Drought_Reproduction_P Parameter: Age (day) Value: 40
  misc_feature: MA Experiment 20001911 PARAMETER Experiment Name: At_Drought_Reproduction_P Parameter: Organism Value: A. thaliana
  misc_feature: MA Experiment 20001911 PARAMETER Experiment Name: At_Drought_Reproduction_P Parameter: Plant Line Value: WS
  misc_feature: MA Experiment 20001911 PARAMETER Experiment Name: At_Drought_Reproduction_P Parameter: Timepoint (day) Value: 10
  misc_feature: MA Experiment 20001911 PARAMETER Experiment Name: At_Drought_Reproduction_P Parameter: Tissue Value: Flowers
  misc_feature: MA Experiment 20001911 PARAMETER Experiment Name: At_Drought_Reproduction_P Parameter: Treatment Value: Drought vs. No Drought
aactctatttctatcattcgtcttctctgcagacgatttctctctgcaagctcccaaagtcgaaaactttatcagcaatggcggttttgttgtcatctttctctccactaggaatcaacattgacatgaataagaatctgggtgtttcgtattcttctttccctcaaattcatctctttaagggttctactccactgcgtgttcgaacattcgtcgtctcgagtcgtaaaaattcaggaactggtttggcaagtgaggataagaaattgttgctggaacgatatggttatgatgctaatgatgactttgggtctcaatctaagaaggcgagaaggaaagaagagaaaatgagtggaaggaatagtcaacaagtagaagaagttgttgttgtacagccaagaacaactcataggttactgcaggttcttgcaggaacggcgaaacgaaagaaattgctttctcttaagggaatggatgtgagacctatgatggaagttgttaaaggagcagcttttggaattctccaggctgctggtggttgtccaacgtctctgcgtcctggtaggtggttggatttgtatagtggtacagggtctgttgggattgaagcaatcagtcgaggatgttctgaggcacattttgttgagatggatccttgggttgtttcaaatgttctacaaccaaacttggaacacactgggtttgttgatgcttcggttatacacactgctcgagttgaaaacttcctggaacgtgctgataaattagtaggtaaggatggagtgtttgattatatcagcgttacgccaccttacatggaggttgattatgaggttctgatggatcagattgctaagtcaccagcgattggggaaaatacttttattttggtcgagtacccatcacgaacaacaatgcttgattcatgtggatgccttgaaaagatgactgatagaaggtttggccggacacatctagctatatatggaccaaaatgggctcagaagccaagaaaatcttaaagccacagtgattgtcgacagttatatctggccatttttttcggtttaaggcaatgaagagagactgtgactgaagagctagttccttctaacctttgaatactagtgtgcttttgtccgtcagtcgccattttgtttgtagccaaatactaaagctggatacaagttgcagtcttatgatagttctaaaatcggtaatggtgtatgtcggcttgtgtgtgtctgtgaagtagagatatagctgtaatctgtatacagtttgagatatgaagtcagttagagtttctcctttttact

SEQ ID NO: 45095 - protein, 339 aa, Arabidopsis thaliana
  peptide (1)..(339): Ceres Seq. ID no. 12560287
  misc_feature (139)..(329): Pfam Name: Conserved hypothetical protein 95 Pfam Description: Conserved hypothetical protein 95
  misc_feature (139)..(328): Homolog of NCBI NO: 20807931 NR Description: N6-adenine-specific methylase [Thermoanaerobacter
  misc_feature (139)..(328): Homolog of NCBI NO: 16801225 NR Description: similar to unknown proteins [Listeria innocua]
  misc_feature (139)..(331): Homolog of NCBI NO: 28210920 NR Description: methyltransferase [Clostridium tetani E88]
  misc_feature (139)..(328): Homolog of NCBI NO: 16804092 NR Description: similar to unknown proteins [Listeria
  misc_feature (139)..(328): Homolog of NCBI NO: 19704664 NR Description: Methyltransferase
  misc_feature (139)..(328): Homolog of NCBI NO: 34763572 NR Description: METHYLTRANSFERASE
  misc_feature (162)..(328): Homolog of NCBI NO: 22973536 NR Description: hypothetical protein [Chloroflexus aurantiacus]
  misc_feature (139)..(328): Homolog of NCBI NO: 39996346 NR Description: methyltransferase, putative [Geobacter
  misc_feature (64)..(339): Homolog of NCBI NO: 29788862 NR Description: hypothetical protein [Oryza sativa (japonica
  misc_feature (26)..(339): Homolog of NCBI NO: 22331389 NR Description: unknown protein
LYFYHSSSLQTISLCKLPKSKTLSAMAVLLSSFSPLGINIDMNKNLGVSYSSFPQIHLFKGSTPLRVRTFVVSSRKNSGTGLASEDKKLLLERYGYDANDDFGSQSKKARRKEEKMSGRNSQQVEEVVVVQPRTTHRLLQVLAGTAKRKKLLSLKGMDVRPMMEVVKGAAFGILQAAGGCPTSLRPGRWLDLYSGTGSVGIEAISRGCSEAHFVEMDPWVVSNVLQPNLEHTGFVDASVIHTARVENFLERADKLVGKDGVFDYISVTPPYMEVDYEVLMDQIAKSPAIGENTFILVEYPSRTTMLDSCGCLEKMTDRRFGRTHLAIYGPKWAQKPRKS

SEQ ID NO: 45096 - protein, 314 aa, Arabidopsis thaliana
  peptide (1)..(314): Ceres Seq. ID no. 12560288
  misc_feature (114)..(304): Pfam Name: Conserved hypothetical protein 95 Pfam Description: Conserved hypothetical protein 95
  misc_feature (114)..(303): Homolog of NCBI NO: 20807931 NR Description: N6-adenine-specific methylase [Thermoanaerobacter
  misc_feature (114)..(303): Homolog of NCBI NO: 16801225 NR Description: similar to unknown proteins [Listeria innocua]
  misc_feature (114)..(306): Homolog of NCBI NO: 28210920 NR Description: methyltransferase [Clostridium tetani E88]
  misc_feature (114)..(303): Homolog of NCBI NO: 16804092 NR Description: similar to unknown proteins [Listeria
  misc_feature (114)..(303): Homolog of NCBI NO: 19704664 NR Description: Methyltransferase
  misc_feature (114)..(303): Homolog of NCBI NO: 34763572 NR Description: METHYLTRANSFERASE
  misc_feature (137)..(303): Homolog of NCBI NO: 22973536 NR Description: hypothetical protein [Chloroflexus aurantiacus]
  misc_feature (114)..(303): Homolog of NCBI NO: 39996346 NR Description: methyltransferase, putative [Geobacter
  misc_feature (39)..(314): Homolog of NCBI NO: 29788862 NR Description: hypothetical protein [Oryza sativa (japonica
  misc_feature (1)..(314): Homolog of NCBI NO: 22331389 NR Description: unknown protein
MAVLLSSFSPLGINIDMNKNLGVSYSSFPQIHLFKGSTPLRVRTFVVSSRKNSGTGLASEDKKLLLERYGYDANDDFGSQSKKARRKEEKMSGRNSQQVEEVVVVQPRTTHRLLQVLAGTAKRKKLLSLKGMDVRPMMEVVKGAAFGILQAAGGCPTSLRPGRWLDLYSGTGSVGIEAISRGCSEAHFVEMDPWVVSNVLQPNLEHTGFVDASVIHTARVENFLERADKLVGKDGVFDYISVTPPYMEVDYEVLMDQIAKSPAIGENTFILVEYPSRTTMLDSCGCLEKMTDRRFGRTHLAIYGPKWAQKPRKS

SEQ ID NO: 45097 - protein, 298 aa, Arabidopsis thaliana
  peptide (1)..(298): Ceres Seq. ID no. 12560289
  misc_feature (98)..(288): Pfam Name: Conserved hypothetical protein 95 Pfam Description: Conserved hypothetical protein 95
  misc_feature (98)..(287): Homolog of NCBI NO: 20807931 NR Description: N6-adenine-specific methylase [Thermoanaerobacter
  misc_feature (98)..(287): Homolog of NCBI NO: 16801225 NR Description: similar to unknown proteins [Listeria innocua]
  misc_feature (98)..(290): Homolog of NCBI NO: 28210920 NR Description: methyltransferase [Clostridium tetani E88]
  misc_feature (98)..(287): Homolog of NCBI NO: 16804092 NR Description: similar to unknown proteins [Listeria
  misc_feature (98)..(287): Homolog of NCBI NO: 19704664 NR Description: Methyltransferase
  misc_feature (98)..(287): Homolog of NCBI NO: 34763572 NR Description: METHYLTRANSFERASE
  misc_feature (121)..(287): Homolog of NCBI NO: 22973536 NR Description: hypothetical protein [Chloroflexus aurantiacus]
  misc_feature (98)..(287): Homolog of NCBI NO: 39996346 NR Description: methyltransferase, putative [Geobacter
  misc_feature (23)..(298): Homolog of NCBI NO: 29788862 NR Description: hypothetical protein [Oryza sativa (japonica
  misc_feature (1)..(298): Homolog of NCBI NO: 22331389 NR Description: unknown protein
MNKNLGVSYSSFPQIHLFKGSTPLRVRTFVVSSRKNSGTGLASEDKKLLLERYGYDANDDFGSQSKKARRKEEKMSGRNSQQVEEVVVVQPRTTHRLLQVLAGTAKRKKLLSLKGMDVRPMMEVVKGAAFGILQAAGGCPTSLRPGRWLDLYSGTGSVGIEAISRGCSEAHFVEMDPWVVSNVLQPNLEHTGFVDASVIHTARVENFLERADKLVGKDGVFDYISVTPPYMEVDYEVLMDQIAKSPAIGENTFILVEYPSRTTMLDSCGCLEKMTDRRFGRTHLAIYGPKWAQKPRKS

SEQ ID NO: 45098 - DNA, 1529 bp, Arabidopsis thaliana; identical to SEQ ID NO: 21463
  misc_feature (1)..(1529): Ceres Seq. ID no. 13591513
  misc_feature: MA Experiment ID: 108595 Result: Down-regulated in Transcription
  misc_feature: MA Experiment 108595 PARAMETER Experiment Name: At_Ler-pi_Ovule_cDNA_P Parameter: Plant Line Value: null
  misc_feature: MA Experiment ID: 20000087 Result: Down-regulated in Transcription
  misc_feature: MA Experiment 20000087 PARAMETER Experiment Name: At_100uM_ABA_Mutants_cDNA_P Parameter: Plant Line Value: WS
  misc_feature: MA Experiment 20000087 PARAMETER Experiment Name: At_100uM_ABA_Mutants_cDNA_P Parameter: Timepoint (hr) Value: 6
  misc_feature: MA Experiment 20000087 PARAMETER Experiment Name: At_100uM_ABA_Mutants_cDNA_P Parameter: Tissue Value: Aerial
  misc_feature: MA Experiment 20000087 PARAMETER Experiment Name: At_100uM_ABA_Mutants_cDNA_P Parameter: Treatment Value: 100uM ABA vs. No Treatment
  misc_feature: MA Experiment ID: 20000224 Result: Down-regulated in Transcription

SEQ ID NO: 45099 - protein, 405 aa, Arabidopsis thaliana; identical to SEQ ID NO: 21464
  peptide (1)..(405): Ceres Seq. ID no. 13591514
  misc_feature (64)..(135): Pfam Name: RNA recognition motif. (a.k.a. RRM, RBD, or RNP domain) Pfam Description: RNA recognition motif. (a.k.a. RRM, RBD, or RNP
  misc_feature (64)..(135): Pfam Name: RNA recognition motif. (a.k.a. RRM, RBD, or RNP domain) Pfam Description: RNA recognition motif. (a.k.a. RRM, RBD, or RNP
  misc_feature (1)..(398): Homolog of NCBI NO: 34901884 NR Description: putative RNA Binding Protein 45
  misc_feature (21)..(394): Homolog of NCBI NO: 18416906 NR Description: RNA binding protein 45 (RBP45), putative
  misc_feature (21)..(403): Homolog of NCBI NO: 7485342 NR Description: hypothetical protein F10M23.340 - Arabidopsis
  misc_feature (1)..(394): Homolog of NCBI NO: 34896988 NR Description: putative RNA binding protein [Oryza sativa]
  misc_feature (5)..(394): Homolog of NCBI NO: 39545835 NR Description: OSJNBb0060E08.6 [Oryza sativa (japonica
  misc_feature (1)..(398): Homolog of NCBI NO: 34901884 NR Description: putative RNA Binding Protein 45
  misc_feature (21)..(403): Homolog of NCBI NO: 7485342 NR Description: hypothetical protein F10M23.340 - Arabidopsis
  misc_feature (5)..(394): Homolog of NCBI NO: 39545835 NR Description: OSJNBb0060E08.6 [Oryza sativa (japonica
  misc_feature (1)..(405): Homolog of NCBI NO: 15221071 NR Description: RNA binding protein 45 (RBP45), putative
  misc_feature (2)..(405): Homolog of NCBI NO: 21592583 NR Description: putative DNA binding protein [Arabidopsis
  misc_feature (1)..(306): Homolog of NCBI NO: 30682335 NR Description: RNA binding protein 45 (RBP45), putative
  misc_feature (3)..(386): Homolog of NCBI NO: 9663767 NR Description: RNA Binding Protein 45 [Nicotiana plumbaginifolia]
  misc_feature (1)..(394): Homolog of NCBI NO: 40253807 NR Description: putative RNA Binding Protein 45
  misc_feature (1)..(394): Homolog of NCBI NO: 34896988 NR Description: putative RNA binding protein [Oryza sativa]
  misc_feature (21)..(394): Homolog of NCBI NO: 18416906 NR Description: RNA binding protein 45 (RBP45), putative
  misc_feature (1)..(394): Homolog of NCBI NO: 40253807 NR Description: putative RNA Binding Protein 45
  misc_feature (3)..(386): Homolog of NCBI NO: 9663767 NR Description: RNA Binding Protein 45 [Nicotiana plumbaginifolia]
  misc_feature (1)..(306): Homolog of NCBI NO: 30682335 NR Description: RNA binding protein 45 (RBP45), putative
  misc_feature (2)..(405): Homolog of NCBI NO: 21592583 NR Description: putative DNA binding protein [Arabidopsis
  misc_feature (1)..(405): Homolog of NCBI NO: 15221071 NR Description: RNA binding protein 45 (RBP45), putative

SEQ ID NO: 45100 - protein, 404 aa, Arabidopsis thaliana; identical to SEQ ID NO: 21465
  peptide (1)..(404): Ceres Seq. ID no. 13591515
  misc_feature (63)..(134): Pfam Name: RNA recognition motif. (a.k.a. RRM, RBD, or RNP domain) Pfam Description: RNA recognition motif. (a.k.a. RRM, RBD, or RNP
  misc_feature (63)..(134): Pfam Name: RNA recognition motif. (a.k.a. RRM, RBD, or RNP domain) Pfam Description: RNA recognition motif. (a.k.a. RRM, RBD, or RNP
  misc_feature (1)..(397): Homolog of NCBI NO: 34901884 NR Description: putative RNA Binding Protein 45
  misc_feature (20)..(393): Homolog of NCBI NO: 18416906 NR Description: RNA binding protein 45 (RBP45), putative
  misc_feature (20)..(402): Homolog of NCBI NO: 7485342 NR Description: hypothetical protein F10M23.340 - Arabidopsis
  misc_feature (1)..(393): Homolog of NCBI NO: 34896988 NR Description: putative RNA binding protein [Oryza sativa]
  misc_feature (4)..(393): Homolog of NCBI NO: 39545835 NR Description: OSJNBb0060E08.6 [Oryza sativa (japonica
  misc_feature (1)..(397): Homolog of NCBI NO: 34901884 NR Description: putative RNA Binding Protein 45
  misc_feature (20)..(402): Homolog of NCBI NO: 7485342 NR Description: hypothetical protein F10M23.340 - Arabidopsis
  misc_feature (4)..(393): Homolog of NCBI NO: 39545835 NR Description: OSJNBb0060E08.6 [Oryza sativa (japonica
  misc_feature (1)..(404): Homolog of NCBI NO: 15221071 NR Description: RNA binding protein 45 (RBP45), putative
  misc_feature (1)..(404): Homolog of NCBI NO: 21592583 NR Description: putative DNA binding protein [Arabidopsis
  misc_feature (1)..(305): Homolog of NCBI NO: 30682335 NR Description: RNA binding protein 45 (RBP45), putative
  misc_feature (2)..(385): Homolog of NCBI NO: 9663767 NR Description: RNA Binding Protein 45 [Nicotiana plumbaginifolia]
  misc_feature (1)..(393): Homolog of NCBI NO: 40253807 NR Description: putative RNA Binding Protein 45
  misc_feature (1)..(393): Homolog of NCBI NO: 34896988 NR Description: putative RNA binding protein [Oryza sativa]
  misc_feature (20)..(393): Homolog of NCBI NO: 18416906 NR Description: RNA binding protein 45 (RBP45), putative
  misc_feature (1)..(393): Homolog of NCBI NO: 40253807 NR Description: putative RNA Binding Protein 45
  misc_feature (2)..(385): Homolog of NCBI NO: 9663767 NR Description: RNA Binding Protein 45 [Nicotiana plumbaginifolia]
  misc_feature (1)..(305): Homolog of NCBI NO: 30682335 NR Description: RNA binding protein 45 (RBP45), putative
  misc_feature (1)..(404): Homolog of NCBI NO: 21592583 NR Description: putative DNA binding protein [Arabidopsis
  misc_feature (1)..(404): Homolog of NCBI NO: 15221071 NR Description: RNA binding protein 45 (RBP45), putative

SEQ ID NO: 45101 - protein, 364 aa, Arabidopsis thaliana; identical to SEQ ID NO: 21466
  peptide (1)..(364): Ceres Seq. ID no. 13591516
  misc_feature (23)..(94): Pfam Name: RNA recognition motif. (a.k.a. RRM, RBD, or RNP domain) Pfam Description: RNA recognition motif. (a.k.a. RRM, RBD, or RNP
  misc_feature (23)..(94): Pfam Name: RNA recognition motif. (a.k.a. RRM, RBD, or RNP domain) Pfam Description: RNA recognition motif. (a.k.a. RRM, RBD, or RNP
  misc_feature (1)..(357): Homolog of NCBI NO: 34901884 NR Description: putative RNA Binding Protein 45
  misc_feature (1)..(353): Homolog of NCBI NO: 18416906 NR Description: RNA binding protein 45 (RBP45), putative
  misc_feature (1)..(362): Homolog of NCBI NO: 7485342 NR Description: hypothetical protein F10M23.340 - Arabidopsis
  misc_feature (1)..(353): Homolog of NCBI NO: 34896988 NR Description: putative RNA binding protein [Oryza sativa]
  misc_feature (1)..(353): Homolog of NCBI NO: 39545835 NR Description: OSJNBb0060E08.6 [Oryza sativa (japonica
  misc_feature (1)..(357): Homolog of NCBI NO: 34901884 NR Description: putative RNA Binding Protein 45
  misc_feature (1)..(362): Homolog of NCBI NO: 7485342 NR Description: hypothetical protein F10M23.340 - Arabidopsis
  misc_feature (1)..(353): Homolog of NCBI NO: 39545835 NR Description: OSJNBb0060E08.6 [Oryza sativa (japonica
  misc_feature (1)..(364): Homolog of NCBI NO: 15221071 NR Description: RNA binding protein 45 (RBP45), putative
  misc_feature (1)..(364): Homolog of NCBI NO: 21592583 NR Description: putative DNA binding protein [Arabidopsis
  misc_feature (1)..(265): Homolog of NCBI NO: 30682335 NR Description: RNA binding protein 45 (RBP45), putative
  misc_feature (1)..(345): Homolog of NCBI NO: 9663767 NR Description: RNA Binding Protein 45 [Nicotiana plumbaginifolia]
  misc_feature (1)..(353): Homolog of NCBI NO: 40253807 NR Description: putative RNA Binding Protein 45
  misc_feature (1)..(353): Homolog of NCBI NO: 34896988 NR Description: putative RNA binding protein [Oryza sativa]
  misc_feature (1)..(353): Homolog of NCBI NO: 18416906 NR Description: RNA binding protein 45 (RBP45), putative
  misc_feature (1)..(353): Homolog of NCBI NO: 40253807 NR Description: putative RNA Binding Protein 45
  misc_feature (1)..(345): Homolog of NCBI NO: 9663767 NR Description: RNA Binding Protein 45 [Nicotiana plumbaginifolia]
  misc_feature (1)..(265): Homolog of NCBI NO: 30682335 NR Description: RNA binding protein 45 (RBP45), putative
  misc_feature (1)..(364): Homolog of NCBI NO: 21592583 NR Description: putative DNA binding protein [Arabidopsis
  misc_feature (1)..(364): Homolog of NCBI NO: 15221071 NR Description: RNA binding protein 45 (RBP45), putative

SEQ ID NO: 45102 - DNA, 1281 bp, Arabidopsis thaliana
  misc_feature (1)..(1281): Ceres Seq. ID no. 13575859
  misc_feature: MA Experiment ID: 20000452 Result: Down-regulated in Transcription
  misc_feature: MA Experiment 20000452 PARAMETER Experiment Name: At_CS6879_Shoots-Roots_P Parameter: Age (day) Value: 14
  misc_feature: MA Experiment 20000452 PARAMETER Experiment Name: At_CS6879_Shoots-Roots_P Parameter: Organism Value: A. thaliana
  misc_feature: MA Experiment 20000452 PARAMETER Experiment Name: At_CS6879_Shoots-Roots_P Parameter: Plant Line Value: CS6879 vs. WS
  misc_feature: MA Experiment 20000452 PARAMETER Experiment Name: At_CS6879_Shoots-Roots_P Parameter: Tissue Value: Shoots
  misc_feature: MA Experiment ID: 20000794 Result: Down-regulated in Transcription
  misc_feature: MA Experiment 20000794 PARAMETER Experiment Name: At_Petals_P Parameter: Age (day) Value: 23-25 days
  misc_feature: MA Experiment 20000794 PARAMETER Experiment Name: At_Petals_P Parameter: Plant Line Value: WS
  misc_feature: MA Experiment 20000794 PARAMETER Experiment Name: At_Petals_P Parameter: Tissue Value: Petals vs. Whole plant
  misc_feature: MA Experiment ID: 20001558 Result: Up-regulated in Transcription
  misc_feature: MA Experiment 20001558 PARAMETER Experiment Name: At_Drought_Soil_Dry_P Parameter: Age (day) Value: 27
  misc_feature: MA Experiment 20001558 PARAMETER Experiment Name: At_Drought_Soil_Dry_P Parameter: Organism Value: A. thaliana
  misc_feature: MA Experiment 20001558 PARAMETER Experiment Name: At_Drought_Soil_Dry_P Parameter: Plant Line Value: WS
  misc_feature: MA Experiment 20001558 PARAMETER Experiment Name: At_Drought_Soil_Dry_P Parameter: Post Timepoint (hr) Value: 6
  misc_feature: MA Experiment 20001558 PARAMETER Experiment Name: At_Drought_Soil_Dry_P Parameter: Post-Treatment Value: Re-Water vs. No Drought
  misc_feature: MA Experiment 20001558 PARAMETER Experiment Name: At_Drought_Soil_Dry_P Parameter: Timepoint (day) Value: 13
  misc_feature: MA Experiment 20001558 PARAMETER Experiment Name: At_Drought_Soil_Dry_P Parameter: Treatment Value: Drought vs. No Drought
gatggctgagagcttctgagagcttctgagagagacacagccatggctacaacttcacacaacaaaccctcactcttccctctactctcccttctctgtttcatctccattttcctcctcctctctctatccaaacgcgcttccctctcctctcccaaaactcaccgctccgccaccgtcttccctccaaaacccgacggttccctctcacctctctccgccacttgcgacttctccgaaggctcctggatctacgaccccaaccccagatccaccaggtacaccagtagttgtaaagaaatcttcaaaggatggaattgtattcgtaacaacaaaaccaatggtttcgagatatctaattggcgatggaaacctaaacactgtgatcttccttcgtttgatccactcaaatttcttcagtctcatcgcaataccaacatcggatttgtgggtgattcattgaataggaacatgtttgtatctttattctgtatgttaaagagtgtgacgggtgaattgaagaagtggcgacctgccggtgcagatcgcggattcacgttttcgcagtataatttgactatcgcgtatcatcgaacaaatctattggctcgttatggtagatggtcagccaatgctaagggtggtgagttagaatctcttggatttaaagagggctatagagttgatgttgatattccagacagctcgtgggcgaaggcttcgagtttccatgacattctcattttgaacactgggcattggtggtgggcgccatcaaaatttgaccctgtaaaatctcctatgcttttctttgaaggcggtcggccaatacttccacctatacctcctgctactggcctagaccgggttctaaacaatatggtaaattttgtggagaaaacaaagcgacctggagggatcatattcttccggacacaatcacctaggcactttgaaggaggtgactgggaccaaggtggtacttgtcaacgactgcaacctttgttacctggaaaagttgaggaatttttctcagtggggaacaacggaacaaatgtagaggttcgtctcgtgaatcaacacctctataactccctcaagagtagaagcgccttccacgttttggacataactcgaatgagcgagtacagagccgacgctcatccggcagcagctggtggaaagaatcacgatgactgcatgcattggtgcctcccgggccttaccgacacttggaatgatttattcgttgcaactcttcatacgatcaaagctttgtaa

SEQ ID NO: 45103 - protein, 412 aa, Arabidopsis thaliana
  peptide (1)..(412): Ceres Seq. ID no. 13575860
  misc_feature (241)..(406): Pfam Name: Arabidopsis proteins of unknown function Pfam Description: Arabidopsis proteins of unknown function
  misc_feature (62)..(406): Homolog of NCBI NO: 15229797 NR Description: expressed protein [Arabidopsis thaliana]
  misc_feature (62)..(407): Homolog of NCBI NO: 15228743 NR Description: expressed protein [Arabidopsis thaliana]
  misc_feature (62)..(406): Homolog of NCBI NO: 15242021 NR Description: expressed protein [Arabidopsis thaliana]
  misc_feature (24)..(404): Homolog of NCBI NO: 6862912 NR Description: unknown protein [Arabidopsis thaliana]
  misc_feature (62)..(406): Homolog of NCBI NO: 21592371 NR Description: unknown [Arabidopsis thaliana]
  misc_feature (3)..(321): Homolog of NCBI NO: 16226907 NR Description: AT5g64470/T12B11_6 [Arabidopsis thaliana]
  misc_feature (3)..(321): Homolog of NCBI NO: 30698028 NR Description: expressed protein [Arabidopsis thaliana]
  misc_feature (3)..(408): Homolog of NCBI NO: 15237710 NR Description: expressed protein [Arabidopsis thaliana]
  misc_feature (10)..(406): Homolog of NCBI NO: 29027820 NR Description: OSJNBb0055I24.1 [Oryza sativa (japonica
  misc_feature (1)..(412): Homolog of NCBI NO: 15225951 NR Description: expressed protein [Arabidopsis thaliana]
MATTSHNKPSLFPLLSLLCFISIFLLLSLSKRASLSSPKTHRSATVFPPKPDGSLSPLSATCDFSEGSWIYDPNPRSTRYTSSCKEIFKGWNCIRNNKTNGFEISNWRWKPKHCDLPSFDPLKFLQSHRNTNIGFVGDSLNRNMFVSLFCMLKSVTGELKKWRPAGADRGFTFSQYNLTIAYHRTNLLARYGRWSANAKGGELESLGFKEGYRVDVDIPDSSWAKASSFHDILILNTGHWWWAPSKFDPVKSPMLFFEGGRPILPPIPPATGLDRVLNNMVNFVEKTKRPGGIIFFRTQSPRHFEGGDWDQGGTCQRLQPLLPGKVEEFFSVGNNGTNVEVRLVNQHLYNSLKSRSAFHVLDITRMSEYRADAHPAAAGGKNHDDCMHWCLPGLTDTWNDLFVATLHTIKAL

SEQ ID NO: 45104 - protein, 269 aa, Arabidopsis thaliana
  peptide (1)..(269): Ceres Seq. ID no. 13575861
  misc_feature (98)..(263): Pfam Name: Arabidopsis proteins of unknown function Pfam Description: Arabidopsis proteins of unknown function
  misc_feature (1)..(263): Homolog of NCBI NO: 15229797 NR Description: expressed protein [Arabidopsis thaliana]
  misc_feature (1)..(264): Homolog of NCBI NO: 15228743 NR Description: expressed protein [Arabidopsis thaliana]
  misc_feature (1)..(263): Homolog of NCBI NO: 15242021 NR Description: expressed protein [Arabidopsis thaliana]
  misc_feature (1)..(261): Homolog of NCBI NO: 6862912 NR Description: unknown protein [Arabidopsis thaliana]
  misc_feature (1)..(263): Homolog of NCBI NO: 21592371 NR Description: unknown [Arabidopsis thaliana]
  misc_feature (1)..(178): Homolog of NCBI NO: 16226907 NR Description: AT5g64470/T12B11_6 [Arabidopsis thaliana]
  misc_feature (1)..(178): Homolog of NCBI NO: 30698028 NR Description: expressed protein [Arabidopsis thaliana]
  misc_feature (1)..(265): Homolog of NCBI NO: 15237710 NR Description: expressed protein [Arabidopsis thaliana]
  misc_feature (1)..(263): Homolog of NCBI NO: 29027820 NR Description: OSJNBb0055I24.1 [Oryza sativa (japonica
  misc_feature (1)..(269): Homolog of NCBI NO: 15225951 NR Description: expressed protein [Arabidopsis thaliana]
MFVSLFCMLKSVTGELKKWRPAGADRGFTFSQYNLTIAYHRTNLLARYGRWSANAKGGELESLGFKEGYRVDVDIPDSSWAKASSFHDILILNTGHWWWAPSKFDPVKSPMLFFEGGRPILPPIPPATGLDRVLNNMVNFVEKTKRPGGIIFFRTQSPRHFEGGDWDQGGTCQRLQPLLPGKVEEFFSVGNNGTNVEVRLVNQHLYNSLKSRSAFHVLDITRMSEYRADAHPAAAGGKNHDDCMHWCLPGLTDTWNDLFVATLHTIKAL

SEQ ID NO: 45105 - protein, 262 aa, Arabidopsis thaliana
  peptide (1)..(262): Ceres Seq. ID no. 13575862
  misc_feature (91)..(256): Pfam Name: Arabidopsis proteins of unknown function Pfam Description: Arabidopsis proteins of unknown function
  misc_feature (1)..(256): Homolog of NCBI NO: 15229797 NR Description: expressed protein [Arabidopsis thaliana]
  misc_feature (1)..(257): Homolog of NCBI NO: 15228743 NR Description: expressed protein [Arabidopsis thaliana]
  misc_feature (1)..(256): Homolog of NCBI NO: 15242021 NR Description: expressed protein [Arabidopsis thaliana]
  misc_feature (1)..(254): Homolog of NCBI NO: 6862912 NR Description: unknown protein [Arabidopsis thaliana]
  misc_feature (1)..(256): Homolog of NCBI NO: 21592371 NR Description: unknown [Arabidopsis thaliana]
  misc_feature (1)..(171): Homolog of NCBI NO: 16226907 NR Description: AT5g64470/T12B11_6 [Arabidopsis thaliana]
  misc_feature (1)..(171): Homolog of NCBI NO: 30698028 NR Description: expressed protein [Arabidopsis thaliana]
  misc_feature (1)..(258): Homolog of NCBI NO: 15237710 NR Description: expressed protein [Arabidopsis thaliana]
  misc_feature (1)..(256): Homolog of NCBI NO: 29027820 NR Description: OSJNBb0055I24.1 [Oryza sativa (japonica
  misc_feature (1)..(262): Homolog of NCBI NO: 15225951 NR Description: expressed protein [Arabidopsis thaliana]
MLKSVTGELKKWRPAGADRGFTFSQYNLTIAYHRTNLLARYGRWSANAKGGELESLGFKEGYRVDVDIPDSSWAKASSFHDILILNTGHWWWAPSKFDPVKSPMLFFEGGRPILPPIPPATGLDRVLNNMVNFVEKTKRPGGIIFFRTQSPRHFEGGDWDQGGTCQRLQPLLPGKVEEFFSVGNNGTNVEVRLVNQHLYNSLKSRSAFHVLDITRMSEYRADAHPAAAGGKNHDDCMHWCLPGLTDTWNDLFVATLHTIKAL

SEQ ID NO: 45106 - DNA, 2810 bp, Arabidopsis thaliana; identical to SEQ ID NO: 44848
  misc_feature (1)..(2810): Ceres Seq. ID no. 12650352
  misc_feature: MA Experiment ID: 20000180 Result: Up-regulated in Transcription
  misc_feature: MA Experiment 20000180 PARAMETER Experiment Name: At_Germinating_Seeds_P Parameter: Age (hr) Value: 24 vs. 0
  misc_feature: MA Experiment 20000180 PARAMETER Experiment Name: At_Germinating_Seeds_P Parameter: Tissue Value: Germinating Seeds
  misc_feature: MA Experiment ID: 20000438 Result: Up-regulated in Transcription
  misc_feature: MA Experiment 20000438 PARAMETER Experiment Name: At_Shoots__P Parameter: Age (day) Value: 14
  misc_feature: MA Experiment 20000438 PARAMETER Experiment Name: At_Shoots__P Parameter: Tissue Value: Shoots vs. Whole Plant
  misc_feature: MA Experiment ID: 20000495 Result: Down-regulated in Transcription
  misc_feature: MA Experiment 20000495 PARAMETER Experiment Name: At_Guard_Cells_P Parameter: Harvest Date Value: 8/2/2002
  misc_feature: MA Experiment 20000495 PARAMETER Experiment Name: At_Guard_Cells_P Parameter: Organism Value: A. thaliana
  misc_feature: MA Experiment 20000495 PARAMETER Experiment Name: At_Guard_Cells_P Parameter: Tissue Value: Guard Cells vs. Leaves
  misc_feature: MA Experiment ID: 20000496 Result: Down-regulated in Transcription
  misc_feature: MA Experiment 20000496 PARAMETER Experiment Name: At_Guard_Cells_P Parameter: Harvest Date Value: 7/19/2002
  misc_feature: MA Experiment 20000496 PARAMETER Experiment Name: At_Guard_Cells_P Parameter: Organism Value: Canola
  misc_feature: MA Experiment 20000496 PARAMETER Experiment Name: At_Guard_Cells_P Parameter: Tissue Value: Guard Cells vs. Leaves
  misc_feature: MA Experiment ID: 20000573 Result: Down-regulated in Transcription
  misc_feature: MA Experiment 20000573 PARAMETER Experiment Name: At_100uM_ABA_Mutants__P Parameter: Organism Value: A. thaliana
  misc_feature: MA Experiment 20000573 PARAMETER Experiment Name: At_100uM_ABA_Mutants__P Parameter: Plant Line Value: CS22 vs. Ler wt
  misc_feature: MA Experiment 20000573 PARAMETER Experiment Name: At_100uM_ABA_Mutants__P Parameter: Timepoint (hr) Value: N/A
  misc_feature: MA Experiment 20000573 PARAMETER Experiment Name: At_100uM_ABA_Mutants__P Parameter: Tissue Value: Whole Plant
  misc_feature: MA Experiment 20000573 PARAMETER Experiment Name: At_100uM_ABA_Mutants__P Parameter: Treatment Value: None
  misc_feature: MA Experiment ID: 20001247 Result: Up-regulated in Transcription
  misc_feature: MA Experiment 20001247 PARAMETER Experiment Name: At_Far-red-induction_P Parameter: Age (day) Value: 7
  misc_feature: MA Experiment 20001247 PARAMETER Experiment Name: At_Far-red-induction_P Parameter: Light Value: Far-red vs. White
  misc_feature: MA Experiment 20001247 PARAMETER Experiment Name: At_Far-red-induction_P Parameter: Organism Value: A. thaliana
  misc_feature: MA Experiment 20001247 PARAMETER Experiment Name: At_Far-red-induction_P Parameter: Plant Line Value: Columbia
  misc_feature: MA Experiment 20001247 PARAMETER Experiment Name: At_Far-red-induction_P Parameter: Timepoint (hr) Value: 1
  misc_feature: MA Experiment 20001247 PARAMETER Experiment Name: At_Far-red-induction_P Parameter: Tissue Value: Whole Plant
  misc_feature: MA Experiment ID: 20001248 Result: Down-regulated in Transcription
  misc_feature: MA Experiment 20001248 PARAMETER Experiment Name: At_Far-red-induction_P Parameter: Age (day) Value: 7
  misc_feature: MA Experiment 20001248 PARAMETER Experiment Name: At_Far-red-induction_P Parameter: Light Value: Far-red vs. White
  misc_feature: MA Experiment 20001248 PARAMETER Experiment Name: At_Far-red-induction_P Parameter: Organism Value: A. thaliana
  misc_feature: MA Experiment 20001248 PARAMETER Experiment Name: At_Far-red-induction_P Parameter: Plant Line Value: Columbia
  misc_feature: MA Experiment 20001248 PARAMETER Experiment Name: At_Far-red-induction_P Parameter: Timepoint (hr) Value: 4
  misc_feature: MA Experiment 20001248 PARAMETER Experiment Name: At_Far-red-induction_P Parameter: Tissue Value: Whole Plant
  misc_feature: MA Experiment ID: 20001450 Result: Down-regulated in Transcription
  misc_feature: MA Experiment 20001450 PARAMETER Experiment Name: At_Far-red-induction_P Parameter: Age (day) Value: 7
  misc_feature: MA Experiment 20001450 PARAMETER Experiment Name: At_Far-red-induction_P Parameter: Light Value: Far-red vs. White
  misc_feature: MA Experiment 20001450 PARAMETER Experiment Name: At_Far-red-induction_P Parameter: Organism Value: A. thaliana
  misc_feature: MA Experiment 20001450 PARAMETER Experiment Name: At_Far-red-induction_P Parameter: Plant Line Value: Columbia
  misc_feature: MA Experiment 20001450 PARAMETER Experiment Name: At_Far-red-induction_P Parameter: Timepoint (hr) Value: 8
  misc_feature: MA Experiment 20001450 PARAMETER Experiment Name: At_Far-red-induction_P Parameter: Tissue Value: Whole Plant
  misc_feature: MA Experiment ID: 20001451 Result: Up-regulated in Transcription
  misc_feature: MA Experiment 20001451 PARAMETER Experiment Name: At_Far-red-induction_P Parameter: Age (day) Value: 7
  misc_feature: MA Experiment 20001451 PARAMETER Experiment Name: At_Far-red-induction_P Parameter: Light Value: Far-red vs. White
  misc_feature: MA Experiment 20001451 PARAMETER Experiment Name: At_Far-red-induction_P Parameter: Organism Value: A. thaliana
  misc_feature: MA Experiment 20001451 PARAMETER Experiment Name: At_Far-red-induction_P Parameter: Plant Line Value: Columbia
  misc_feature: MA Experiment 20001451 PARAMETER Experiment Name: At_Far-red-induction_P Parameter: Timepoint (hr) Value: 24
  misc_feature: MA Experiment 20001451 PARAMETER Experiment Name: At_Far-red-induction_P Parameter: Tissue Value: Whole Plant
  misc_feature: MA Experiment ID: 20001557 Result: Down-regulated in Transcription
  misc_feature: MA Experiment 20001557 PARAMETER Experiment Name: At_Drought_Soil_Dry_P Parameter: Age (day) Value: 27
  misc_feature: MA Experiment 20001557 PARAMETER Experiment Name: At_Drought_Soil_Dry_P Parameter: Organism Value: A. thaliana
  misc_feature: MA Experiment 20001557 PARAMETER Experiment Name: At_Drought_Soil_Dry_P Parameter: Plant Line Value: WS
  misc_feature: MA Experiment 20001557 PARAMETER Experiment Name: At_Drought_Soil_Dry_P Parameter: Post Timepoint (hr) Value: 3
  misc_feature: MA Experiment 20001557 PARAMETER Experiment Name: At_Drought_Soil_Dry_P Parameter: Post-Treatment Value: Re-Water vs. No Drought
  misc_feature: MA Experiment 20001557 PARAMETER Experiment Name: At_Drought_Soil_Dry_P Parameter: Timepoint (day) Value: 13
  misc_feature: MA Experiment 20001557 PARAMETER Experiment Name: At_Drought_Soil_Dry_P Parameter: Treatment Value: Drought vs. No Drought

SEQ ID NO: 45107 - protein, 761 aa, Arabidopsis thaliana; identical to SEQ ID NO: 44849
  peptide (1)..(761): Ceres Seq. ID no. 12650353
  misc_feature (276)..(396): Pfam Name: ABC1 family Pfam Description: ABC1 family
  misc_feature (276)..(396): Pfam Name: ABC1 family Pfam Description: ABC1 family
  misc_feature (276)..(396): Pfam Name: ABC1 family Pfam Description: ABC1 family
  misc_feature (103)..(549): Homolog of NCBI NO: 6648182 NR Description: unknown protein [Arabidopsis thaliana]
  misc_feature (567)..(757): Homolog of NCBI NO: 19424003 NR Description: unknown protein [Arabidopsis thaliana]
  misc_feature (171)..(549): Homolog of NCBI NO: 19424003 NR Description: unknown protein [Arabidopsis thaliana]
  misc_feature (567)..(757): Homolog of NCBI NO: 15983801 NR Description: At3g07700/F17A17.4 [Arabidopsis thaliana]
  misc_feature (103)..(549): Homolog of NCBI NO: 15983801 NR Description: At3g07700/F17A17.4 [Arabidopsis thaliana]
  misc_feature (103)..(549): Homolog of NCBI NO: 6648182 NR Description: unknown protein [Arabidopsis thaliana]
  misc_feature (171)..(549): Homolog of NCBI NO: 19424003 NR Description: unknown protein [Arabidopsis thaliana]
  misc_feature (103)..(549): Homolog of NCBI NO: 15983801 NR Description: At3g07700/F17A17.4 [Arabidopsis thaliana]
  misc_feature (567)..(757): Homolog of NCBI NO: 15983801 NR Description: At3g07700/F17A17.4 [Arabidopsis thaliana]
  misc_feature (171)..(549): Homolog of NCBI NO: 19424003 NR Description: unknown protein [Arabidopsis thaliana]
  misc_feature (567)..(757): Homolog of NCBI NO: 19424003 NR Description: unknown protein [Arabidopsis thaliana]
  misc_feature (103)..(549): Homolog of NCBI NO: 6648182 NR Description: unknown protein [Arabidopsis thaliana]
  misc_feature (1)..(563): Homolog of NCBI NO: 13605698 NR Description: AT5g64940/MXK3_17 [Arabidopsis thaliana]
  misc_feature (103)..(549): Homolog of NCBI NO: 18398032 NR Description: expressed protein
  misc_feature (103)..(549): Homolog of NCBI NO: 21618050 NR Description: unknown [Arabidopsis thaliana]
  misc_feature (567)..(757): Homolog of NCBI NO: 18398032 NR Description: expressed protein
  misc_feature (567)..(757): Homolog of NCBI NO: 21618050 NR Description: unknown [Arabidopsis thaliana]
  misc_feature (1)..(563): Homolog of NCBI NO: 13605698 NR Description: AT5g64940/MXK3_17 [Arabidopsis thaliana]
  misc_feature (103)..(549): Homolog of NCBI NO: 18398032 NR Description: expressed protein
  misc_feature (103)..(549): Homolog of NCBI NO: 21618050 NR Description: unknown [Arabidopsis thaliana]
  misc_feature (567)..(757): Homolog of NCBI NO: 18398032 NR Description: expressed protein
  misc_feature (567)..(757): Homolog of NCBI NO: 21618050 NR Description: unknown [Arabidopsis thaliana]
  misc_feature (103)..(549): Homolog of NCBI NO: 15983801 NR Description: At3g07700/F17A17.4 [Arabidopsis thaliana]
  misc_feature (567)..(757): Homolog of NCBI NO: 15983801 NR Description: At3g07700/F17A17.4 [Arabidopsis thaliana]
  misc_feature (567)..(757): Homolog of NCBI NO: 19424003 NR Description: unknown protein [Arabidopsis thaliana]
  misc_feature (567)..(757): Homolog of NCBI NO: 21618050 NR Description: unknown [Arabidopsis thaliana]
  misc_feature (567)..(757): Homolog of NCBI NO: 18398032 NR Description: expressed protein
  misc_feature (103)..(549): Homolog of NCBI NO: 21618050 NR Description: unknown [Arabidopsis thaliana]
  misc_feature (103)..(549): Homolog of NCBI NO: 18398032 NR Description: expressed protein
  misc_feature (1)..(563): Homolog of NCBI NO: 13605698 NR Description: AT5g64940/MXK3_17 [Arabidopsis thaliana]

SEQ ID NO: 45108 - protein, 556 aa, Arabidopsis thaliana; identical to SEQ ID NO: 44850
  peptide (1)..(556): Ceres Seq. ID no. 12650354
  misc_feature (71)..(191): Pfam Name: ABC1 family Pfam Description: ABC1 family
  misc_feature (71)..(191): Pfam Name: ABC1 family Pfam Description: ABC1 family
  misc_feature (71)..(191): Pfam Name: ABC1 family Pfam Description: ABC1 family
  misc_feature (1)..(344): Homolog of NCBI NO: 6648182 NR Description: unknown protein [Arabidopsis thaliana]
  misc_feature (362)..(552): Homolog of NCBI NO: 19424003 NR Description: unknown protein [Arabidopsis thaliana]
  misc_feature (1)..(344): Homolog of NCBI NO: 19424003 NR Description: unknown protein [Arabidopsis thaliana]
  misc_feature (362)..(552): Homolog of NCBI NO: 15983801 NR Description: At3g07700/F17A17.4 [Arabidopsis thaliana]
  misc_feature (1)..(344): Homolog of NCBI NO: 15983801 NR Description: At3g07700/F17A17.4 [Arabidopsis thaliana]
  misc_feature (1)..(344): Homolog of NCBI NO: 6648182 NR Description: unknown protein [Arabidopsis thaliana]
  misc_feature (1)..(344): Homolog of NCBI NO: 19424003 NR Description: unknown protein [Arabidopsis thaliana]
  misc_feature (1)..(344): Homolog of NCBI NO: 15983801 NR Description: At3g07700/F17A17.4 [Arabidopsis thaliana]
  misc_feature (362)..(552): Homolog of NCBI NO: 15983801 NR Description: At3g07700/F17A17.4 [Arabidopsis thaliana]
  misc_feature (1)..(344): Homolog of NCBI NO: 19424003 NR Description: unknown protein [Arabidopsis thaliana]
  misc_feature (362)..(552): Homolog of NCBI NO: 19424003 NR Description: unknown protein [Arabidopsis thaliana]
  misc_feature (1)..(344): Homolog of NCBI NO: 6648182 NR Description: unknown protein [Arabidopsis thaliana]
  misc_feature (1)..(358): Homolog of NCBI NO: 13605698 NR Description: AT5g64940/MXK3_17 [Arabidopsis thaliana]
  misc_feature (1)..(344): Homolog of NCBI NO: 18398032 NR Description: expressed protein
  misc_feature (1)..(344): Homolog of NCBI NO: 21618050 NR Description: unknown [Arabidopsis thaliana]
  misc_feature (362)..(552): Homolog of NCBI NO: 18398032 NR Description: expressed protein
  misc_feature (362)..(552): Homolog of NCBI NO: 21618050 NR Description: unknown [Arabidopsis thaliana]
  misc_feature (1)..(358): Homolog of NCBI NO: 13605698 NR Description: AT5g64940/MXK3_17 [Arabidopsis thaliana]
  misc_feature (1)..(344): Homolog of NCBI NO: 18398032 NR Description: expressed protein
  misc_feature (1)..(344): Homolog of NCBI NO: 21618050 NR Description: unknown [Arabidopsis thaliana]
  misc_feature (362)..(552): Homolog of NCBI NO: 18398032 NR Description: expressed protein
  misc_feature (362)..(552): Homolog of NCBI NO: 21618050 NR Description: unknown [Arabidopsis thaliana]
  misc_feature (1)..(344): Homolog of NCBI NO: 15983801 NR Description: At3g07700/F17A17.4 [Arabidopsis thaliana]
  misc_feature (362)..(552): Homolog of NCBI NO: 15983801 NR Description: At3g07700/F17A17.4 [Arabidopsis thaliana]
  misc_feature (362)..(552): Homolog of NCBI NO: 19424003 NR Description: unknown protein [Arabidopsis thaliana]
  misc_feature (362)..(552): Homolog of NCBI NO: 21618050 NR Description: unknown [Arabidopsis thaliana]
  misc_feature (362)..(552): Homolog of NCBI NO: 18398032 NR Description: expressed protein
  misc_feature (1)..(344): Homolog of NCBI NO: 21618050 NR Description: unknown [Arabidopsis thaliana]
  misc_feature (1)..(344): Homolog of NCBI NO: 18398032 NR Description: expressed protein
  misc_feature (1)..(358): Homolog of NCBI NO: 13605698 NR Description: AT5g64940/MXK3_17 [Arabidopsis thaliana]

SEQ ID NO: 45109 - DNA, 2089 bp, Arabidopsis thaliana
  misc_feature (1)..(2089): Ceres Seq. ID no. 12560303
  misc_feature: MA Experiment ID: 20000173 Result: Down-regulated in Transcription
  misc_feature: MA Experiment 20000173 PARAMETER Experiment Name: At_42deg_Heat_P Parameter: Age (day) Value: 14
  misc_feature: MA Experiment 20000173 PARAMETER Experiment Name: At_42deg_Heat_P Parameter: Organism Value: A. thaliana
  misc_feature: MA Experiment 20000173 PARAMETER Experiment Name: At_42deg_Heat_P Parameter: Plant Line Value: WS
  misc_feature: MA Experiment 20000173 PARAMETER Experiment Name: At_42deg_Heat_P Parameter: Temperature (deg C) Value: 42 vs. 22
  misc_feature: MA Experiment 20000173 PARAMETER Experiment Name: At_42deg_Heat_P Parameter: Timepoint (hr) Value: 6
  misc_feature: MA Experiment 20000173 PARAMETER Experiment Name: At_42deg_Heat_P Parameter: Tissue Value: Aerial
  misc_feature: MA Experiment ID: 20000182 Result: Up-regulated in Transcription
  misc_feature: MA Experiment 20000182 PARAMETER Experiment Name: At_2mM_SA_P Parameter: Age (day) Value: 14
  misc_feature: MA Experiment 20000182 PARAMETER Experiment Name: At_2mM_SA_P Parameter: Organism Value: A. thaliana
  misc_feature: MA Experiment 20000182 PARAMETER Experiment Name: At_2mM_SA_P Parameter: Plant Line Value: WS
  misc_feature: MA Experiment 20000182 PARAMETER Experiment Name: At_2mM_SA_P Parameter: Timepoint (hr) Value: 6
  misc_feature: MA Experiment 20000182 PARAMETER Experiment Name: At_2mM_SA_P Parameter: Tissue Value: Aerial
  misc_feature: MA Experiment 20000182 PARAMETER Experiment Name: At_2mM_SA_P Parameter: Treatment Value: 2mM SA vs. No Treatment
  misc_feature: MA Experiment ID: 20000264 Result: Up-regulated in Transcription
  misc_feature: MA Experiment 20000264 PARAMETER Experiment Name: At_Open_Flower_P Parameter: Age (day) Value: 21
  misc_feature: MA Experiment 20000264 PARAMETER Experiment Name: At_Open_Flower_P Parameter: Plant Line Value: WS
  misc_feature: MA Experiment 20000264 PARAMETER Experiment Name: At_Open_Flower_P Parameter: Tissue Value: Open Flower vs. Whole Plant
  misc_feature: MA Experiment ID: 20000286 Result: Up-regulated in Transcription
  misc_feature: MA Experiment 20000286 PARAMETER Experiment Name: At_Open_Flower_P Parameter: Age (day) Value: 21
  misc_feature: MA Experiment 20000286 PARAMETER Experiment Name: At_Open_Flower_P Parameter: Plant Line Value: WS
  misc_feature: MA Experiment 20000286 PARAMETER Experiment Name: At_Open_Flower_P Parameter: Tissue Value: Half Open vs. Whole Plant
  misc_feature: MA Experiment ID: 20000794 Result: Up-regulated in Transcription
  misc_feature: MA Experiment 20000794 PARAMETER Experiment Name: At_Petals_P Parameter: Age (day) Value: 23-25 days
  misc_feature: MA Experiment 20000794 PARAMETER Experiment Name: At_Petals_P Parameter: Plant Line Value: WS
  misc_feature: MA Experiment 20000794 PARAMETER Experiment Name: At_Petals_P Parameter: Tissue Value: Petals vs. Whole plant
  misc_feature: MA Experiment ID: 20001904 Result: Up-regulated in Transcription
  misc_feature: MA Experiment 20001904 PARAMETER Experiment Name: At_Drought_Reproduction_P Parameter: Age (day) Value: 37
  misc_feature: MA Experiment 20001904 PARAMETER Experiment Name: At_Drought_Reproduction_P Parameter: Organism Value: A. thaliana
  misc_feature: MA Experiment 20001904 PARAMETER Experiment Name: At_Drought_Reproduction_P Parameter: Plant Line Value: WS
  misc_feature: MA Experiment 20001904 PARAMETER Experiment Name: At_Drought_Reproduction_P Parameter: Timepoint (day) Value: 7
  misc_feature: MA Experiment 20001904 PARAMETER Experiment Name: At_Drought_Reproduction_P Parameter: Tissue Value: Rosettes
  misc_feature: MA Experiment 20001904 PARAMETER Experiment Name: At_Drought_Reproduction_P Parameter: Treatment Value: Drought vs. No Drought
  misc_feature: MA Experiment ID: 20001905 Result: Up-regulated in Transcription
  misc_feature: MA Experiment 20001905 PARAMETER Experiment Name: At_Drought_Reproduction_P Parameter: Age (day) Value: 40
  misc_feature: MA Experiment 20001905 PARAMETER Experiment Name: At_Drought_Reproduction_P Parameter: Organism Value: A. thaliana
  misc_feature: MA Experiment 20001905 PARAMETER Experiment Name: At_Drought_Reproduction_P Parameter: Plant Line Value: WS
  misc_feature: MA Experiment 20001905 PARAMETER Experiment Name: At_Drought_Reproduction_P Parameter: Timepoint (day) Value: 10
  misc_feature: MA Experiment 20001905 PARAMETER Experiment Name: At_Drought_Reproduction_P Parameter: Tissue Value: Rosettes
  misc_feature: MA Experiment 20001905 PARAMETER Experiment Name: At_Drought_Reproduction_P Parameter: Treatment Value: Drought vs. No Drought
accttctcattacacttgcatgtgcaacgacccgaccctatacccgacccggcccacattttaaacccattttagccttttctgtttccgccgccgactgatcggaataatcgatcaaagagagaacaactgaatcttcgccggatactacgccgatgacgattgcggcagcgccagcacgccagacagatcgatcagccactggtttcaaccctgcttacgtcacgacggcgaaggcggtgagcgttccggttcaagttcctccggcgactgtggtttccgaaggattaggtaaagatgcgttgatctcatggttcagaggagaattcgctgcggcaaacgcgataatcgacgcgatgtgctcgcatctaaggatagctgaagaagcggtatctggatcggagtacgaagctgtattcgcggcgatccatcgccgtcgtctgaattggatccctgttcttcagatgcagaagtatcattccatcgctgaagtagcgatcgagcttcagaaagtggcggctaagaaagcggaggatctgaaacagaagaaaacagaggaggaggcggaggaagatctgaaagaggtggtggcgacggaggaagaggaagtgaagaaagagtgttttaacggcgagaaagtaacggagaatgacgtaaacggagatgtagaagacgttgaagatgattcaccaactagtgatatcactgattcaggttctcatcaggatgttcaccaaactgttgttgcggatactgcacatcagattatatgccatagccatgaagattgtgatgcacgttcatgtgagatcaaacctatcaaaggtttccaagctaaagaacaagtcaaaggccacactgtgaatgttgtgaaaggactaaagctgtatgaagagttacttaaagaagatgagatatctaaattgttagactttgtggcagaactacgagaagctggcataaacgggaagcttgcaggtgagagctttatactgttcaacaaacagattaaagggaacaagagagagctgattcagcttggtgtccccatctttggtcatgtcaaggcggatgaaaactctaacgacaccaacaactctgttaacatcgagccaattccaccacttcttgagagtgtcattgatcactttgtcacatggagactcatcccagaatacaagagacctaacggctgtgtcatcaacttctttgaagagggtgaatactcacagcctttcctcaaaccacctcacttagaacaaccaatctccactcttgtcctctctgaatcaacaatggcctatggacgcattctctcaagtgacaacgaaggcaacttcagaggacctttgacactctctctcaaacaaggatctttgttggtgatgagagggaacagtgcagacatggcaagacatgtaatgtgtccatcacaaaacaaaagagtaagcatcacattctttcgtattcgacctgacacatatcataaccattcacaacccaacagtcctcgcaacgacggtgtcatgacaatgtggcaaccctaccaaatgacaccaactccattcctcaatggttatgatcattcaattgacatgatgccaaaacttggagtcctacgtcctccaatggtcatgatggcaccaccaccggttcaaccaatgatattaccaagtcccaatgtgatgggaaccggtggtggtaccggtgttttcttaccatgggcctctgttaatagctcaagaaaacatgtgaagcatttgcctccacgcgcgcagaagaagcgattacttccgcttcctcctgctgcttcttcttctccagctggaggatccacctctgagcctgtgatcactgtaggttaatcctattcgacttcttcagcaaaaagaaaaaaaaacttggaattggtctttttctaagcaatgctctgtttcttctctgttctgtttctttttttgttctttcaaattcagtttaggttaactcaggttttatagatagaattaagtttgttacatcccccgaggcatgtgttttctactttgtgtacgattttattatcagtatattctcaaaatgttacctt

SEQ ID NO: 45110 - protein, 569 aa, Arabidopsis thaliana
  peptide (1)..(569): Ceres Seq. ID no. 12560304
  misc_feature (343)..(439): Pfam Name: 2OG-Fe(II) oxygenase superfamily Pfam Description: 2OG-Fe(II) oxygenase superfamily
  misc_feature (20)..(132): Homolog of NCBI NO: 8778238 NR Description: F10B6.11 [Arabidopsis thaliana]
  misc_feature (162)..(309): Homolog of NCBI NO: 8778238 NR Description: F10B6.11 [Arabidopsis thaliana]
  misc_feature (318)..(560): Homolog of NCBI NO: 8778238 NR Description: F10B6.11 [Arabidopsis thaliana]
  misc_feature (20)..(132): Homolog of NCBI NO: 18394153 NR Description: expressed protein; protein id: At1g14710.1
  misc_feature (162)..(560): Homolog of NCBI NO: 18394153 NR Description: expressed protein; protein id: At1g14710.1
  misc_feature (26)..(156): Homolog of NCBI NO: 25409091 NR Description: hypothetical protein At2g48080 [imported] -
  misc_feature (205)..(472): Homolog of NCBI NO: 25409091 NR Description: hypothetical protein At2g48080 [imported] -
  misc_feature (26)..(156): Homolog of NCBI NO: 30690892 NR Description: oxidoreductase, 2OG-Fe(II) oxygenase family
  misc_feature (172)..(472): Homolog of NCBI NO: 30690892 NR Description: oxidoreductase, 2OG-Fe(II) oxygenase family
  misc_feature (1)..(569): Homolog of NCBI NO: 15236223 NR Description: hypothetical protein
MTIAAAPARQTDRSATGFNPAYVTTAKAVSVPVQVPPATVVSEGLGKDALISWFRGEFAAANAIIDAMCSHLRIAEEAVSGSEYEAVFAAIHRRRLNWIPVLQMQKYHSIAEVAIELQKVAAKKAEDLKQKKTEEEAEEDLKEVVATEEEEVKKECFNGEKVTENDVNGDVEDVEDDSPTSDITDSGSHQDVHQTVVADTAHQIICHSHEDCDARSCEIKPIKGFQAKEQVKGHTVNVVKGLKLYEELLKEDEISKLLDFVAELREAGINGKLAGESFILFNKQIKGNKRELIQLGVPIFGHVKADENSNDTNNSVNIEPIPPLLESVIDHFVTWRLIPEYKRPNGCVINFFEEGEYSQPFLKPPHLEQPISTLVLSESTMAYGRILSSDNEGNFRGPLTLSLKQGSLLVMRGNSADMARHVMCPSQNKRVSITFFRIRPDTYHNHSQPNSPRNDGVMTMWQPYQMTPTPFLNGYDHSIDMMPKLGVLRPPMVMMAPPPVQPMILPSPNVMGTGGGTGVFLPWASVNSSRKHVKHLPPRAQKKRLLPLPPAASSSPAGGSTSEPVITVG

SEQ ID NO: 45111 - protein, 502 aa, Arabidopsis thaliana
  peptide (1)..(502): Ceres Seq. ID no. 12560305
  misc_feature (276)..(372): Pfam Name: 2OG-Fe(II) oxygenase superfamily Pfam Description: 2OG-Fe(II) oxygenase superfamily
  misc_feature (1)..(65): Homolog of NCBI NO: 8778238 NR Description: F10B6.11 [Arabidopsis thaliana]
  misc_feature (95)..(242): Homolog of NCBI NO: 8778238 NR Description: F10B6.11 [Arabidopsis thaliana]
  misc_feature (251)..(493): Homolog of NCBI NO: 8778238 NR Description: F10B6.11 [Arabidopsis thaliana]
  misc_feature (1)..(65): Homolog of NCBI NO: 18394153 NR Description: expressed protein; protein id: At1g14710.1
  misc_feature (95)..(493): Homolog of NCBI NO: 18394153 NR Description: expressed protein; protein id: At1g14710.1
  misc_feature (1)..(89): Homolog of NCBI NO: 25409091 NR Description: hypothetical protein At2g48080 [imported] -
  misc_feature (138)..(405): Homolog of NCBI NO: 25409091 NR Description: hypothetical protein At2g48080 [imported] -
  misc_feature (1)..(89): Homolog of NCBI NO: 30690892 NR Description: oxidoreductase, 2OG-Fe(II) oxygenase family
  misc_feature (105)..(405): Homolog of NCBI NO: 30690892 NR Description: oxidoreductase, 2OG-Fe(II) oxygenase family
  misc_feature (1)..(502): Homolog of NCBI NO: 15236223 NR Description: hypothetical protein
MCSHLRIAEEAVSGSEYEAVFAAIHRRRLNWIPVLQMQKYHSIAEVAIELQKVAAKKAEDLKQKKTEEEAEEDLKEVVATEEEEVKKECFNGEKVTENDVNGDVEDVEDDSPTSDITDSGSHQDVHQTVVADTAHQIICHSHEDCDARSCEIKPIKGFQAKEQVKGHTVNVVKGLKLYEELLKEDEISKLLDFVAELREAGINGKLAGESFILFNKQIKGNKRELIQLGVPIFGHVKADENSNDTNNSVNIEPIPPLLESVIDHFVTWRLIPEYKRPNGCVINFFEEGEYSQPFLKPPHLEQPISTLVLSESTMAYGRILSSDNEGNFRGPLTLSLKQGSLLVMRGNSADMARHVMCPSQNKRVSITFFRIRPDTYHNHSQPNSPRNDGVMTMWQPYQMTPTPFLNGYDHSIDMMPKLGVLRPPMVMMAPPPVQPMILPSPNVMGTGGGTGVFLPWASVNSSRKHVKHLPPRAQKKRLLPLPPAASSSPAGGSTSEPVITVG

SEQ ID NO: 45112 - protein, 466 aa, Arabidopsis thaliana
  peptide (1)..(466): Ceres Seq. ID no. 12560306
  misc_feature (240)..(336): Pfam Name: 2OG-Fe(II) oxygenase superfamily Pfam Description: 2OG-Fe(II) oxygenase superfamily
  misc_feature (1)..(29): Homolog of NCBI NO: 8778238 NR Description: F10B6.11 [Arabidopsis thaliana]
  misc_feature (59)..(206): Homolog of NCBI NO: 8778238 NR Description: F10B6.11 [Arabidopsis thaliana]
  misc_feature (215)..(457): Homolog of NCBI NO: 8778238 NR Description: F10B6.11 [Arabidopsis thaliana]
  misc_feature (1)..(29): Homolog of NCBI NO: 18394153 NR Description: expressed protein; protein id: At1g14710.1
  misc_feature (59)..(457): Homolog of NCBI NO: 18394153 NR Description: expressed protein; protein id: At1g14710.1
  misc_feature (1)..(53): Homolog of NCBI NO: 25409091 NR Description: hypothetical protein At2g48080 [imported] -
  misc_feature (102)..(369): Homolog of NCBI NO: 25409091 NR Description: hypothetical protein At2g48080 [imported] -
  misc_feature (1)..(53): Homolog of NCBI NO: 30690892 NR Description: oxidoreductase, 2OG-Fe(II) oxygenase family
  misc_feature (69)..(369): Homolog of NCBI NO: 30690892 NR Description: oxidoreductase, 2OG-Fe(II) oxygenase family
  misc_feature (1)..(466): Homolog of NCBI NO: 15236223 NR Description: hypothetical protein
MQKYHSIAEVAIELQKVAAKKAEDLKQKKTEEEAEEDLKEVVATEEEEVKKECFNGEKVTENDVNGDVEDVEDDSPTSDITDSGSHQDVHQTVVADTAHQIICHSHEDCDARSCEIKPIKGFQAKEQVKGHTVNVVKGLKLYEELLKEDEISKLLDFVAELREAGINGKLAGESFILFNKQIKGNKRELIQLGVPIFGHVKADENSNDTNNSVNIEPIPPLLESVIDHFVTWRLIPEYKRPNGCVINFFEEGEYSQPFLKPPHLEQPISTLVLSESTMAYGRILSSDNEGNFRGPLTLSLKQGSLLVMRGNSADMARHVMCPSQNKRVSITFFRIRPDTYHNHSQPNSPRNDGVMTMWQPYQMTPTPFLNGYDHSIDMMPKLGVLRPPMVMMAPPPVQPMILPSPNVMGTGGGTGVFLPWASVNSSRKHVKHLPPRAQKKRLLPLPPAASSSPAGGSTSEPVITVG

SEQ ID NO: 45113 - DNA, 1800 bp, Arabidopsis thaliana
  misc_feature (1)..(1800): Ceres Seq. ID no. 13575871
  misc_feature: MA Experiment ID: 20000171 Result: Down-regulated in Transcription
  misc_feature: MA Experiment 20000171 PARAMETER Experiment Name: At_42deg_Heat_P Parameter: Age (day) Value: 14
  misc_feature: MA Experiment 20000171 PARAMETER Experiment Name: At_42deg_Heat_P Parameter: Organism Value: A. thaliana
  misc_feature: MA Experiment 20000171 PARAMETER Experiment Name: At_42deg_Heat_P Parameter: Plant Line Value: WS
  misc_feature: MA Experiment 20000171 PARAMETER Experiment Name: At_42deg_Heat_P Parameter: Temperature (deg C) Value: 42 vs. 22
  misc_feature: MA Experiment 20000171 PARAMETER Experiment Name: At_42deg_Heat_P Parameter: Timepoint (hr) Value: 1
  misc_feature: MA Experiment 20000171 PARAMETER Experiment Name: At_42deg_Heat_P Parameter: Tissue Value: Aerial
  misc_feature: MA Experiment ID: 20000173 Result: Down-regulated in Transcription
  misc_feature: MA Experiment 20000173 PARAMETER Experiment Name: At_42deg_Heat_P Parameter: Age (day) Value: 14
  misc_feature: MA Experiment 20000173 PARAMETER Experiment Name: At_42deg_Heat_P Parameter: Organism Value: A. thaliana
  misc_feature: MA Experiment 20000173 PARAMETER Experiment Name: At_42deg_Heat_P Parameter: Plant Line Value: WS
  misc_feature: MA Experiment 20000173 PARAMETER Experiment Name: At_42deg_Heat_P Parameter: Temperature (deg C) Value: 42 vs. 22
  misc_feature: MA Experiment 20000173 PARAMETER Experiment Name: At_42deg_Heat_P Parameter: Timepoint (hr) Value: 6
  misc_feature: MA Experiment 20000173 PARAMETER Experiment Name: At_42deg_Heat_P Parameter: Tissue Value: Aerial
  misc_feature: MA Experiment ID: 20000182 Result: Up-regulated in Transcription
  misc_feature: MA Experiment 20000182 PARAMETER Experiment Name: At_2mM_SA_P Parameter: Age (day) Value: 14
  misc_feature: MA Experiment 20000182 PARAMETER Experiment Name: At_2mM_SA_P Parameter: Organism Value: A. thaliana
  misc_feature: MA Experiment 20000182 PARAMETER Experiment Name: At_2mM_SA_P Parameter: Plant Line Value: WS
  misc_feature: MA Experiment 20000182 PARAMETER Experiment Name: At_2mM_SA_P Parameter: Timepoint (hr) Value: 6
  misc_feature: MA Experiment 20000182 PARAMETER Experiment Name: At_2mM_SA_P Parameter: Tissue Value: Aerial
  misc_feature: MA Experiment 20000182 PARAMETER Experiment Name: At_2mM_SA_P Parameter: Treatment Value: 2mM SA vs. No Treatment
  misc_feature: MA Experiment ID: 20001560 Result: Down-regulated in Transcription
  misc_feature: MA Experiment 20001560 PARAMETER Experiment Name: At_Drought_Soil_Dry_P Parameter: Age (day) Value: 28
  misc_feature: MA Experiment 20001560 PARAMETER Experiment Name: At_Drought_Soil_Dry_P Parameter: Organism Value: A. thaliana
  misc_feature: MA Experiment 20001560 PARAMETER Experiment Name: At_Drought_Soil_Dry_P Parameter: Plant Line Value: WS
  misc_feature: MA Experiment 20001560 PARAMETER Experiment Name: At_Drought_Soil_Dry_P Parameter: Post Timepoint (hr) Value: None
  misc_feature: MA Experiment 20001560 PARAMETER Experiment Name: At_Drought_Soil_Dry_P Parameter: Post-Treatment Value: None
  misc_feature: MA Experiment 20001560 PARAMETER Experiment Name: At_Drought_Soil_Dry_P Parameter: Timepoint (day) Value: 14
  misc_feature: MA Experiment 20001560 PARAMETER Experiment Name: At_Drought_Soil_Dry_P Parameter: Treatment Value: Drought vs. No Drought
aaaaaaaggaaggaaaaacaaaaaatcaaaagctgagaaagtaaatgggaaacgacgactgagactcttcttctccttctccttcttcttctacttatttcatcgtttcatttcttaggtttctgatttcatcacaacctctggatttgatttttgattcggaggtatataaaaaaatgtttagtggggtttgcgattcgatgaactagggtttgtaatttcactatcttcttcttctcttcgatcgtttactcatcgggtgagaaggaagcgtctttcatgtgttcttccgtgtaatcgactgttttattgggcttagtagctctagtttggtcaaagaattcgtaacaagtgaatcttagattgggaagatgctagaaggagcaaagttcaacgtgcttgctgttgggaatcatcacaacaacgacaacaattactatgcttttacgcaagagttttatcaaaaacttaatgaaggttcaaacatgtccatggagagtatgcagacgagtaacgctggaggatctgtctcaatgtctgtggataacagtagcgttggttccagcgatgctcttattggccacccgggtttgaagcctgtacgccattactcactctcggttggtcaaagcgtgtttcgcccgggaagagttacccatgcgttgaatgatgatgctttggctcaagcactgatggataccaggtatccaactgaagggctgacgaactatgatgagtggacgattgatctgaggaaactcaacatgggtcctgcctttgctcaaggggcttttggtaaattatacaaagggacatacaacggtgaagatgtagctatcaaaatacttgagcggccagagaacagcccagaaaaggcacagttcatggaacaacagtttcagcaagaggtgtctatgcttgctaatttgaagcacccaaacattgtgaggttcattggtgcatgtcgcaagccaatggtgtggtgtatagtgactgaatacgccaaaggaggttcagtgaggcagtttttgactaggagacagaaccgagccgtccctttgaagttagctgttaaacaggctttggatgttgctaggggtatggcttatgtccatggacgcaacttcatacacagagatctcaagtcagataaccttctcatctcagcagataagtccatcaagattgcagattttggtgttgcaagaattgaagttcaaaccgaaggaatgacaccagaaactggaacttacagatggatggctccagagatgatacagcatagagcctacaatcaaaaagtggatgtgtatagtttcgggattgtgctgtgggagttaatcacaggactcttaccgttccagaacatgacagctgtacaggcagcgtttgcggttgtaaacagaggagtgcgtccaacagtcccaaacgattgtctcccggtgctgagtgacattatgactcgatgttgggatgctaatccagaagtccgtccatgttttgtggaggttgtgaagctgcttgaagctgcagaaacagagataatgacgacagcgagaaaagcccgtttcagatgttgcttgagccagccgatgacgattgactaaataatccccccctcaagaaaataacaaagaaagaaagaagaagaagaagatataagaaaaagggctttagatataagtttgtgtgtcagttatgtgtctctgtgtgtgtttgtgtatctataaaaatatgaaatgtattttgttttctcaagataggagaagtaagtaaccccaccaccaccattttagactt

SEQ ID NO: 45114 - protein, 411 aa, Arabidopsis thaliana
  peptide (1)..(411): Ceres Seq. ID no. 13575872
  misc_feature (55)..(411): Homolog of NCBI NO: 29367355 NR Description: serine/thronine protein kinase-like protein
  misc_feature (13)..(411): Homolog of NCBI NO: 28864539 NR Description: serine/threonine protein kinase
  misc_feature (8)..(411): Homolog of NCBI NO: 27085282 NR Description: serine/threonine protein kinase
  misc_feature (1)..(411): Homolog of NCBI NO: 14571547 NR Description: serine/threonine protein kinase [Triticum
  misc_feature (1)..(411): Homolog of NCBI NO: 27085280 NR Description: serine/threonine protein kinase
  misc_feature (1)..(411): Homolog of NCBI NO: 13124865 NR Description: serine/threonine/tyrosine kinase [Arachis
  misc_feature (1)..(411): Homolog of NCBI NO: 27085278 NR Description: serine/threonine protein kinase
  misc_feature (1)..(411): Homolog of NCBI NO: 15235845 NR Description: protein kinase family [Arabidopsis thaliana]
  misc_feature (1)..(411): Homolog of NCBI NO: 25287646 NR Description: probable protein kinase [imported] - Arabidopsis
  misc_feature (1)..(411): Homolog of NCBI NO: 18400528 NR Description: serine/threonine/tyrosine kinase, putative
MLEGAKFNVLAVGNHHNNDNNYYAFTQEFYQKLNEGSNMSMESMQTSNAGGSVSMSVDNSSVGSSDALIGHPGLKPVRHYSLSVGQSVFRPGRVTHALNDDALAQALMDTRYPTEGLTNYDEWTIDLRKLNMGPAFAQGAFGKLYKGTYNGEDVAIKILERPENSPEKAQFMEQQFQQEVSMLANLKHPNIVRFIGACRKPMVWCIVTEYAKGGSVRQFLTRRQNRAVPLKLAVKQALDVARGMAYVHGRNFIHRDLKSDNLLISADKSIKIADFGVARIEVQTEGMTPETGTYRWMAPEMIQHRAYNQKVDVYSFGIVLWELITGLLPFQNMTAVQAAFAVVNRGVRPTVPNDCLPVLSDIMTRCWDANPEVRPCFVEVVKLLEAAETEIMTTARKARFRCCLSQPMTID

SEQ ID NO: 45115 - protein, 373 aa, Arabidopsis thaliana
  peptide (1)..(373): Ceres Seq. ID no. 13575873
  misc_feature (17)..(373): Homolog of NCBI NO: 29367355 NR Description: serine/thronine protein kinase-like protein
  misc_feature (1)..(373): Homolog of NCBI NO: 28864539 NR Description: serine/threonine protein kinase
  misc_feature (1)..(373): Homolog of NCBI NO: 27085282 NR Description: serine/threonine protein kinase
  misc_feature (1)..(373): Homolog of NCBI NO: 14571547 NR Description: serine/threonine protein kinase [Triticum
  misc_feature (1)..(373): Homolog of NCBI NO: 27085280 NR Description: serine/threonine protein kinase
  misc_feature (1)..(373): Homolog of NCBI NO: 13124865 NR Description: serine/threonine/tyrosine kinase [Arachis
  misc_feature (1)..(373): Homolog of NCBI NO: 27085278 NR Description: serine/threonine protein kinase
  misc_feature (1)..(373): Homolog of NCBI NO: 15235845 NR Description: protein kinase family [Arabidopsis thaliana]
  misc_feature (1)..(373): Homolog of NCBI NO: 25287646 NR Description: probable protein kinase [imported] - Arabidopsis
  misc_feature (1)..(373): Homolog of NCBI NO: 18400528 NR Description: serine/threonine/tyrosine kinase, putative
MSMESMQTSNAGGSVSMSVDNSSVGSSDALIGHPGLKPVRHYSLSVGQSVFRPGRVTHALNDDALAQALMDTRYPTEGLTNYDEWTIDLRKLNMGPAFAQGAFGKLYKGTYNGEDVAIKILERPENSPEKAQFMEQQFQQEVSMLANLKHPNIVRFIGACRKPMVWCIVTEYAKGGSVRQFLTRRQNRAVPLKLAVKQALDVARGMAYVHGRNFIHRDLKSDNLLISADKSIKIADFGVARIEVQTEGMTPETGTYRWMAPEMIQHRAYNQKVDVYSFGIVLWELITGLLPFQNMTAVQAAFAVVNRGVRPTVPNDCLPVLSDIMTRCWDANPEVRPCFVEVVKLLEAAETEIMTTARKARFRCCLSQPMTID

SEQ ID NO: 45116 - protein, 371 aa, Arabidopsis thaliana
  peptide (1)..(371): Ceres Seq. ID no. 13575874
  misc_feature (15)..(371): Homolog of NCBI NO: 29367355 NR Description: serine/thronine protein kinase-like protein
  misc_feature (1)..(371): Homolog of NCBI NO: 28864539 NR Description: serine/threonine protein kinase
  misc_feature (1)..(371): Homolog of NCBI NO: 27085282 NR Description: serine/threonine protein kinase
  misc_feature (1)..(371): Homolog of NCBI NO: 14571547 NR Description: serine/threonine protein kinase [Triticum
  misc_feature (1)..(371): Homolog of NCBI NO: 27085280 NR Description: serine/threonine protein kinase
  misc_feature (1)..(371): Homolog of NCBI NO: 13124865 NR Description: serine/threonine/tyrosine kinase [Arachis
  misc_feature (1)..(371): Homolog of NCBI NO: 27085278 NR Description: serine/threonine protein kinase
  misc_feature (1)..(371): Homolog of NCBI NO: 15235845 NR Description: protein kinase family [Arabidopsis thaliana]
  misc_feature (1)..(371): Homolog of NCBI NO: 25287646 NR Description: probable protein kinase [imported] - Arabidopsis
  misc_feature (1)..(371): Homolog of NCBI NO: 18400528 NR Description: serine/threonine/tyrosine kinase, putative
MESMQTSNAGGSVSMSVDNSSVGSSDALIGHPGLKPVRHYSLSVGQSVFRPGRVTHALNDDALAQALMDTRYPTEGLTNYDEWTIDLRKLNMGPAFAQGAFGKLYKGTYNGEDVAIKILERPENSPEKAQFMEQQFQQEVSMLANLKHPNIVRFIGACRKPMVWCIVTEYAKGGSVRQFLTRRQNRAVPLKLAVKQALDVARGMAYVHGRNFIHRDLKSDNLLISADKSIKIADFGVARIEVQTEGMTPETGTYRWMAPEMIQHRAYNQKVDVYSFGIVLWELITGLLPFQNMTAVQAAFAVVNRGVRPTVPNDCLPVLSDIMTRCWDANPEVRPCFVEVVKLLEAAETEIMTTARKARFRCCLSQPMTID

SEQ ID NO: 45117 - DNA, 3225 bp, Arabidopsis thaliana
  misc_feature (1)..(3225): Ceres Seq. ID no. 12560311
  misc_feature: MA Experiment ID: 20000113 Result: Down-regulated in Transcription
  misc_feature: MA Experiment 20000113 PARAMETER Experiment Name: At_42deg_Heat_cDNA_P Parameter: Temperature (deg C) Value: 42 vs. 22
  misc_feature: MA Experiment 20000113 PARAMETER Experiment Name: At_42deg_Heat_cDNA_P Parameter: Timepoint (hr) Value: 8
  misc_feature: MA Experiment 20000113 PARAMETER Experiment Name: At_42deg_Heat_cDNA_P Parameter: Tissue Value: Aerial
gacgaagacacacacagacaaacaaatcctagcttagcaccgtcgcgaccgaattcgaaattccggtaacccaatcgccgggaaaatccaccgctcgtggctaccgatattgattctaatcggatctagcggctccctttcttcgtccagatctcgtacttcattcgacctcgattcgctgtgcaagttacgatggaggcgatcgatgagttgtctcagctttcggattcgatgagacaagcggcgtctctgctcgctgacgaagatcccgatgagacctcttcttctagacggccagctacttctctcaacgtcgttgccctagggaatgtgggagctggaaagtctgcagttctaaatagcctaattgggcatccagttctgccgacgggtgagaatggtgcgacacgggctcctattatcattgatttgagtagagaagaatcactgagcagcaaggcaataatcttgcaaattgacaataaaaatcaacaagtttctgcaagtgcactaaggcattcactacaagataggcttagcaaaggagcttcaggaaggggtcgtgatgaaatatacctaaaacttcgtaccagcacagctccaccactgaaattgattgatttgcctggactggaccagcgaattgtggacgattctatgattggtgaacatgcacagcacaacgatgctatattgctggttgttgtgcctgctagccaggcatctgaaatttcgtcatctcgagccctgaagatcgcaaaggagtatgatccagagagtactaggacagtaggaattatcagcaaaattgatcaggcagcagagaacccaaagtcccttgcagcagttcaggcgcttctttcaaatcaaggacctccaaaaacaactgatattccatgggttgcacttattggccaatctgtctcaattgcatcagcgcagtctggaggcagtgagaactctttagaaactgcttggcgtgctgagagtgaaagccttaaatccattttgactggtgctccacaaagcaaacttggcagaattgccctggtcgacactcttgctagccagatccgtagcagaatgaagctcaggcttccgaacatcttaactggactccagggtaagtctcaaatagtgcaggacgaattagcgaggcttggtgagcaattggttagcagtgctgaaggcacaagggcaatagctttggagctttgtcgtgagtttgaagacaaatttcttctccatttagctggtggtgaaggaagtggttggaaagttgttgcaagttttgaaggcaatttccccaatcgtatcaaaaagcttccgttggatagacattttgacttgaacaatgtcaaaaggatcgtgttggaggctgatggttatcaaccttatctcatatctccagagaaagggttgagatcgttaataaaaaccgttcttgagttggctaaagacccagcacgactatgtgttgatgaggttcaccgagtgcttgttgacatagtttcagcttccgcgaatgccacacctggtcttgggagatatcctccttttaagagagaggttgtagctatagcaagtgccgcacttgatggattcaagaatgaagctaagaagatggtagttgcattagttgatatggagcgtgcatttgtaccacctcagcacttcatccgcctcgtacaaagaagaatggaaaggcagcgtcgtgaggaggagctaaaaggtcgttcctctaaaaagggacaagatgcagagcagtctctcttaaacagggctactagtcctcagccagatgggccatcatcaactggtggtagcttaaaatctttgagagacaaattaatgccacaagataaagataaagataaagaaaaagagactccggaggtgtctggtctgaagactgctggacctgagggagagataactgcagggtacttaatgaagaaaagtgcaaagacaaatgggtggagtaggcgatggtttgttctgaatgaaaaaactggaaagcttggttatacaaaaaaacaagaagaaagaaacttccgcggcactgtaactttggaggaatgcagtatcgaagaaatttctgatgatgaaggagaaaaatcaaagagctcgaaagataagaaatcaaatggaccggattcaaaaggaccaggccttgtatttaagataacttgcagggttccatataagactgtacttaaagctcacaatgcgttggttctcaaggccgagagcatggttgataagaatgaatggataaataagctgcaaaaggttatccaggcccgaggaggccaagtgggtagcgcttccatgagacaaagtctttcagaaggctcacttgataagatggtaaggaaaccggtcgacccggaagaggaattacggtggatgtcccaagaagtacggggttatgttgaagctgttctcaacagtctagctgccaatgttccaaaggctgttgttctctgtcaagtggagaaatccaaggaagacatgctgaatcagctatacagctctatcagcgcaattggtaatgagaggattgaatcattgattcaagaggatcagaacgtcaaaagacgaagagaccgttaccagaaacagtcctctcttctctcaaagctcactaggcagcttagcattcacgataaccgagcagctgctgcttcaagctggtctgacaatagtggcactgaaagcagcccgagaaccaatggagggtcatcaggagaggactggatgaatgcgtttaacgcagctgctagtggacctgactcattgaagagatatggatctggcggccatagccgtcgttacagtgatccagcacagaatggtgaggattcttctggatctggtggcagctcccgtcgcaccacaccaaaccggctcccaccagctccgccacagtctggatcatcttacaggtattagaaacctgtttggtttccaggattgttattgaacgaaccataaaacacattcttttctttctttttctgccctttcggattggtccctgtttctgggactatttttcttatgtctcactagtttaaaaaaaaaaaaaccagaatgataatatgatgatgatgtacttgcgtgtgtttgtagatagatatttgttagagagacacatatatatgagtttggtcttcatattggtcatatgctttatattaaagaaaatgttacttttctttt

SEQ ID NO: 45118 - protein, 920 aa, Arabidopsis thaliana
  peptide (1)..(920): Ceres Seq. ID no. 12560312
  misc_feature (254)..(512): Pfam Name: Dynamin central region Pfam Description: Dynamin central region
  misc_feature (254)..(512): Pfam Name: Dynamin central region Pfam Description: Dynamin central region
  misc_feature (4)..(498): Homolog of NCBI NO: 30689760 NR Description: phragmoplastin -related [Arabidopsis thaliana]
  misc_feature (681)..(817): Homolog of NCBI NO: 30689765 NR Description: phragmoplastin -related [Arabidopsis thaliana]
  misc_feature (4)..(498): Homolog of NCBI NO: 30689765 NR Description: phragmoplastin -related [Arabidopsis thaliana]
  misc_feature (681)..(817): Homolog of NCBI NO: 30689768 NR Description: phragmoplastin -related [Arabidopsis thaliana]
  misc_feature (4)..(498): Homolog of NCBI NO: 30689768 NR Description: phragmoplastin -related [Arabidopsis thaliana]
  misc_feature (4)..(498): Homolog of NCBI NO: 30689760 NR Description: phragmoplastin -related [Arabidopsis thaliana]
  misc_feature (4)..(498): Homolog of NCBI NO: 30689765 NR Description: phragmoplastin -related [Arabidopsis thaliana]
  misc_feature (4)..(498): Homolog of NCBI NO: 30689768 NR Description: phragmoplastin -related [Arabidopsis thaliana]
  misc_feature (1)..(549): Homolog of NCBI NO: 38175440 NR Description: putative dynamin homolog [Oryza sativa (japonica
  misc_feature (527)..(889): Homolog of NCBI NO: 38175440 NR Description: putative dynamin homolog [Oryza sativa (japonica
  misc_feature (1)..(574): Homolog of NCBI NO: 34904996 NR Description: P0456B03.5 [Oryza sativa (japonica
  misc_feature (602)..(788): Homolog of NCBI NO: 34904996 NR Description: P0456B03.5 [Oryza sativa (japonica
  misc_feature (854)..(915): Homolog of NCBI NO: 34904996 NR Description: P0456B03.5 [Oryza sativa (japonica
  misc_feature (681)..(817): Homolog of NCBI NO: 30689768 NR Description: phragmoplastin -related [Arabidopsis thaliana]
  misc_feature (681)..(817): Homolog of NCBI NO: 30689765 NR Description: phragmoplastin -related [Arabidopsis thaliana]
  misc_feature (854)..(915): Homolog of NCBI NO: 34904996 NR Description: P0456B03.5 [Oryza sativa (japonica
  misc_feature (602)..(788): Homolog of NCBI NO: 34904996 NR Description: P0456B03.5 [Oryza sativa (japonica
  misc_feature (1)..(574): Homolog of NCBI NO: 34904996 NR Description: P0456B03.5 [Oryza sativa (japonica
  misc_feature (527)..(889): Homolog of NCBI NO: 38175440 NR Description: putative dynamin homolog [Oryza sativa (japonica
  misc_feature (1)..(549): Homolog of NCBI NO: 38175440 NR Description: putative dynamin homolog [Oryza sativa (japonica
MEAIDELSQLSDSMRQAASLLADEDPDETSSSRRPATSLNVVALGNVGAGKSAVLNSLIGHPVLPTGENGATRAPIIIDLSREESLSSKAIILQIDNKNQQVSASALRHSLQDRLSKGASGRGRDEIYLKLRTSTAPPLKLIDLPGLDQRIVDDSMIGEHAQHNDAILLVVVPASQASEISSSRALKIAKEYDPESTRTVGIISKIDQAAENPKSLAAVQALLSNQGPPKTTDIPWVALIGQSVSIASAQSGGSENSLETAWRAESESLKSILTGAPQSKLGRIALVDTLASQIRSRMKLRLPNILTGLQGKSQIVQDELARLGEQLVSSAEGTRAIALELCREFEDKFLLHLAGGEGSGWKVVASFEGNFPNRIKKLPLDRHFDLNNVKRIVLEADGYQPYLISPEKGLRSLIKTVLELAKDPARLCVDEVHRVLVDIVSASANATPGLGRYPPFKREVVAIASAALDGFKNEAKKMVVALVDMERAFVPPQHFIRLVQRRMERQRREEELKGRSSKKGQDAEQSLLNRATSPQPDGPSSTGGSLKSLRDKLMPQDKDKDKEKETPEVSGLKTAGPEGEITAGYLMKKSAKTNGWSRRWFVLNEKTGKLGYTKKQEERNFRGTVTLEECSIEEISDDEGEKSKSSKDKKSNGPDSKGPGLVFKITCRVPYKTVLKAHNALVLKAESMVDKNEWINKLQKVIQARGGQVGSASMRQSLSEGSLDKMVRKPVDPEEELRWMSQEVRGYVEAVLNSLAANVPKAVVLCQVEKSKEDMLNQLYSSISAIGNERIESLIQEDQNVKRRRDRYQKQSSLLSKLTRQLSIHDNRAAAASSWSDNSGTESSPRTNGGSSGEDWMNAFNAAASGPDSLKRYGSGGHSRRYSDPAQNGEDSSGSGGSSRRTTPNRLPPAPPQSGSSYRY

SEQ ID NO: 45119 - protein, 907 aa, Arabidopsis thaliana
  peptide (1)..(907): Ceres Seq. ID no. 12560313
  misc_feature (241)..(499): Pfam Name: Dynamin central region Pfam Description: Dynamin central region
  misc_feature (241)..(499): Pfam Name: Dynamin central region Pfam Description: Dynamin central region
  misc_feature (1)..(485): Homolog of NCBI NO: 30689760 NR Description: phragmoplastin -related [Arabidopsis thaliana]
  misc_feature (668)..(804): Homolog of NCBI NO: 30689765 NR Description: phragmoplastin -related [Arabidopsis thaliana]
  misc_feature (1)..(485): Homolog of NCBI NO: 30689765 NR Description: phragmoplastin -related [Arabidopsis thaliana]
  misc_feature (668)..(804): Homolog of NCBI NO: 30689768 NR Description: phragmoplastin -related [Arabidopsis thaliana]
  misc_feature (1)..(485): Homolog of NCBI NO: 30689768 NR Description: phragmoplastin -related [Arabidopsis thaliana]
  misc_feature (1)..(485): Homolog of NCBI NO: 30689760 NR Description: phragmoplastin -related [Arabidopsis thaliana]
  misc_feature (1)..(485): Homolog of NCBI NO: 30689765 NR Description: phragmoplastin -related [Arabidopsis thaliana]
  misc_feature (1)..(485): Homolog of NCBI NO: 30689768 NR Description: phragmoplastin -related [Arabidopsis thaliana]
  misc_feature (1)..(536): Homolog of NCBI NO: 38175440 NR Description: putative dynamin homolog [Oryza sativa (japonica
  misc_feature (514)..(876): Homolog of NCBI NO: 38175440 NR Description: putative dynamin homolog [Oryza sativa (japonica
  misc_feature (1)..(561): Homolog of NCBI NO: 34904996 NR Description: P0456B03.5 [Oryza sativa (japonica
  misc_feature (589)..(775): Homolog of NCBI NO: 34904996 NR Description: P0456B03.5 [Oryza sativa (japonica
  misc_feature (841)..(902): Homolog of NCBI NO: 34904996 NR Description: P0456B03.5 [Oryza sativa (japonica
  misc_feature (668)..(804): Homolog of NCBI NO: 30689768 NR Description: phragmoplastin -related [Arabidopsis thaliana]
  misc_feature (668)..(804): Homolog of NCBI NO: 30689765 NR Description: phragmoplastin -related [Arabidopsis thaliana]
  misc_feature (841)..(902): Homolog of NCBI NO: 34904996 NR Description: P0456B03.5 [Oryza sativa (japonica
  misc_feature (589)..(775): Homolog of NCBI NO: 34904996 NR Description: P0456B03.5 [Oryza sativa (japonica
  misc_feature (1)..(561): Homolog of NCBI NO: 34904996 NR Description: P0456B03.5 [Oryza sativa (japonica
  misc_feature (514)..(876): Homolog of NCBI NO: 38175440 NR Description: putative dynamin homolog [Oryza sativa (japonica
  misc_feature (1)..(536): Homolog of NCBI NO: 38175440 NR Description: putative dynamin homolog [Oryza sativa (japonica
MRQAASLLADEDPDETSSSRRPATSLNVVALGNVGAGKSAVLNSLIGHPVLPTGENGATRAPIIIDLSREESLSSKAIILQIDNKNQQVSASALRHSLQDRLSKGASGRGRDEIYLKLRTSTAPPLKLIDLPGLDQRIVDDSMIGEHAQHNDAILLVVVPASQASEISSSRALKIAKEYDPESTRTVGIISKIDQAAENPKSLAAVQALLSNQGPPKTTDIPWVALIGQSVSIASAQSGGSENSLETAWRAESESLKSILTGAPQSKLGRIALVDTLASQIRSRMKLRLPNILTGLQGKSQIVQDELARLGEQLVSSAEGTRAIALELCREFEDKFLLHLAGGEGSGWKVVASFEGNFPNRIKKLPLDRHFDLNNVKRIVLEADGYQPYLISPEKGLRSLIKTVLELAKDPARLCVDEVHRVLVDIVSASANATPGLGRYPPFKREVVAIASAALDGFKNEAKKMVVALVDMERAFVPPQHFIRLVQRRMERQRREEELKGRSSKKGQDAEQSLLNRATSPQPDGPSSTGGSLKSLRDKLMPQDKDKDKEKETPEVSGLKTAGPEGEITAGYLMKKSAKTNGWSRRWFVLNEKTGKLGYTKKQEERNFRGTVTLEECSIEEISDDEGEKSKSSKDKKSNGPDSKGPGLVFKITCRVPYKTVLKAHNALVLKAESMVDKNEWINKLQKVIQARGGQVGSASMRQSLSEGSLDKMVRKPVDPEEELRWMSQEVRGYVEAVLNSLAANVPKAVVLCQVEKSKEDMLNQLYSSISAIGNERIESLIQEDQNVKRRRDRYQKQSSLLSKLTRQLSIHDNRAAAASSWSDNSGTESSPRTNGGSSGEDWMNAFNAAASGPDSLKRYGSGGHSRRYSDPAQNGEDSSGSGGSSRRTTPNRLPPAPPQSGSSYRY

SEQ ID NO: 45120 - protein, 765 aa, Arabidopsis thaliana
  peptide (1)..(765): Ceres Seq. ID no. 12560314
  misc_feature (99)..(357): Pfam Name: Dynamin central region Pfam Description: Dynamin central region
  misc_feature (99)..(357): Pfam Name: Dynamin central region Pfam Description: Dynamin central region
  misc_feature (1)..(343): Homolog of NCBI NO: 30689760 NR Description: phragmoplastin -related [Arabidopsis thaliana]
  misc_feature (526)..(662): Homolog of NCBI NO: 30689765 NR Description: phragmoplastin -related [Arabidopsis thaliana]
  misc_feature (1)..(343): Homolog of NCBI NO: 30689765 NR Description: phragmoplastin -related [Arabidopsis thaliana]
  misc_feature (526)..(662): Homolog of NCBI NO: 30689768 NR Description: phragmoplastin -related [Arabidopsis thaliana]
  misc_feature (1)..(343): Homolog of NCBI NO: 30689768 NR Description: phragmoplastin -related [Arabidopsis thaliana]
  misc_feature (1)..(343): Homolog of NCBI NO: 30689760 NR Description: phragmoplastin -related [Arabidopsis thaliana]
  misc_feature (1)..(343): Homolog of NCBI NO: 30689765 NR Description: phragmoplastin -related [Arabidopsis thaliana]
  misc_feature (1)..(343): Homolog of NCBI NO: 30689768 NR Description: phragmoplastin -related [Arabidopsis thaliana]
  misc_feature (1)..(394): Homolog of NCBI NO: 38175440 NR Description: putative dynamin homolog [Oryza sativa (japonica
  misc_feature (372)..(734): Homolog of NCBI NO: 38175440 NR Description: putative dynamin homolog [Oryza sativa (japonica
  misc_feature (1)..(419): Homolog of NCBI NO: 34904996 NR Description: P0456B03.5 [Oryza sativa (japonica
  misc_feature (447)..(633): Homolog of NCBI NO: 34904996 NR Description: P0456B03.5 [Oryza sativa (japonica
  misc_feature (699)..(760): Homolog of NCBI NO: 34904996 NR Description: P0456B03.5 [Oryza sativa (japonica
  misc_feature (526)..(662): Homolog of NCBI NO: 30689768 NR Description: phragmoplastin -related [Arabidopsis thaliana]
  misc_feature (526)..(662): Homolog of NCBI NO: 30689765 NR Description: phragmoplastin -related [Arabidopsis thaliana]
  misc_feature (699)..(760): Homolog of NCBI NO: 34904996 NR Description: P0456B03.5 [Oryza sativa (japonica
  misc_feature (447)..(633): Homolog of NCBI NO: 34904996 NR Description: P0456B03.5 [Oryza sativa (japonica
  misc_feature (1)..(419): Homolog of NCBI NO: 34904996 NR Description: P0456B03.5 [Oryza sativa (japonica
  misc_feature (372)..(734): Homolog of NCBI NO: 38175440 NR Description: putative dynamin homolog [Oryza sativa (japonica
  misc_feature (1)..(394): Homolog of NCBI NO: 38175440 NR Description: putative dynamin homolog [Oryza sativa (japonica
MIGEHAQHNDAILLVVVPASQASEISSSRALKIAKEYDPESTRTVGIISKIDQAAENPKSLAAVQALLSNQGPPKTTDIPWVALIGQSVSIASAQSGGSENSLETAWRAESESLKSILTGAPQSKLGRIALVDTLASQIRSRMKLRLPNILTGLQGKSQIVQDELARLGEQLVSSAEGTRAIALELCREFEDKFLLHLAGGEGSGWKVVASFEGNFPNRIKKLPLDRHFDLNNVKRIVLEADGYQPYLISPEKGLRSLIKTVLELAKDPARLCVDEVHRVLVDIVSASANATPGLGRYPPFKREVVAIASAALDGFKNEAKKMVVALVDMERAFVPPQHFIRLVQRRMERQRREEELKGRSSKKGQDAEQSLLNRATSPQPDGPSSTGGSLKSLRDKLMPQDKDKDKEKETPEVSGLKTAGPEGEITAGYLMKKSAKTNGWSRRWFVLNEKTGKLGYTKKQEERNFRGTVTLEECSIEEISDDEGEKSKSSKDKKSNGPDSKGPGLVFKITCRVPYKTVLKAHNALVLKAESMVDKNEWINKLQKVIQARGGQVGSASMRQSLSEGSLDKMVRKPVDPEEELRWMSQEVRGYVEAVLNSLAANVPKAVVLCQVEKSKEDMLNQLYSSISAIGNERIESLIQEDQNVKRRRDRYQKQSSLLSKLTRQLSIHDNRAAAASSWSDNSGTESSPRTNGGSSGEDWMNAFNAAASGPDSLKRYGSGGHSRRYSDPAQNGEDSSGSGGSSRRTTPNRLPPAPPQSGSSYRY

SEQ ID NO: 45121 - DNA, 1365 bp, Arabidopsis thaliana
  misc_feature (1)..(1365): Ceres Seq. ID no. 13575879
  misc_feature: MA Experiment ID: 108434 Result: Down-regulated in Transcription
  misc_feature: MA Experiment 108434 PARAMETER Experiment Name: At_Root_Tips_cDNA_P Parameter: Tissue Value: Root Tips
  misc_feature: MA Experiment ID: 108461 Result: Down-regulated in Transcription
  misc_feature: MA Experiment 108461 PARAMETER Experiment Name: At_Germinating_Seeds_cDNA_P Parameter: Age (day) Value: 1 vs. 0
  misc_feature: MA Experiment 108461 PARAMETER Experiment Name: At_Germinating_Seeds_cDNA_P Parameter: Tissue Value: Germinating Seeds
  misc_feature: MA Experiment ID: 108462 Result: Down-regulated in Transcription
  misc_feature: MA Experiment 108462 PARAMETER Experiment Name: At_Germinating_Seeds_cDNA_P Parameter: Age (day) Value: 2 vs. 0
  misc_feature: MA Experiment 108462 PARAMETER Experiment Name: At_Germinating_Seeds_cDNA_P Parameter: Tissue Value: Germinating Seeds
  misc_feature: MA Experiment ID: 108463 Result: Down-regulated in Transcription
  misc_feature: MA Experiment 108463 PARAMETER Experiment Name: At_Germinating_Seeds_cDNA_P Parameter: Age (day) Value: 3 vs. 0
  misc_feature: MA Experiment 108463 PARAMETER Experiment Name: At_Germinating_Seeds_cDNA_P Parameter: Tissue Value: Germinating Seeds
  misc_feature: MA Experiment ID: 108464 Result: Down-regulated in Transcription
  misc_feature: MA Experiment 108464 PARAMETER Experiment Name: At_Germinating_Seeds_cDNA_P Parameter: Age (day) Value: 4 vs. 0
  misc_feature: MA Experiment 108464 PARAMETER Experiment Name: At_Germinating_Seeds_cDNA_P Parameter: Tissue Value: Germinating Seeds
  misc_feature: MA Experiment ID: 108473 Result: Up-regulated in Transcription
  misc_feature: MA Experiment 108473 PARAMETER Experiment Name: At_Drought_Flowers_cDNA_P Parameter: Timepoint (hr) Value: 7 d
  misc_feature: MA Experiment 108473 PARAMETER Experiment Name: At_Drought_Flowers_cDNA_P Parameter: Tissue Value: Flower
  misc_feature: MA Experiment 108473 PARAMETER Experiment Name: At_Drought_Flowers_cDNA_P Parameter: Treatment Value: Drought vs. No Drought
  misc_feature: MA Experiment ID: 108474 Result: Up-regulated in Transcription
  misc_feature: MA Experiment 108474 PARAMETER Experiment Name: At_Drought_Flowers_cDNA_P Parameter: Timepoint (hr) Value: null
  misc_feature: MA Experiment 108474 PARAMETER Experiment Name: At_Drought_Flowers_cDNA_P Parameter: Treatment Value: Drought vs. No Drought
  misc_feature: MA Experiment ID: 108489 Result: Up-regulated in Transcription
  misc_feature: MA Experiment ID: 108561 Result: Up-regulated in Transcription
  misc_feature: MA Experiment 108561 PARAMETER Experiment Name: At_100uM_ABA_cDNA_P Parameter: Timepoint (hr) Value: 6
  misc_feature: MA Experiment 108561 PARAMETER Experiment Name: At_100uM_ABA_cDNA_P Parameter: Tissue Value: Aerial
  misc_feature: MA Experiment 108561 PARAMETER Experiment Name: At_100uM_ABA_cDNA_P Parameter: Treatment Value: 100uM ABA vs. No Treatment
  misc_feature: MA Experiment ID: 108572 Result: Up-regulated in Transcription
  misc_feature: MA Experiment 108572 PARAMETER Experiment Name: At_Drought_cDNA_P Parameter: Timepoint (hr) Value: 1
  misc_feature: MA Experiment 108572 PARAMETER Experiment Name: At_Drought_cDNA_P Parameter: Tissue Value: Aerial
  misc_feature: MA Experiment 108572 PARAMETER Experiment Name: At_Drought_cDNA_P Parameter: Treatment Value: Drought vs. No Drought
  misc_feature: MA Experiment ID: 108573 Result: Up-regulated in Transcription
  misc_feature: MA Experiment 108573 PARAMETER Experiment Name: At_Drought_cDNA_P Parameter: Timepoint (hr) Value: 6
  misc_feature: MA Experiment 108573 PARAMETER Experiment Name: At_Drought_cDNA_P Parameter: Tissue Value: Aerial
  misc_feature: MA Experiment 108573 PARAMETER Experiment Name: At_Drought_cDNA_P Parameter: Treatment Value: Drought vs. No Drought
  misc_feature: MA Experiment ID: 108605 Result: Up-regulated in Transcription
  misc_feature: MA Experiment 108605 PARAMETER Experiment Name: At_100uM_ABA_cDNA_P Parameter: Timepoint (hr) Value: 6
  misc_feature: MA Experiment 108605 PARAMETER Experiment Name: At_100uM_ABA_cDNA_P Parameter: Tissue Value: Aerial
  misc_feature: MA Experiment 108605 PARAMETER Experiment Name: At_100uM_ABA_cDNA_P Parameter: Treatment Value: 100uM ABA vs. No Treatment
  misc_feature: MA Experiment ID: 108667 Result: Up-regulated in Transcription
  misc_feature: MA Experiment 108667 PARAMETER Experiment Name: At_2mM_SA_cDNA_P Parameter: Plant Line Value: WS
  misc_feature: MA Experiment 108667 PARAMETER Experiment Name: At_2mM_SA_cDNA_P Parameter: Timepoint (hr) Value: 1
  misc_feature: MA Experiment 108667 PARAMETER Experiment Name: At_2mM_SA_cDNA_P Parameter: Treatment Value: 2mM SA vs. No Treatment
  misc_feature: MA Experiment ID: 20000069 Result: Up-regulated in Transcription
  misc_feature: MA Experiment 20000069 PARAMETER Experiment Name: At_100uM_ABA_Mutants_cDNA_P Parameter: Plant Line Value: CS23
  misc_feature: MA Experiment 20000069 PARAMETER Experiment Name: At_100uM_ABA_Mutants_cDNA_P Parameter: Timepoint (hr) Value: 6
  misc_feature: MA Experiment 20000069 PARAMETER Experiment Name: At_100uM_ABA_Mutants_cDNA_P Parameter: Tissue Value: Aerial
  misc_feature: MA Experiment 20000069 PARAMETER Experiment Name: At_100uM_ABA_Mutants_cDNA_P Parameter: Treatment Value: 100uM ABA vs. No Treatment
  misc_feature: MA Experiment ID: 20000070 Result: Up-regulated in Transcription
  misc_feature: MA Experiment 20000070 PARAMETER Experiment Name: At_100uM_ABA_Mutants_cDNA_P Parameter: Plant Line Value: CS24
  misc_feature: MA Experiment 20000070 PARAMETER Experiment Name: At_100uM_ABA_Mutants_cDNA_P Parameter: Timepoint (hr) Value: 6
  misc_feature: MA Experiment 20000070 PARAMETER Experiment Name: At_100uM_ABA_Mutants_cDNA_P Parameter: Tissue Value: Aerial
  misc_feature: MA Experiment 20000070 PARAMETER Experiment Name: At_100uM_ABA_Mutants_cDNA_P Parameter: Treatment Value: 100uM ABA vs. No Treatment
  misc_feature: MA Experiment ID: 20000071 Result: Up-regulated in Transcription
  misc_feature: MA Experiment 20000071 PARAMETER Experiment Name: At_100uM_ABA_Mutants_cDNA_P Parameter: Plant Line Value: CS8104
  misc_feature: MA Experiment 20000071 PARAMETER Experiment Name: At_100uM_ABA_Mutants_cDNA_P Parameter: Timepoint (hr) Value: 6
  misc_feature: MA Experiment 20000071 PARAMETER Experiment Name: At_100uM_ABA_Mutants_cDNA_P Parameter: Tissue Value: Aerial
  misc_feature: MA Experiment 20000071 PARAMETER Experiment Name: At_100uM_ABA_Mutants_cDNA_P Parameter: Treatment Value: 100uM ABA vs. No Treatment
  misc_feature: MA Experiment ID: 20000072 Result: Up-regulated in Transcription
  misc_feature: MA Experiment 20000072 PARAMETER Experiment Name: At_100uM_ABA_Mutants_cDNA_P Parameter: Plant Line Value: CS8105
  misc_feature: MA Experiment 20000072 PARAMETER Experiment Name: At_100uM_ABA_Mutants_cDNA_P Parameter: Timepoint (hr) Value: 6
  misc_feature: MA Experiment 20000072 PARAMETER Experiment Name: At_100uM_ABA_Mutants_cDNA_P Parameter: Tissue Value: Aerial
  misc_feature: MA Experiment 20000072 PARAMETER Experiment Name: At_100uM_ABA_Mutants_cDNA_P Parameter: Treatment Value: 100uM ABA vs. No Treatment
  misc_feature: MA Experiment ID: 20000088 Result: Up-regulated in Transcription
  misc_feature: MA Experiment 20000088 PARAMETER Experiment Name: At_100uM_ABA_Mutants_cDNA_P Parameter: Plant Line Value: Landsberg
  misc_feature: MA Experiment 20000088 PARAMETER Experiment Name: At_100uM_ABA_Mutants_cDNA_P Parameter: Timepoint (hr) Value: 6
  misc_feature: MA Experiment 20000088 PARAMETER Experiment Name: At_100uM_ABA_Mutants_cDNA_P Parameter: Tissue Value: Aerial
  misc_feature: MA Experiment 20000088 PARAMETER Experiment Name: At_100uM_ABA_Mutants_cDNA_P Parameter: Treatment Value: 100uM ABA vs. No Treatment
  misc_feature: MA Experiment ID: 20000184 Result: Up-regulated in Transcription
  misc_feature: MA Experiment 20000184 PARAMETER Experiment Name: At_Shoots__P Parameter: Age (day) Value: 7
  misc_feature: MA Experiment 20000184 PARAMETER Experiment Name: At_Shoots__P Parameter: Tissue Value: Shoots vs. Whole Plant
  misc_feature: MA Experiment ID: 20000234 Result: Down-regulated in Transcription
  misc_feature: MA Experiment 20000234 PARAMETER Experiment Name: At_Siliques_P Parameter: Age (day) Value: 21
  misc_feature: MA Experiment 20000234 PARAMETER Experiment Name: At_Siliques_P Parameter: Organism Value: A. thaliana
  misc_feature: MA Experiment 20000234 PARAMETER Experiment Name: At_Siliques_P Parameter: Plant Line Value: WS
  misc_feature: MA Experiment 20000234 PARAMETER Experiment Name: At_Siliques_P Parameter: Tissue Value: Less Than 5mm Siliques vs. Whole Plant
  misc_feature: MA Experiment ID: 20000235 Result: Down-regulated in Transcription
  misc_feature: MA Experiment 20000235 PARAMETER Experiment Name: At_Siliques_P Parameter: Age (day) Value: 21
  misc_feature: MA Experiment 20000235 PARAMETER Experiment Name: At_Siliques_P Parameter: Organism Value: A. thaliana
  misc_feature: MA Experiment 20000235 PARAMETER Experiment Name: At_Siliques_P Parameter: Plant Line Value: WS
  misc_feature: MA Experiment 20000235 PARAMETER Experiment Name: At_Siliques_P Parameter: Tissue Value: 5-10mm Siliques vs. Whole Plant
  misc_feature: MA Experiment ID: 20000452 Result: Down-regulated in Transcription
  misc_feature: MA Experiment 20000452 PARAMETER Experiment Name: At_CS6879_Shoots-Roots_P Parameter: Age (day) Value: 14
  misc_feature: MA Experiment 20000452 PARAMETER Experiment Name: At_CS6879_Shoots-Roots_P Parameter: Organism Value: A. thaliana
  misc_feature: MA Experiment 20000452 PARAMETER Experiment Name: At_CS6879_Shoots-Roots_P Parameter: Plant Line Value: CS6879 vs. WS
  misc_feature: MA Experiment 20000452 PARAMETER Experiment Name: At_CS6879_Shoots-Roots_P Parameter: Tissue Value: Shoots
  misc_feature: MA Experiment ID: 20001451 Result: Down-regulated in Transcription
  misc_feature: MA Experiment 20001451 PARAMETER Experiment Name: At_Far-red-induction_P Parameter: Age (day) Value: 7
  misc_feature: MA Experiment 20001451 PARAMETER Experiment Name: At_Far-red-induction_P Parameter: Light Value: Far-red vs. White
  misc_feature: MA Experiment 20001451 PARAMETER Experiment Name: At_Far-red-induction_P Parameter: Organism Value: A. thaliana
  misc_feature: MA Experiment 20001451 PARAMETER Experiment Name: At_Far-red-induction_P Parameter: Plant Line Value: Columbia
  misc_feature: MA Experiment 20001451 PARAMETER Experiment Name: At_Far-red-induction_P Parameter: Timepoint (hr) Value: 24
  misc_feature: MA Experiment 20001451 PARAMETER Experiment Name: At_Far-red-induction_P Parameter: Tissue Value: Whole Plant
  misc_feature: MA Experiment ID: 20001757 Result: Up-regulated in Transcription
  misc_feature: MA Experiment 20001757 PARAMETER Experiment Name: At_50mM_NH4NO3_L-to-H_P Parameter: Timepoint (hr) Value: 6
  misc_feature: MA Experiment 20001757 PARAMETER Experiment Name: At_50mM_NH4NO3_L-to-H_P Parameter: Tissue Value: Leaf
  misc_feature: MA Experiment 20001757 PARAMETER Experiment Name: At_50mM_NH4NO3_L-to-H_P Parameter: Treatment Value: 50mM NH4NO3 vs 100mM Mannitol
gataaaactcatcattcctcattcatctctaacaatggcgtcttctcgaatcatcatcttctccgttcttcttctctccatcttctcactctcatcatctgcccaaccatctttccgccccaaagctctccttctcccagtaacaaaagacccatctaccctccagtacacaaccgtcatcaaccaacgcacacctctcgtccccgcttccgtcgtattcgacctcggtggtcgagaattctgggtcgactgtgaccaaggctacgtctccaccacttaccgctctcctcgctgcaactccgctgtctgctcacgcgccggctccatcgcctgcggcacatgcttctctcctccgagacctggctgtagtaacaacacttgcggcgcttttccagataactccatcaccggatgggcaacctcgggcgaatttgctttagacgttgtgtctatccagtccactaacggatccaatccgggtcggttcgttaaaatccccaatctaatattcagttgcggatcaacgtctcttcttaaaggactcgctaaaggagccgttggtatggctggaatgggacgtcacaacatcggcttaccgttgcagttcgccgccgcgtttagcttcaaccgcaaattcgccgtgtgtcttacttccggtagaggcgtcgccttcttcggcaacggaccttacgttttcctccccgggatccagatctcaaggcttcaaaagacaccgcttctcatcaatccagggaccactgtttttgagttttcaaaaggcgagaagtcgccggagtattttatcggcgtgacggcgattaagatcgtcgagaaaacacttccaatcgatccaacgcttttgaagataaacgcaagtactggaataggaggaaccaaaatcagctccgtcaatccttacacggtgttggagtcatcgatctacaaagcttttacgtcggagtttattagacaagcagcggcgaggagcatcaagagagtagcgtcggtgaaaccgttcggcgcgtgtttcagcacgaagaacgttggcgtcacgcgcctaggatacgccgtaccggagattcagctcgtgcttcatagcaaagacgtcgtttggagaatctttggagctaactcgatggtgagtgtcagtgatgacgtcatctgtttgggtttcgttgacggaggagtcaacccaggagcctctgtggtgatcggagggttccagttggaggataatttgatcgaatttgatttggcgagtaacaaatttgggtttagttccacgttattgggccgtcaaactaactgcgccaactttaatttcacttccactgcttgattaaatttagttgatgcactttctcc

SEQ ID NO: 45122 - protein, 445 aa, Arabidopsis thaliana
  peptide (1)..(445): Ceres Seq. ID no. 13575880
  misc_feature (34)..(427): Pfam Name: Eukaryotic aspartyl protease Pfam Description: Eukaryotic aspartyl protease
  misc_feature (20)..(443): Homolog of NCBI NO: 1401240 NR Description: 7S seed globulin precursor
  misc_feature (29)..(438): Homolog of NCBI NO: 99969 NR Description: conglutin gamma precursor - narrow-leaved blue
  misc_feature (29)..(438): Homolog of NCBI NO: 662366 NR Description: conglutin gamma [Lupinus angustifolius]
  misc_feature (29)..(438): Homolog of NCBI NO: 11191819 NR Description: conglutin gamma [Lupinus albus]
  misc_feature (12)..(443): Homolog of NCBI NO: 27372527 NR Description: xyloglucan-specific fungal endoglucanase
  misc_feature (12)..(445): Homolog of NCBI NO: 32482806 NR Description: putative xyloglucanase inhibitor [Solanum
  misc_feature (14)..(443): Homolog of NCBI NO: 7488910 NR Description: dermal glycoprotein precursor, extracellular -
  misc_feature (12)..(445): Homolog of NCBI NO: 21537233 NR Description: EDGP precursor [Arabidopsis thaliana]
  misc_feature (12)..(445): Homolog of NCBI NO: 15218740 NR Description: expressed protein [Arabidopsis thaliana]
  misc_feature (12)..(445): Homolog of NCBI NO: 18379072 NR Description: expressed protein [Arabidopsis thaliana]
IKLIIPHSSLTMASSRIIIFSVLLLSIFSLSSSAQPSFRPKALLLPVTKDPSTLQYTTVINQRTPLVPASVVFDLGGREFWVDCDQGYVSTTYRSPRCNSAVCSRAGSIACGTCFSPPRPGCSNNTCGAFPDNSITGWATSGEFALDVVSIQSTNGSNPGRFVKIPNLIFSCGSTSLLKGLAKGAVGMAGMGRHNIGLPLQFAAAFSFNRKFAVCLTSGRGVAFFGNGPYVFLPGIQISRLQKTPLLINPGTTVFEFSKGEKSPEYFIGVTAIKIVEKTLPIDPTLLKINASTGIGGTKISSVNPYTVLESSIYKAFTSEFIRQAAARSIKRVASVKPFGACFSTKNVGVTRLGYAVPEIQLVLHSKDVVWRIFGANSMVSVSDDVICLGFVDGGVNPGASVVIGGFQLEDNLIEFDLASNKFGFSSTLLGRQTNCANFNFTSTA

SEQ ID NO: 45123 - protein, 434 aa, Arabidopsis thaliana
  peptide (1)..(434): Ceres Seq. ID no. 13575881
  misc_feature (23)..(416): Pfam Name: Eukaryotic aspartyl protease Pfam Description: Eukaryotic aspartyl protease
  misc_feature (9)..(432): Homolog of NCBI NO: 1401240 NR Description: 7S seed globulin precursor
  misc_feature (18)..(427): Homolog of NCBI NO: 99969 NR Description: conglutin gamma precursor - narrow-leaved blue
  misc_feature (18)..(427): Homolog of NCBI NO: 662366 NR Description: conglutin gamma [Lupinus angustifolius]
  misc_feature (18)..(427): Homolog of NCBI NO: 11191819 NR Description: conglutin gamma [Lupinus albus]
  misc_feature (1)..(432): Homolog of NCBI NO: 27372527 NR Description: xyloglucan-specific fungal endoglucanase
  misc_feature (1)..(434): Homolog of NCBI NO: 32482806 NR Description: putative xyloglucanase inhibitor [Solanum
  misc_feature (3)..(432): Homolog of NCBI NO: 7488910 NR Description: dermal glycoprotein precursor, extracellular -
  misc_feature (1)..(434): Homolog of NCBI NO: 21537233 NR Description: EDGP precursor [Arabidopsis thaliana]
  misc_feature (1)..(434): Homolog of NCBI NO: 15218740 NR Description: expressed protein [Arabidopsis thaliana]
  misc_feature (1)..(434): Homolog of NCBI NO: 18379072 NR Description: expressed protein [Arabidopsis thaliana]
MASSRIIIFSVLLLSIFSLSSSAQPSFRPKALLLPVTKDPSTLQYTTVINQRTPLVPASVVFDLGGREFWVDCDQGYVSTTYRSPRCNSAVCSRAGSIACGTCFSPPRPGCSNNTCGAFPDNSITGWATSGEFALDVVSIQSTNGSNPGRFVKIPNLIFSCGSTSLLKGLAKGAVGMAGMGRHNIGLPLQFAAAFSFNRKFAVCLTSGRGVAFFGNGPYVFLPGIQISRLQKTPLLINPGTTVFEFSKGEKSPEYFIGVTAIKIVEKTLPIDPTLLKINASTGIGGTKISSVNPYTVLESSIYKAFTSEFIRQAAARSIKRVASVKPFGACFSTKNVGVTRLGYAVPEIQLVLHSKDVVWRIFGANSMVSVSDDVICLGFVDGGVNPGASVVIGGFQLEDNLIEFDLASNKFGFSSTLLGRQTNCANFNFTSTA

SEQ ID NO: 45124 - protein, 258 aa, Arabidopsis thaliana
  peptide (1)..(258): Ceres Seq. ID no. 13575882
  misc_feature (1)..(240): Pfam Name: Eukaryotic aspartyl protease Pfam Description: Eukaryotic aspartyl protease
  misc_feature (1)..(256): Homolog of NCBI NO: 1401240 NR Description: 7S seed globulin precursor
  misc_feature (1)..(251): Homolog of NCBI NO: 99969 NR Description: conglutin gamma precursor - narrow-leaved blue
  misc_feature (1)..(251): Homolog of NCBI NO: 662366 NR Description: conglutin gamma [Lupinus angustifolius]
  misc_feature (1)..(251): Homolog of NCBI NO: 11191819 NR Description: conglutin gamma [Lupinus albus]
  misc_feature (1)..(256): Homolog of NCBI NO: 27372527 NR Description: xyloglucan-specific fungal endoglucanase
  misc_feature (1)..(258): Homolog of NCBI NO: 32482806 NR Description: putative xyloglucanase inhibitor [Solanum
  misc_feature (1)..(256): Homolog of NCBI NO: 7488910 NR Description: dermal glycoprotein precursor, extracellular -
  misc_feature (1)..(258): Homolog of NCBI NO: 21537233 NR Description: EDGP precursor [Arabidopsis thaliana]
  misc_feature (1)..(258): Homolog of NCBI NO: 15218740 NR Description: expressed protein [Arabidopsis thaliana]
  misc_feature (1)..(258): Homolog of NCBI NO: 18379072 NR Description: expressed protein [Arabidopsis thaliana]
MAGMGRHNIGLPLQFAAAFSFNRKFAVCLTSGRGVAFFGNGPYVFLPGIQISRLQKTPLLINPGTTVFEFSKGEKSPEYFIGVTAIKIVEKTLPIDPTLLKINASTGIGGTKISSVNPYTVLESSIYKAFTSEFIRQAAARSIKRVASVKPFGACFSTKNVGVTRLGYAVPEIQLVLHSKDVVWRIFGANSMVSVSDDVICLGFVDGGVNPGASVVIGGFQLEDNLIEFDLASNKFGFSSTLLGRQTNCANFNFTSTA

SEQ ID NO: 45125 - DNA, 1583 bp, Arabidopsis thaliana
  misc_feature (1)..(1583): Ceres Seq. ID no. 13575883
  misc_feature: MA Experiment ID: 20000184 Result: Up-regulated in Transcription
  misc_feature: MA Experiment 20000184 PARAMETER Experiment Name: At_Shoots__P Parameter: Age (day) Value: 7
  misc_feature: MA Experiment 20000184 PARAMETER Experiment Name: At_Shoots__P Parameter: Tissue Value: Shoots vs. Whole Plant
  misc_feature: MA Experiment ID: 20000213 Result: Down-regulated in Transcription
  misc_feature: MA Experiment 20000213 PARAMETER Experiment Name: At_4deg_Cold_P Parameter: Timepoint (hr) Value: 2
  misc_feature: MA Experiment ID: 20000264 Result: Down-regulated in Transcription
  misc_feature: MA Experiment 20000264 PARAMETER Experiment Name: At_Open_Flower_P Parameter: Age (day) Value: 21
  misc_feature: MA Experiment 20000264 PARAMETER Experiment Name: At_Open_Flower_P Parameter: Plant Line Value: WS
  misc_feature: MA Experiment 20000264 PARAMETER Experiment Name: At_Open_Flower_P Parameter: Tissue Value: Open Flower vs. Whole Plant
  misc_feature: MA Experiment ID: 20000265 Result: Down-regulated in Transcription
  misc_feature: MA Experiment 20000265 PARAMETER Experiment Name: At_Open_Flower_P Parameter: Age (day) Value: 21
  misc_feature: MA Experiment 20000265 PARAMETER Experiment Name: At_Open_Flower_P Parameter: Plant Line Value: WS
  misc_feature: MA Experiment 20000265 PARAMETER Experiment Name: At_Open_Flower_P Parameter: Tissue Value: Closed Flower vs. Whole Plant
  misc_feature: MA Experiment ID: 20000286 Result: Down-regulated in Transcription
  misc_feature: MA Experiment 20000286 PARAMETER Experiment Name: At_Open_Flower_P Parameter: Age (day) Value: 21
  misc_feature: MA Experiment 20000286 PARAMETER Experiment Name: At_Open_Flower_P Parameter: Plant Line Value: WS
  misc_feature: MA Experiment 20000286 PARAMETER Experiment Name: At_Open_Flower_P Parameter: Tissue Value: Half Open vs. Whole Plant
  misc_feature: MA Experiment ID: 20000438 Result: Up-regulated in Transcription
  misc_feature: MA Experiment 20000438 PARAMETER Experiment Name: At_Shoots__P Parameter: Age (day) Value: 14
  misc_feature: MA Experiment 20000438 PARAMETER Experiment Name: At_Shoots__P Parameter: Tissue Value: Shoots vs. Whole Plant
  misc_feature: MA Experiment ID: 20000794 Result: Down-regulated in Transcription
  misc_feature: MA Experiment 20000794 PARAMETER Experiment Name: At_Petals_P Parameter: Age (day) Value: 23-25 days
  misc_feature: MA Experiment 20000794 PARAMETER Experiment Name: At_Petals_P Parameter: Plant Line Value: WS
  misc_feature: MA Experiment 20000794 PARAMETER Experiment Name: At_Petals_P Parameter: Tissue Value: Petals vs. Whole plant
  misc_feature: MA Experiment ID: 20001248 Result: Down-regulated in Transcription
  misc_feature: MA Experiment 20001248 PARAMETER Experiment Name: At_Far-red-induction_P Parameter: Age (day) Value: 7
  misc_feature: MA Experiment 20001248 PARAMETER Experiment Name: At_Far-red-induction_P Parameter: Light Value: Far-red vs. White
  misc_feature: MA Experiment 20001248 PARAMETER Experiment Name: At_Far-red-induction_P Parameter: Organism Value: A. thaliana
  misc_feature: MA Experiment 20001248 PARAMETER Experiment Name: At_Far-red-induction_P Parameter: Plant Line Value: Columbia
  misc_feature: MA Experiment 20001248 PARAMETER Experiment Name: At_Far-red-induction_P Parameter: Timepoint (hr) Value: 4
  misc_feature: MA Experiment 20001248 PARAMETER Experiment Name: At_Far-red-induction_P Parameter: Tissue Value: Whole Plant
  misc_feature: MA Experiment ID: 20001557 Result: Down-regulated in Transcription
  misc_feature: MA Experiment 20001557 PARAMETER Experiment Name: At_Drought_Soil_Dry_P Parameter: Age (day) Value: 27
  misc_feature: MA Experiment 20001557 PARAMETER Experiment Name: At_Drought_Soil_Dry_P Parameter: Organism Value: A. thaliana
  misc_feature: MA Experiment 20001557 PARAMETER Experiment Name: At_Drought_Soil_Dry_P Parameter: Plant Line Value: WS
  misc_feature: MA Experiment 20001557 PARAMETER Experiment Name: At_Drought_Soil_Dry_P Parameter: Post Timepoint (hr) Value: 3
  misc_feature: MA Experiment 20001557 PARAMETER Experiment Name: At_Drought_Soil_Dry_P Parameter: Post-Treatment Value: Re-Water vs. No Drought
  misc_feature: MA Experiment 20001557 PARAMETER Experiment Name: At_Drought_Soil_Dry_P Parameter: Timepoint (day) Value: 13
  misc_feature: MA Experiment 20001557 PARAMETER Experiment Name: At_Drought_Soil_Dry_P Parameter: Treatment Value: Drought vs. No Drought
  misc_feature: MA Experiment ID: 20001558 Result: Down-regulated in Transcription
  misc_feature: MA Experiment 20001558 PARAMETER Experiment Name: At_Drought_Soil_Dry_P Parameter: Age (day) Value: 27
  misc_feature: MA Experiment 20001558 PARAMETER Experiment Name: At_Drought_Soil_Dry_P Parameter: Organism Value: A. thaliana
  misc_feature: MA Experiment 20001558 PARAMETER Experiment Name: At_Drought_Soil_Dry_P Parameter: Plant Line Value: WS
  misc_feature: MA Experiment 20001558 PARAMETER Experiment Name: At_Drought_Soil_Dry_P Parameter: Post Timepoint (hr) Value: 6
  misc_feature: MA Experiment 20001558 PARAMETER Experiment Name: At_Drought_Soil_Dry_P Parameter: Post-Treatment Value: Re-Water vs. No Drought
  misc_feature: MA Experiment 20001558 PARAMETER Experiment Name: At_Drought_Soil_Dry_P Parameter: Timepoint (day) Value: 13
  misc_feature: MA Experiment 20001558 PARAMETER Experiment Name: At_Drought_Soil_Dry_P Parameter: Treatment Value: Drought vs. No Drought
  misc_feature: MA Experiment ID: 20001559 Result: Down-regulated in Transcription
  misc_feature: MA Experiment 20001559 PARAMETER Experiment Name: At_Drought_Soil_Dry_P Parameter: Age (day) Value: 28
  misc_feature: MA Experiment 20001559 PARAMETER Experiment Name: At_Drought_Soil_Dry_P Parameter: Organism Value: A. thaliana
  misc_feature: MA Experiment 20001559 PARAMETER Experiment Name: At_Drought_Soil_Dry_P Parameter: Plant Line Value: WS
  misc_feature: MA Experiment 20001559 PARAMETER Experiment Name: At_Drought_Soil_Dry_P Parameter: Post Timepoint (hr) Value: 29
  misc_feature: MA Experiment 20001559 PARAMETER Experiment Name: At_Drought_Soil_Dry_P Parameter: Post-Treatment Value: Re-Water vs. No Drought
  misc_feature: MA Experiment 20001559 PARAMETER Experiment Name: At_Drought_Soil_Dry_P Parameter: Timepoint (day) Value: 14
  misc_feature: MA Experiment 20001559 PARAMETER Experiment Name: At_Drought_Soil_Dry_P Parameter: Treatment Value: Drought vs. No Drought
  misc_feature: MA Experiment ID: 20001905 Result: Down-regulated in Transcription
  misc_feature: MA Experiment 20001905 PARAMETER Experiment Name: At_Drought_Reproduction_P Parameter: Age (day) Value: 40
  misc_feature: MA Experiment 20001905 PARAMETER Experiment Name: At_Drought_Reproduction_P Parameter: Organism Value: A. thaliana
  misc_feature: MA Experiment 20001905 PARAMETER Experiment Name: At_Drought_Reproduction_P Parameter: Plant Line Value: WS
  misc_feature: MA Experiment 20001905 PARAMETER Experiment Name: At_Drought_Reproduction_P Parameter: Timepoint (day) Value: 10
  misc_feature: MA Experiment 20001905 PARAMETER Experiment Name: At_Drought_Reproduction_P Parameter: Tissue Value: Rosettes
  misc_feature: MA Experiment 20001905 PARAMETER Experiment Name: At_Drought_Reproduction_P Parameter: Treatment Value: Drought vs. No Drought
  misc_feature: MA Experiment ID: 20001906 Result: Down-regulated in Transcription
  misc_feature: MA Experiment 20001906 PARAMETER Experiment Name: At_Drought_Reproduction_P Parameter: Age (day) Value: 35
  misc_feature: MA Experiment 20001906 PARAMETER Experiment Name: At_Drought_Reproduction_P Parameter: Organism Value: A. thaliana
  misc_feature: MA Experiment 20001906 PARAMETER Experiment Name: At_Drought_Reproduction_P Parameter: Plant Line Value: WS
  misc_feature: MA Experiment 20001906 PARAMETER Experiment Name: At_Drought_Reproduction_P Parameter: Timepoint (day) Value: 5
  misc_feature: MA Experiment 20001906 PARAMETER Experiment Name: At_Drought_Reproduction_P Parameter: Tissue Value: Siliques
  misc_feature: MA Experiment 20001906 PARAMETER Experiment Name: At_Drought_Reproduction_P Parameter: Treatment Value: Drought vs. No Drought
gaaaagaaaacaaaattcgagaagaaagccaaaaagaaaaagaagagagaatgctctcagtctcagcctctcctcaccaccactaaccccagaagaatcctcacagacagagagagagagagagaatcagaatgggtttgatatcagcgaaagagacgaagaacaacactagaggaatgggtttgctcttagtcttcttccccgaccaccacaacaacaacgacgactctccttcttcttcttcttcttctccggcaacaacaactctcttccgctccagatcttctcgtcttctcctctccaaagctcaatccacaatctcaatctgcatcctcctcctcttcctcactctcttcctcttcactctctccaccttcgaaccttcctctggctttcccgccgtttcttcttctcgtcctcaccgtcgatttctcctcaaccgcgacatctccgcctcttctgaatctcgtcgtcgttataaccgattcgctctccaaggtatgggtactctgtttctcagaggaaccaagagcatgcacgatttgattgttgttcatatctcttccgatactacggaagacgatctccgtctcttcatgcgcttgatccaccgctccggtgtcacttccaaatccgacgtcgttttactcttcaattcgggtacgagattcactgaaatgatcgaagaagagaacgactcgttcttaaaactcgttgatgttcatcggaattcgaattcgtcgaatcaaatcgactccgtttggggatttaatctcacgaaattcatgaagaagcaatcgaaatcatcatcgtctgagccaatttgggggaagaagacgcatcgagctaattacaacgatacgtcgtcgttgaataactcgaccgagtcaaccgagttgttgacacatggctcagtagtgggtttcgacgtgactgagttggatcctgaaaactcgctatccgggtttatggatcacgttccgataagtttgagaagatgggcgtgttacccaatgctgctaggtcgagtaagacgcaatttcaaacacgttatgctcgtggacgctaaaacctccttgttcctcggtgacccgctaacccggattcgtaaccggagccttgagtcagtcctcttcttctctaaacacagtagtagtagcaagaaaagctccgaggttaatccggcgattctgatcggtggagctaaaggaatcaggaggttatcgagctcgatgcacactgagatcgtgagagcgacgattcagcagcagcataagaagaagaactcggttacggaatcggtggtgttgagccaactcgttgggaatgttcacatgacgaagaattttgaagtggttacgagtgagtcggtggtaccggaagcgagttcactggctgagttaaggacgagaaactcggcggcttcgtcgataaagaatcatgatataatacaaagaggtggtggtaatagtaatagtaatcatattattgatattatggcgattattatgaaacgtatttgttcttgtgaattagattcttctgtttataattactgttagcattattttaaaagagtttac

SEQ ID NO: 45126 - protein, 476 aa, Arabidopsis thaliana
  peptide (1)..(476): Ceres Seq. ID no. 13575884
  misc_feature (16)..(265): Homolog of NCBI NO: 15237180 NR Description: expressed protein [Arabidopsis thaliana]
  misc_feature (223)..(419): Homolog of NCBI NO: 15237180 NR Description: expressed protein [Arabidopsis thaliana]
  misc_feature (1)..(476): Homolog of NCBI NO: 15230285 NR Description: expressed protein [Arabidopsis thaliana]
  misc_feature (1)..(476): Homolog of NCBI NO: 17064822 NR Description: putative protein [Arabidopsis thaliana]
MGLISAKETKNNTRGMGLLLVFFPDHHNNNDDSPSSSSSSPATTTLFRSRSSRLLLSKAQSTISICILLLFLTLFLFTLSTFEPSSGFPAVSSSRPHRRFLLNRDISASSESRRRYNRFALQGMGTLFLRGTKSMHDLIVVHISSDTTEDDLRLFMRLIHRSGVTSKSDVVLLFNSGTRFTEMIEEENDSFLKLVDVHRNSNSSNQIDSVWGFNLTKFMKKQSKSSSSEPIWGKKTHRANYNDTSSLNNSTESTELLTHGSVVGFDVTELDPENSLSGFMDHVPISLRRWACYPMLLGRVRRNFKHVMLVDAKTSLFLGDPLTRIRNRSLESVLFFSKHSSSSKKSSEVNPAILIGGAKGIRRLSSSMHTEIVRATIQQQHKKKNSVTESVVLSQLVGNVHMTKNFEVVTSESVVPEASSLAELRTRNSAASSIKNHDIIQRGGGNSNSNHIIDIMAIIMKRICSCELDSSVYNYC

SEQ ID NO: 45127 - protein, 461 aa, Arabidopsis thaliana
  peptide (1)..(461): Ceres Seq. ID no. 13575885
  misc_feature (1)..(250): Homolog of NCBI NO: 15237180 NR Description: expressed protein [Arabidopsis thaliana]
  misc_feature (208)..(404): Homolog of NCBI NO: 15237180 NR Description: expressed protein [Arabidopsis thaliana]
  misc_feature (1)..(461): Homolog of NCBI NO: 15230285 NR Description: expressed protein [Arabidopsis thaliana]
  misc_feature (1)..(461): Homolog of NCBI NO: 17064822 NR Description: putative protein [Arabidopsis thaliana]
MGLLLVFFPDHHNNNDDSPSSSSSSPATTTLFRSRSSRLLLSKAQSTISICILLLFLTLFLFTLSTFEPSSGFPAVSSSRPHRRFLLNRDISASSESRRRYNRFALQGMGTLFLRGTKSMHDLIVVHISSDTTEDDLRLFMRLIHRSGVTSKSDVVLLFNSGTRFTEMIEEENDSFLKLVDVHRNSNSSNQIDSVWGFNLTKFMKKQSKSSSSEPIWGKKTHRANYNDTSSLNNSTESTELLTHGSVVGFDVTELDPENSLSGFMDHVPISLRRWACYPMLLGRVRRNFKHVMLVDAKTSLFLGDPLTRIRNRSLESVLFFSKHSSSSKKSSEVNPAILIGGAKGIRRLSSSMHTEIVRATIQQQHKKKNSVTESVVLSQLVGNVHMTKNFEVVTSESVVPEASSLAELRTRNSAASSIKNHDIIQRGGGNSNSNHIIDIMAIIMKRICSCELDSSVYNYC

SEQ ID NO: 45128 - protein, 353 aa, Arabidopsis thaliana
  peptide (1)..(353): Ceres Seq. ID no. 13575886
  misc_feature (1)..(142): Homolog of NCBI NO: 15237180 NR Description: expressed protein [Arabidopsis thaliana]
  misc_feature (100)..(296): Homolog of NCBI NO: 15237180 NR Description: expressed protein [Arabidopsis thaliana]
  misc_feature (1)..(353): Homolog of NCBI NO: 15230285 NR Description: expressed protein [Arabidopsis thaliana]
  misc_feature (1)..(353): Homolog of NCBI NO: 17064822 NR Description: putative protein [Arabidopsis thaliana]
MGTLFLRGTKSMHDLIVVHISSDTTEDDLRLFMRLIHRSGVTSKSDVVLLFNSGTRFTEMIEEENDSFLKLVDVHRNSNSSNQIDSVWGFNLTKFMKKQSKSSSSEPIWGKKTHRANYNDTSSLNNSTESTELLTHGSVVGFDVTELDPENSLSGFMDHVPISLRRWACYPMLLGRVRRNFKHVMLVDAKTSLFLGDPLTRIRNRSLESVLFFSKHSSSSKKSSEVNPAILIGGAKGIRRLSSSMHTEIVRATIQQQHKKKNSVTESVVLSQLVGNVHMTKNFEVVTSESVVPEASSLAELRTRNSAASSIKNHDIIQRGGGNSNSNHIIDIMAIIMKRICSCELDSSVYNYC

SEQ ID NO: 45129 - DNA, 2828 bp, Arabidopsis thaliana
  misc_feature (1)..(2828): Ceres Seq. ID no. 13575899
  misc_feature: MA Experiment ID: 20000173 Result: Down-regulated in Transcription
  misc_feature: MA Experiment 20000173 PARAMETER Experiment Name: At_42deg_Heat_P Parameter: Age (day) Value: 14
  misc_feature: MA Experiment 20000173 PARAMETER Experiment Name: At_42deg_Heat_P Parameter: Organism Value: A. thaliana
  misc_feature: MA Experiment 20000173 PARAMETER Experiment Name: At_42deg_Heat_P Parameter: Plant Line Value: WS
  misc_feature: MA Experiment 20000173 PARAMETER Experiment Name: At_42deg_Heat_P Parameter: Temperature (deg C) Value: 42 vs. 22
  misc_feature: MA Experiment 20000173 PARAMETER Experiment Name: At_42deg_Heat_P Parameter: Timepoint (hr) Value: 6
  misc_feature: MA Experiment 20000173 PARAMETER Experiment Name: At_42deg_Heat_P Parameter: Tissue Value: Aerial
  misc_feature: MA Experiment ID: 20000234 Result: Up-regulated in Transcription
  misc_feature: MA Experiment 20000234 PARAMETER Experiment Name: At_Siliques_P Parameter: Age (day) Value: 21
  misc_feature: MA Experiment 20000234 PARAMETER Experiment Name: At_Siliques_P Parameter: Organism Value: A. thaliana
  misc_feature: MA Experiment 20000234 PARAMETER Experiment Name: At_Siliques_P Parameter: Plant Line Value: WS
  misc_feature: MA Experiment 20000234 PARAMETER Experiment Name: At_Siliques_P Parameter: Tissue Value: Less Than 5mm Siliques vs. Whole Plant
  misc_feature: MA Experiment ID: 20000286 Result: Up-regulated in Transcription
  misc_feature: MA Experiment 20000286 PARAMETER Experiment Name: At_Open_Flower_P Parameter: Age (day) Value: 21
  misc_feature: MA Experiment 20000286 PARAMETER Experiment Name: At_Open_Flower_P Parameter: Plant Line Value: WS
  misc_feature: MA Experiment 20000286 PARAMETER Experiment Name: At_Open_Flower_P Parameter: Tissue Value: Half Open vs. Whole Plant
  misc_feature: MA Experiment ID: 20000439 Result: Up-regulated in Transcription
  misc_feature: MA Experiment 20000439 PARAMETER Experiment Name: At_Roots__P Parameter: Age (day) Value: 14 vs. 21
  misc_feature: MA Experiment 20000439 PARAMETER Experiment Name: At_Roots__P Parameter: Organism Value: A. thaliana
  misc_feature: MA Experiment 20000439 PARAMETER Experiment Name: At_Roots__P Parameter: Tissue Value: Roots vs. Whole Plant
  misc_feature: MA Experiment ID: 20000794 Result: Up-regulated in Transcription
  misc_feature: MA Experiment 20000794 PARAMETER Experiment Name: At_Petals_P Parameter: Age (day) Value: 23-25 days
  misc_feature: MA Experiment 20000794 PARAMETER Experiment Name: At_Petals_P Parameter: Plant Line Value: WS
  misc_feature: MA Experiment 20000794 PARAMETER Experiment Name: At_Petals_P Parameter: Tissue Value: Petals vs. Whole plant
  misc_feature: MA Experiment ID: 20001451 Result: Down-regulated in Transcription
  misc_feature: MA Experiment 20001451 PARAMETER Experiment Name: At_Far-red-induction_P Parameter: Age (day) Value: 7
  misc_feature: MA Experiment 20001451 PARAMETER Experiment Name: At_Far-red-induction_P Parameter: Light Value: Far-red vs. White
  misc_feature: MA Experiment 20001451 PARAMETER Experiment Name: At_Far-red-induction_P Parameter: Organism Value: A. thaliana
  misc_feature: MA Experiment 20001451 PARAMETER Experiment Name: At_Far-red-induction_P Parameter: Plant Line Value: Columbia
  misc_feature: MA Experiment 20001451 PARAMETER Experiment Name: At_Far-red-induction_P Parameter: Timepoint (hr) Value: 24
  misc_feature: MA Experiment 20001451 PARAMETER Experiment Name: At_Far-red-induction_P Parameter: Tissue Value: Whole Plant
acatgcgtctctcagaaatctctccgccccagatccatctctctctcaagcaaacactcttaaacccttttgatttctcctcataattattctcgaaagctccattgtttattagttattcctgcaaattattcaattttaccattttgcttctggtttttttagtcgtctctctctctcttcaatctcttgaaaggtacttgctttatgcacaaaagttataatcctgggtttttttgtactacactgtagttattaatgcctgaacaatcttcttgatctgggtacattttgcagattgagtaaaaatcattcctttttttttctgggttatatacactgttcttcgagttctagggttccttaatttcgtttctcctttttggaaagtctctgactttatgtgttttaatgggtctagttttttcatgtggtccatttaattagctagtggaagaagatggatgaattgtgtaaagattatttttggttctaagtatcaaaaaaatttgggggtaaattgagggagatgggttgtgtttgtggtaagccttctgctattgaagatagcaaagatagtccaagagagcgtttctcaagcaaatcctcttctgagtttagagtttcaagaccggttgcttcttctagaagggaggagccgcttaggattaaggaacggtctgatgttgttagtgtaagaccagtgttgagtaataagcaatccaatgtttcgttgcatttgcgtggagagaatttgagtagaagagagaagaggattgagaatgttgctgctacttcacctcttgcaatgagtattaccatagctaaagcaactgaaggagagtatgtagctgcaggttggcctccatggctggcttctgtagctggagaagctatcaggggatgggttcctcggcgtgcggattcttttgagaagttggacaaaattggtcagggcacttatagtaatgtatatagggctcgcgacctggatcagaagaaaattgtggctttgaagaaagttaggtttgataacttggagccagaaagtgtgcgttttatggctagagaaatccagatattacgccggcttgatcatcctaatatcataaagctagaaggcttagttacgtcaagaatgtcttgcagcttatatcttgttttcgagtacatggaacacgatttagctgggctagcctcgcatcccgcgataaaattttctgaatcacaggttaagtgctacctgcagcaactattacatggactagaccattgtcacagtcgtggtgtactccatcgggatataaaaggctcaaacctgctaatagataatagtggagttttaaagattgctgactttggattagctagtttctttgatcctcgtcaaactcagcctttgaccagtcgtgtggtaactctttggtaccgtccacctgagcttttgctcggagcaactcgctatggagcagcagttgatttgtggagtgcaggttgcattcttgctgaactatatgcaggcaagcctattatgcctggtagaaccgaggtggaacagttgcacaagattttcaagctatgtggctcgcctaccgaggactattgggtaaaatcaaggttgcctcatgcaacaattttcaagcctactcaaccatataaacgcttagtgggtgaaacattcaaggagtttcctcagccagctttagcccttcttgaaactctcctttcagtcaatcctgacgatcgtggaactgccactgcagctctcaagagtgagttcttctccaccagacctcttccatgtgatccttcaagcttgcctaaatatcctcccagcaaagagctcgatgcaagaatgcgggatgaggaaagtagaagacaagttggaggaaacagggaccaaagacaccaagaaagaagaggaactaaggaatctcgagccatcccagcccctgacgcaaatgcagagctggttgcatcaatgcagaaaaggcagagccagtctactaatagaagtcgaagcgagaagtttaatccacatcctgaagaagttgcatccggtttcccaatcgatccaccaaggccgtcatcacaagcatttgaaccaaacagagaatctcagggcaatataattcctcacaagagagcttcacattctggtcctctatcacgtagatctgcttccgcaaagggtagacggaattaccaagattctcaaaaggtttcatccatagctgattactcagcaatgcctggttttgccgcaacaagaacaggcgcaccacaacaagagacttgcagaggaatgactcggcttccaggttcattcaaggaaacgtctgaagaagcaaaccaggaagagaatggtcgaagcaacaagaaagaccctattctcttgggttatggatcaaaagggcacaagattcattactcaggaccgttagtggttccatcaggaaacatggatcaagtgttgaaagaccatgaccgacatatccaagaagctgtgagaagagcacgaatcgataaggctcgagtcaagaaacttcaagctgacgaagcttcgagccaacaagtcgcaaccaatcatccctcatctgtttctagccgttgatccatcagtgaggcaaaagtaaatgatcaaaccgaacctcatttgcctgaaaccttttaacacggcgtattttgagtgaaaaataattgtattttattgattcaaagattatatatcatcatagaatcaaatcttttcacgttttagcttccctgtaatgtgatattattttattataagaaagctgtagaaacagagttatatatcataattt

SEQ ID NO: 45130 - protein, 694 aa, Arabidopsis thaliana
  peptide (1)..(694): Ceres Seq. ID no. 13575900
  misc_feature (134)..(418): Pfam Name: Protein kinase domain Pfam Description: Protein kinase domain
  misc_feature (110)..(557): Homolog of NCBI NO: 15241289 NR Description: cyclin-dependent protein kinase-related
  misc_feature (95)..(663): Homolog of NCBI NO: 9280653 NR Description: F21B7.34 [Arabidopsis thaliana]
  misc_feature (1)..(527): Homolog of NCBI NO: 7671528 NR Description: CRK1 protein [Beta vulgaris]
  misc_feature (436)..(669): Homolog of NCBI NO: 33146814 NR Description: putative cyclin-dependent kinase CDC2C
  misc_feature (1)..(471): Homolog of NCBI NO: 33146814 NR Description: putative cyclin-dependent kinase CDC2C
  misc_feature (1)..(669): Homolog of NCBI NO: 15223647 NR Description: CRK1 protein -related [Arabidopsis thaliana]
  misc_feature (15)..(686): Homolog of NCBI NO: 15217565 NR Description: protein kinase -related [Arabidopsis thaliana]
  misc_feature (15)..(693): Homolog of NCBI NO: 25402555 NR Description: hypothetical protein [imported] - Arabidopsis
  misc_feature (1)..(558): Homolog of NCBI NO: 34899282 NR Description: putative CRK1 protein(cdc2-related kinase 1)
  misc_feature (80)..(672): Homolog of NCBI NO: 34903662 NR Description: putative CRK1 protein [Oryza sativa (japonica
MGCVCGKPSAIEDSKDSPRERFSSKSSSEFRVSRPVASSRREEPLRIKERSDVVSVRPVLSNKQSNVSLHLRGENLSRREKRIENVAATSPLAMSITIAKATEGEYVAAGWPPWLASVAGEAIRGWVPRRADSFEKLDKIGQGTYSNVYRARDLDQKKIVALKKVRFDNLEPESVRFMAREIQILRRLDHPNIIKLEGLVTSRMSCSLYLVFEYMEHDLAGLASHPAIKFSESQVKCYLQQLLHGLDHCHSRGVLHRDIKGSNLLIDNSGVLKIADFGLASFFDPRQTQPLTSRVVTLWYRPPELLLGATRYGAAVDLWSAGCILAELYAGKPIMPGRTEVEQLHKIFKLCGSPTEDYWVKSRLPHATIFKPTQPYKRLVGETFKEFPQPALALLETLLSVNPDDRGTATAALKSEFFSTRPLPCDPSSLPKYPPSKELDARMRDEESRRQVGGNRDQRHQERRGTKESRAIPAPDANAELVASMQKRQSQSTNRSRSEKFNPHPEEVASGFPIDPPRPSSQAFEPNRESQGNIIPHKRASHSGPLSRRSASAKGRRNYQDSQKVSSIADYSAMPGFAATRTGAPQQETCRGMTRLPGSFKETSEEANQEENGRSNKKDPILLGYGSKGHKIHYSGPLVVPSGNMDQVLKDHDRHIQEAVRRARIDKARVKKLQADEASSQQVATNHPSSVSSR

SEQ ID NO: 45131 - protein, 601 aa, Arabidopsis thaliana
  peptide (1)..(601): Ceres Seq. ID no. 13575901
  misc_feature (41)..(325): Pfam Name: Protein kinase domain Pfam Description: Protein kinase domain
  misc_feature (17)..(464): Homolog of NCBI NO: 15241289 NR Description: cyclin-dependent protein kinase-related
  misc_feature (2)..(570): Homolog of NCBI NO: 9280653 NR Description: F21B7.34 [Arabidopsis thaliana]
  misc_feature (1)..(434): Homolog of NCBI NO: 7671528 NR Description: CRK1 protein [Beta vulgaris]
  misc_feature (343)..(576): Homolog of NCBI NO: 33146814 NR Description: putative cyclin-dependent kinase CDC2C
  misc_feature (1)..(378): Homolog of NCBI NO: 33146814 NR Description: putative cyclin-dependent kinase CDC2C
  misc_feature (1)..(576): Homolog of NCBI NO: 15223647 NR Description: CRK1 protein -related [Arabidopsis thaliana]
  misc_feature (1)..(593): Homolog of NCBI NO: 15217565 NR Description: protein kinase -related [Arabidopsis thaliana]
  misc_feature (1)..(600): Homolog of NCBI NO: 25402555 NR Description: hypothetical protein [imported] - Arabidopsis
  misc_feature (1)..(465): Homolog of NCBI NO: 34899282 NR Description: putative CRK1 protein(cdc2-related kinase 1)
  misc_feature (1)..(579): Homolog of NCBI NO: 34903662 NR Description: putative CRK1 protein [Oryza sativa (japonica
MSITIAKATEGEYVAAGWPPWLASVAGEAIRGWVPRRADSFEKLDKIGQGTYSNVYRARDLDQKKIVALKKVRFDNLEPESVRFMAREIQILRRLDHPNIIKLEGLVTSRMSCSLYLVFEYMEHDLAGLASHPAIKFSESQVKCYLQQLLHGLDHCHSRGVLHRDIKGSNLLIDNSGVLKIADFGLASFFDPRQTQPLTSRVVTLWYRPPELLLGATRYGAAVDLWSAGCILAELYAGKPIMPGRTEVEQLHKIFKLCGSPTEDYWVKSRLPHATIFKPTQPYKRLVGETFKEFPQPALALLETLLSVNPDDRGTATAALKSEFFSTRPLPCDPSSLPKYPPSKELDARMRDEESRRQVGGNRDQRHQERRGTKESRAIPAPDANAELVASMQKRQSQSTNRSRSEKFNPHPEEVASGFPIDPPRPSSQAFEPNRESQGNIIPHKRASHSGPLSRRSASAKGRRNYQDSQKVSSIADYSAMPGFAATRTGAPQQETCRGMTRLPGSFKETSEEANQEENGRSNKKDPILLGYGSKGHKIHYSGPLVVPSGNMDQVLKDHDRHIQEAVRRARIDKARVKKLQADEASSQQVATNHPSSVSSR

SEQ ID NO: 45132 - protein, 517 aa, Arabidopsis thaliana
  peptide (1)..(517): Ceres Seq. ID no. 13575902
  misc_feature (1)..(241): Pfam Name: Protein kinase domain Pfam Description: Protein kinase domain
  misc_feature (1)..(380): Homolog of NCBI NO: 15241289 NR Description: cyclin-dependent protein kinase-related
  misc_feature (1)..(486): Homolog of NCBI NO: 9280653 NR Description: F21B7.34 [Arabidopsis thaliana]
  misc_feature (1)..(350): Homolog of NCBI NO: 7671528 NR Description: CRK1 protein [Beta vulgaris]
  misc_feature (259)..(492): Homolog of NCBI NO: 33146814 NR Description: putative cyclin-dependent kinase CDC2C
  misc_feature (1)..(294): Homolog of NCBI NO: 33146814 NR Description: putative cyclin-dependent kinase CDC2C
  misc_feature (1)..(492): Homolog of NCBI NO: 15223647 NR Description: CRK1 protein -related [Arabidopsis thaliana]
  misc_feature (1)..(509): Homolog of NCBI NO: 15217565 NR Description: protein kinase -related [Arabidopsis thaliana]
  misc_feature (1)..(516): Homolog of NCBI NO: 25402555 NR Description: hypothetical protein [imported] - Arabidopsis
  misc_feature (1)..(381): Homolog of NCBI NO: 34899282 NR Description: putative CRK1 protein(cdc2-related kinase 1)
  misc_feature (1)..(495): Homolog of NCBI NO: 34903662 NR Description: putative CRK1 protein [Oryza sativa (japonica
MAREIQILRRLDHPNIIKLEGLVTSRMSCSLYLVFEYMEHDLAGLASHPAIKFSESQVKCYLQQLLHGLDHCHSRGVLHRDIKGSNLLIDNSGVLKIADFGLASFFDPRQTQPLTSRVVTLWYRPPELLLGATRYGAAVDLWSAGCILAELYAGKPIMPGRTEVEQLHKIFKLCGSPTEDYWVKSRLPHATIFKPTQPYKRLVGETFKEFPQPALALLETLLSVNPDDRGTATAALKSEFFSTRPLPCDPSSLPKYPPSKELDARMRDEESRRQVGGNRDQRHQERRGTKESRAIPAPDANAELVASMQKRQSQSTNRSRSEKFNPHPEEVASGFPIDPPRPSSQAFEPNRESQGNIIPHKRASHSGPLSRRSASAKGRRNYQDSQKVSSIADYSAMPGFAATRTGAPQQETCRGMTRLPGSFKETSEEANQEENGRSNKKDPILLGYGSKGHKIHYSGPLVVPSGNMDQVLKDHDRHIQEAVRRARIDKARVKKLQADEASSQQVATNHPSSVSSR

SEQ ID NO: 45133 - DNA, 3822 bp, Arabidopsis thaliana
  misc_feature (1)..(3822): Ceres Seq. ID no. 12560354
  misc_feature: MA Experiment ID: 20000328 Result: Down-regulated in Transcription
  misc_feature: MA Experiment 20000328 PARAMETER Experiment Name: At_42deg_Heat_Sub_P Parameter: Age (day) Value: 14
  misc_feature: MA Experiment 20000328 PARAMETER Experiment Name: At_42deg_Heat_Sub_P Parameter: Organism Value: A. thaliana
  misc_feature: MA Experiment 20000328 PARAMETER Experiment Name: At_42deg_Heat_Sub_P Parameter: Plant Line Value: WS
  misc_feature: MA Experiment 20000328 PARAMETER Experiment Name: At_42deg_Heat_Sub_P Parameter: Temperature (deg C) Value: 42 vs. 22
  misc_feature: MA Experiment 20000328 PARAMETER Experiment Name: At_42deg_Heat_Sub_P Parameter: Timepoint (hr) Value: 6
  misc_feature: MA Experiment 20000328 PARAMETER Experiment Name: At_42deg_Heat_Sub_P Parameter: Tissue Value: Aerial
  misc_feature: MA Experiment ID: 20000329 Result: Up-regulated in Transcription
  misc_feature: MA Experiment 20000329 PARAMETER Experiment Name: At_4deg_Cold_Sub_P Parameter: Age (day) Value: 14
  misc_feature: MA Experiment 20000329 PARAMETER Experiment Name: At_4deg_Cold_Sub_P Parameter: Organism Value: A. thaliana
  misc_feature: MA Experiment 20000329 PARAMETER Experiment Name: At_4deg_Cold_Sub_P Parameter: Plant Line Value: WS
  misc_feature: MA Experiment 20000329 PARAMETER Experiment Name: At_4deg_Cold_Sub_P Parameter: Temperature (deg C) Value: 4 vs. 22
  misc_feature: MA Experiment 20000329 PARAMETER Experiment Name: At_4deg_Cold_Sub_P Parameter: Timepoint (hr) Value: 6
  misc_feature: MA Experiment 20000329 PARAMETER Experiment Name: At_4deg_Cold_Sub_P Parameter: Tissue Value: Aerial
  misc_feature: MA Experiment ID: 20000355 Result: Up-regulated in Transcription
  misc_feature: MA Experiment 20000355 PARAMETER Experiment Name: At_Siliques_Sub_P Parameter: Age (day) Value: 21
  misc_feature: MA Experiment 20000355 PARAMETER Experiment Name: At_Siliques_Sub_P Parameter: Organism Value: A. thaliana
  misc_feature: MA Experiment 20000355 PARAMETER Experiment Name: At_Siliques_Sub_P Parameter: Plant Line Value: WS
  misc_feature: MA Experiment 20000355 PARAMETER Experiment Name: At_Siliques_Sub_P Parameter: Tissue Value: Less Than 5mm Siliques vs. Whole Plant
  misc_feature: MA Experiment ID: 20000440 Result: Up-regulated in Transcription
  misc_feature: MA Experiment 20000440 PARAMETER Experiment Name: At_Closed-Flower__Sub_P Parameter: Tissue Value: Closed Flower vs. Whole Plant
atggccgatcagagaagtaaaaccaatagatggaactgggaggtgagtgggttcgaaccgaggaagtcttcttccaatgcatcgtttgcggagagtactggtcaccgtacgactggtcctctgcttcgccggaactcgatttcgactccctcgcttccgcctaagcaagcaattgcatctaaggttaacggattaaaggagaaagttaagcttgcgaaagaagattacttggagttgagacaagaagctactgatcttcaggagtattctaatgctaagcttgacagggttacacgttacttaggtgttttggctgagaaaagtcgtaaattggatcagtttgtccttgagactgaggctaggatatctccacttatcaatgagaagaaaagactgttcaatgacttgttaacggccaaagggaacataaaggtattttgccgtgcaaggccattgtttgaggatgaaggtccctctgttatagagttccctggggattgcaccatatgtgtaaacactagtgatgatactctgtccaatcccaagaaggactttgaatttgaccgagtttacggacctcatgttggacaagctgcactgtttagcgatgtccaaccttttgttcaatctgcactggatggatctaacgtctccatattgtcatatggacaaactaatgcagggaagacatacaccatggaaggttcgaatcacgatcgtggtttatatgctcgatgttttgaggaactcttcgacctagccaattcggattcaacttcgacatcacgattcagtttctctctttcagtgtttgagatctataatgaacagatcagggatctactttcggaaactcagagcaacttgcccaatatcaacatggatttacatgaatctgttatagaactcggacaggaaaaagttgataatccattggagttcttaggagtcttaaaatctgcatttctgaaccggggcaactataaatcaaaatttaatgtgacacatctgattgtctcaatacacatatactatagcaacacgattactggagaaaacatatatagcaagctctctctggttgacttggctggaagtgaaggtttaatcatggaaaatgatagtggagaccacgtcactgatctgctgcatgtcatgaattcgatttcagcgttgggagatgttttatcctcgttgacatccggaaaggattcaattccttatgataattcaattcttacaagagtacttgcagattccctaggaggaagttccaaaacattgatgatcgttaacatctgtccaagtgtgcaaaccttgtctgagacaatctcatgtctcaattatgctgctagagctcggaatactgtaccaagccttggcaatcgagatacaatcaagaaatggagagatgtggcaagtgatgctcggaaggagctgttggagaaggagagagaaaatcagaatctgaaacaagaggttgtgggcttaaaaaaagctcttaaagatgcaaatgaccagtgtgtattactctacagtgaagtgcagagagcgtggaaagtttcatttacattgcaatcagatttaaagtcagagaatattatgcttgtagacaaacatagactagagaaggagcagaattctcagttaaggaatcaaatagctcaatttttacagttggatcaggaacagaagctgcaaatgcaacaacaagattccgccattcaaaatctccaggctaaaattacagacttggaatcacaagtaagtgaagccgttagatctgacacaacaagaacaggagatgccttgcaatctcaggacatattttctccaataccaaaagcggttgagggtacaactgattcttcttctgttaccaagaaacttgaggaagaattgaaaaaacgtgatgcactgattgagaggttgcatgaagaaaacgaaaagttgtttgacagattaacagaaaggtcaatggctgtttcgacccaggtgttgagtccctcattaagagcttcgccaaacattcagcctgccaatgttaacaggggtgaaggatattcggcagaagccgttgctttaccatctacaccaaataagaataacggagcgattacgttagtaaaatctggcactgatttagtaaaaaccactccagctggagaatacttgacagctgcattgaatgactttgaccctgaagaatatgaaggtcttgctgccattgctgacggcgcaaacaagctactaatgctggttttggcagctgtcatcaaggctggtgcttccagagagcatgaaatccttgctgagattagagattctgtcttttcatttattcggaaaatggaaccaagaagagtaatggataccatgcttgtttcccgagttaggatactatacataaggtccttactggcacgatcaccggagcttcagactatcagggtctctcctgtcgagtgctttcttgagaagcctaatactggtagaagtaaaagcactagcaggggtagcagcccaggtagatcccctgttcgatatcttgatacgcagatccatggctttaaagtaaatataaaggcagaaaggagaaacaagttggcatctgtggtatcaagaatgcgtggacttgaacaggatgctgggaggcagcaagttactggagttaagctgcgggaaatgcaagatgaagccaaaagttttgctattgggaacaaagccttggctgcgttatttgttcacactccggctggtgaactgcagcgacagattcggctatggcttgcagaaaattttgagtttctttccgtgacctcagatgatgtatcgggaggaaacggtggccaactagagcttctttccacagcaattatggatggttggatggctggactaggggccgctgtgccacctcatacagatgctctcgggcagcttctgtccgagtatgcaaaacgtgtctatacttctcaaatgcagcacatgaaggatattgctggtaccttggcggcagaagaggcagaagatgctggtcaagtgtctaagcttcgatcagctcttgagtccgttgaccacaaaagaagaaagattttacaacaaatgaaaagtgatgcagctttgcttaacctggaagaaggcagttctcctattccaaacccttcgacggcagctgaagactcaagattagcatctctcatttctctggatggcattttgaagcaagtcaaggaaatcacaagacaagcctctgtccatgttttgagtaaaagcaagaagaaagcattacttgagtcccttgatgaactcactgagcggatgccttctcttcttgatatcgaccatccatgcgcacaaagagaaattgctacagcacaccagttggtcgagacgattcctgaacaagaggacactaatattctggaacaatcacacgaccggagaccctcattagaatcaatatcctcaggtgaaactgatgtatctcagtggaacgttttgcaattcaacacaggctcttcagccccattcatcataaaatgtggaggcaacaacaactcagagctcgtgatcaaggctgatgcacgcgttcaagagcccaaaggaggtgaaattgtcagagttgtcccaagaccttctgtgctagtaaacatgagcttagaggaaatgaaacaaatgtttgtgcaattacccgaagctctaagtttgctggctttagctagaacagctgatggcacaagagctcgctactctagactctacaaaactctggccatgaaggttccctctcttaaggaccttgttagtgaactggagtaa

SEQ ID NO: 45134 - protein, 1273 aa, Arabidopsis thaliana
  peptide (1)..(1273): Ceres Seq. ID no. 12560355
  misc_feature (478)..(1140): Pfam Name: Myosin tail Pfam Description: Myosin tail
  misc_feature (127)..(515): Homolog of NCBI NO: 15240982 NR Description: kinesin-related protein; protein id: At5g27550.1
  misc_feature (70)..(287): Homolog of NCBI NO: 12324217 NR Description: kinesin-related protein; 103921-99132
  misc_feature (236)..(604): Homolog of NCBI NO: 12324217 NR Description: kinesin-related protein; 103921-99132
  misc_feature (70)..(287): Homolog of NCBI NO: 22330608 NR Description: kinesin-related protein; protein id: At1g73860.1
  misc_feature (236)..(604): Homolog of NCBI NO: 22330608 NR Description: kinesin-related protein; protein id: At1g73860.1
  misc_feature (42)..(558): Homolog of NCBI NO: 15218418 NR Description: kinesin-related protein; protein id: At1g72250.1
  misc_feature (69)..(320): Homolog of NCBI NO: 15144517 NR Description: TH65-like protein [Lycopersicon esculentum]
  misc_feature (1)..(94): Homolog of NCBI NO: 15144517 NR Description: TH65-like protein [Lycopersicon esculentum]
  misc_feature (306)..(579): Homolog of NCBI NO: 15144517 NR Description: TH65-like protein [Lycopersicon esculentum]
  misc_feature (473)..(866): Homolog of NCBI NO: 2576255 NR Description: TH65 protein [Arabidopsis thaliana]
MADQRSKTNRWNWEVSGFEPRKSSSNASFAESTGHRTTGPLLRRNSISTPSLPPKQAIASKVNGLKEKVKLAKEDYLELRQEATDLQEYSNAKLDRVTRYLGVLAEKSRKLDQFVLETEARISPLINEKKRLFNDLLTAKGNIKVFCRARPLFEDEGPSVIEFPGDCTICVNTSDDTLSNPKKDFEFDRVYGPHVGQAALFSDVQPFVQSALDGSNVSILSYGQTNAGKTYTMEGSNHDRGLYARCFEELFDLANSDSTSTSRFSFSLSVFEIYNEQIRDLLSETQSNLPNINMDLHESVIELGQEKVDNPLEFLGVLKSAFLNRGNYKSKFNVTHLIVSIHIYYSNTITGENIYSKLSLVDLAGSEGLIMENDSGDHVTDLLHVMNSISALGDVLSSLTSGKDSIPYDNSILTRVLADSLGGSSKTLMIVNICPSVQTLSETISCLNYAARARNTVPSLGNRDTIKKWRDVASDARKELLEKERENQNLKQEVVGLKKALKDANDQCVLLYSEVQRAWKVSFTLQSDLKSENIMLVDKHRLEKEQNSQLRNQIAQFLQLDQEQKLQMQQQDSAIQNLQAKITDLESQVSEAVRSDTTRTGDALQSQDIFSPIPKAVEGTTDSSSVTKKLEEELKKRDALIERLHEENEKLFDRLTERSMAVSTQVLSPSLRASPNIQPANVNRGEGYSAEAVALPSTPNKNNGAITLVKSGTDLVKTTPAGEYLTAALNDFDPEEYEGLAAIADGANKLLMLVLAAVIKAGASREHEILAEIRDSVFSFIRKMEPRRVMDTMLVSRVRILYIRSLLARSPELQTIRVSPVECFLEKPNTGRSKSTSRGSSPGRSPVRYLDTQIHGFKVNIKAERRNKLASVVSRMRGLEQDAGRQQVTGVKLREMQDEAKSFAIGNKALAALFVHTPAGELQRQIRLWLAENFEFLSVTSDDVSGGNGGQLELLSTAIMDGWMAGLGAAVPPHTDALGQLLSEYAKRVYTSQMQHMKDIAGTLAAEEAEDAGQVSKLRSALESVDHKRRKILQQMKSDAALLNLEEGSSPIPNPSTAAEDSRLASLISLDGILKQVKEITRQASVHVLSKSKKKALLESLDELTERMPSLLDIDHPCAQREIATAHQLVETIPEQEDTNILEQSHDRRPSLESISSGETDVSQWNVLQFNTGSSAPFIIKCGGNNNSELVIKADARVQEPKGGEIVRVVPRPSVLVNMSLEEMKQMFVQLPEALSLLALARTADGTRARYSRLYKTLAMKVPSLKDLVSELE

SEQ ID NO: 45135 - protein, 1041 aa, Arabidopsis thaliana
  peptide (1)..(1041): Ceres Seq. ID no. 12560356
  misc_feature (246)..(908): Pfam Name: Myosin tail Pfam Description: Myosin tail
  misc_feature (4)..(366): Homolog of NCBI NO: 25406299 NR Description: protein kinesin F2P9.27 [imported] - Arabidopsis
  misc_feature (1)..(283): Homolog of NCBI NO: 15240982 NR Description: kinesin-related protein; protein id: At5g27550.1
  misc_feature (1)..(55): Homolog of NCBI NO: 12324217 NR Description: kinesin-related protein; 103921-99132
  misc_feature (4)..(372): Homolog of NCBI NO: 12324217 NR Description: kinesin-related protein; 103921-99132
  misc_feature (1)..(55): Homolog of NCBI NO: 22330608 NR Description: kinesin-related protein; protein id: At1g73860.1
  misc_feature (4)..(372): Homolog of NCBI NO: 22330608 NR Description: kinesin-related protein; protein id: At1g73860.1
  misc_feature (1)..(326): Homolog of NCBI NO: 15218418 NR Description: kinesin-related protein; protein id: At1g72250.1
  misc_feature (1)..(88): Homolog of NCBI NO: 15144517 NR Description: TH65-like protein [Lycopersicon esculentum]
  misc_feature (74)..(347): Homolog of NCBI NO: 15144517 NR Description: TH65-like protein [Lycopersicon esculentum]
  misc_feature (241)..(634): Homolog of NCBI NO: 2576255 NR Description: TH65 protein [Arabidopsis thaliana]
MEGSNHDRGLYARCFEELFDLANSDSTSTSRFSFSLSVFEIYNEQIRDLLSETQSNLPNINMDLHESVIELGQEKVDNPLEFLGVLKSAFLNRGNYKSKFNVTHLIVSIHIYYSNTITGENIYSKLSLVDLAGSEGLIMENDSGDHVTDLLHVMNSISALGDVLSSLTSGKDSIPYDNSILTRVLADSLGGSSKTLMIVNICPSVQTLSETISCLNYAARARNTVPSLGNRDTIKKWRDVASDARKELLEKERENQNLKQEVVGLKKALKDANDQCVLLYSEVQRAWKVSFTLQSDLKSENIMLVDKHRLEKEQNSQLRNQIAQFLQLDQEQKLQMQQQDSAIQNLQAKITDLESQVSEAVRSDTTRTGDALQSQDIFSPIPKAVEGTTDSSSVTKKLEEELKKRDALIERLHEENEKLFDRLTERSMAVSTQVLSPSLRASPNIQPANVNRGEGYSAEAVALPSTPNKNNGAITLVKSGTDLVKTTPAGEYLTAALNDFDPEEYEGLAAIADGANKLLMLVLAAVIKAGASREHEILAEIRDSVFSFIRKMEPRRVMDTMLVSRVRILYIRSLLARSPELQTIRVSPVECFLEKPNTGRSKSTSRGSSPGRSPVRYLDTQIHGFKVNIKAERRNKLASVVSRMRGLEQDAGRQQVTGVKLREMQDEAKSFAIGNKALAALFVHTPAGELQRQIRLWLAENFEFLSVTSDDVSGGNGGQLELLSTAIMDGWMAGLGAAVPPHTDALGQLLSEYAKRVYTSQMQHMKDIAGTLAAEEAEDAGQVSKLRSALESVDHKRRKILQQMKSDAALLNLEEGSSPIPNPSTAAEDSRLASLISLDGILKQVKEITRQASVHVLSKSKKKALLESLDELTERMPSLLDIDHPCAQREIATAHQLVETIPEQEDTNILEQSHDRRPSLESISSGETDVSQWNVLQFNTGSSAPFIIKCGGNNNSELVIKADARVQEPKGGEIVRVVPRPSVLVNMSLEEMKQMFVQLPEALSLLALARTADGTRARYSRLYKTLAMKVPSLKDLVSELE

SEQ ID NO: 45136 - protein, 980 aa, Arabidopsis thaliana
  peptide (1)..(980): Ceres Seq. ID no. 12560357
  misc_feature (185)..(847): Pfam Name: Myosin tail Pfam Description: Myosin tail
  misc_feature (1)..(175): Homolog of NCBI NO: 11245496 NR Description: C-terminal kinesin KIFC1 [Trypanosoma brucei]
  misc_feature (1)..(332): Homolog of NCBI NO: 22329655 NR Description: kinesin-related protein; protein id: At1g18410.1
  misc_feature (1)..(305): Homolog of NCBI NO: 25406299 NR Description: protein kinesin F2P9.27 [imported] - Arabidopsis
  misc_feature (1)..(222): Homolog of NCBI NO: 15240982 NR Description: kinesin-related protein; protein id: At5g27550.1
  misc_feature (1)..(311): Homolog of NCBI NO: 12324217 NR Description: kinesin-related protein; 103921-99132
  misc_feature (1)..(311): Homolog of NCBI NO: 22330608 NR Description: kinesin-related protein; protein id: At1g73860.1
  misc_feature (1)..(265): Homolog of NCBI NO: 15218418 NR Description: kinesin-related protein; protein id: At1g72250.1
  misc_feature (1)..(27): Homolog of NCBI NO: 15144517 NR Description: TH65-like protein [Lycopersicon esculentum]
  misc_feature (13)..(286): Homolog of NCBI NO: 15144517 NR Description: TH65-like protein [Lycopersicon esculentum]
  misc_feature (180)..(573): Homolog of NCBI NO: 2576255 NR Description: TH65 protein [Arabidopsis thaliana]
MDLHESVIELGQEKVDNPLEFLGVLKSAFLNRGNYKSKFNVTHLIVSIHIYYSNTITGENIYSKLSLVDLAGSEGLIMENDSGDHVTDLLHVMNSISALGDVLSSLTSGKDSIPYDNSILTRVLADSLGGSSKTLMIVNICPSVQTLSETISCLNYAARARNTVPSLGNRDTIKKWRDVASDARKELLEKERENQNLKQEVVGLKKALKDANDQCVLLYSEVQRAWKVSFTLQSDLKSENIMLVDKHRLEKEQNSQLRNQIAQFLQLDQEQKLQMQQQDSAIQNLQAKITDLESQVSEAVRSDTTRTGDALQSQDIFSPIPKAVEGTTDSSSVTKKLEEELKKRDALIERLHEENEKLFDRLTERSMAVSTQVLSPSLRASPNIQPANVNRGEGYSAEAVALPSTPNKNNGAITLVKSGTDLVKTTPAGEYLTAALNDFDPEEYEGLAAIADGANKLLMLVLAAVIKAGASREHEILAEIRDSVFSFIRKMEPRRVMDTMLVSRVRILYIRSLLARSPELQTIRVSPVECFLEKPNTGRSKSTSRGSSPGRSPVRYLDTQIHGFKVNIKAERRNKLASVVSRMRGLEQDAGRQQVTGVKLREMQDEAKSFAIGNKALAALFVHTPAGELQRQIRLWLAENFEFLSVTSDDVSGGNGGQLELLSTAIMDGWMAGLGAAVPPHTDALGQLLSEYAKRVYTSQMQHMKDIAGTLAAEEAEDAGQVSKLRSALESVDHKRRKILQQMKSDAALLNLEEGSSPIPNPSTAAEDSRLASLISLDGILKQVKEITRQASVHVLSKSKKKALLESLDELTERMPSLLDIDHPCAQREIATAHQLVETIPEQEDTNILEQSHDRRPSLESISSGETDVSQWNVLQFNTGSSAPFIIKCGGNNNSELVIKADARVQEPKGGEIVRVVPRPSVLVNMSLEEMKQMFVQLPEALSLLALARTADGTRARYSRLYKTLAMKVPSLKDLVSELE

SEQ ID NO: 45137 - DNA, 2592 bp, Arabidopsis thaliana
  misc_feature (1)..(2592): Ceres Seq. ID no. 13575906
  misc_feature: MA Experiment ID: 20000173 Result: Down-regulated in Transcription
  misc_feature: MA Experiment 20000173 PARAMETER Experiment Name: At_42deg_Heat_P Parameter: Age (day) Value: 14
  misc_feature: MA Experiment 20000173 PARAMETER Experiment Name: At_42deg_Heat_P Parameter: Organism Value: A. thaliana
  misc_feature: MA Experiment 20000173 PARAMETER Experiment Name: At_42deg_Heat_P Parameter: Plant Line Value: WS
  misc_feature: MA Experiment 20000173 PARAMETER Experiment Name: At_42deg_Heat_P Parameter: Temperature (deg C) Value: 42 vs. 22
  misc_feature: MA Experiment 20000173 PARAMETER Experiment Name: At_42deg_Heat_P Parameter: Timepoint (hr) Value: 6
  misc_feature: MA Experiment 20000173 PARAMETER Experiment Name: At_42deg_Heat_P Parameter: Tissue Value: Aerial
  misc_feature: MA Experiment ID: 20000179 Result: Up-regulated in Transcription
  misc_feature: MA Experiment 20000179 PARAMETER Experiment Name: At_Germinating_Seeds_P Parameter: Age (hr) Value: 6 vs. 0
  misc_feature: MA Experiment 20000179 PARAMETER Experiment Name: At_Germinating_Seeds_P Parameter: Tissue Value: Germinating Seeds
  misc_feature: MA Experiment ID: 20000180 Result: Up-regulated in Transcription
  misc_feature: MA Experiment 20000180 PARAMETER Experiment Name: At_Germinating_Seeds_P Parameter: Age (hr) Value: 24 vs. 0
  misc_feature: MA Experiment 20000180 PARAMETER Experiment Name: At_Germinating_Seeds_P Parameter: Tissue Value: Germinating Seeds
  misc_feature: MA Experiment ID: 20000227 Result: Down-regulated in Transcription
  misc_feature: MA Experiment 20000227 PARAMETER Experiment Name: At_Root-Tips-vs-Tops_P Parameter: Tissue Value: Root Tips vs. Root Tops
  misc_feature: MA Experiment ID: 20000234 Result: Up-regulated in Transcription
  misc_feature: MA Experiment 20000234 PARAMETER Experiment Name: At_Siliques_P Parameter: Age (day) Value: 21
  misc_feature: MA Experiment 20000234 PARAMETER Experiment Name: At_Siliques_P Parameter: Organism Value: A. thaliana
  misc_feature: MA Experiment 20000234 PARAMETER Experiment Name: At_Siliques_P Parameter: Plant Line Value: WS
  misc_feature: MA Experiment 20000234 PARAMETER Experiment Name: At_Siliques_P Parameter: Tissue Value: Less Than 5mm Siliques vs. Whole Plant
  misc_feature: MA Experiment ID: 20000235 Result: Up-regulated in Transcription
  misc_feature: MA Experiment 20000235 PARAMETER Experiment Name: At_Siliques_P Parameter: Age (day) Value: 21
  misc_feature: MA Experiment 20000235 PARAMETER Experiment Name: At_Siliques_P Parameter: Organism Value: A. thaliana
  misc_feature: MA Experiment 20000235 PARAMETER Experiment Name: At_Siliques_P Parameter: Plant Line Value: WS
  misc_feature: MA Experiment 20000235 PARAMETER Experiment Name: At_Siliques_P Parameter: Tissue Value: 5-10mm Siliques vs. Whole Plant
  misc_feature: MA Experiment ID: 20001911 Result: Down-regulated in Transcription
  misc_feature: MA Experiment 20001911 PARAMETER Experiment Name: At_Drought_Reproduction_P Parameter: Age (day) Value: 40
  misc_feature: MA Experiment 20001911 PARAMETER Experiment Name: At_Drought_Reproduction_P Parameter: Organism Value: A. thaliana
  misc_feature: MA Experiment 20001911 PARAMETER Experiment Name: At_Drought_Reproduction_P Parameter: Plant Line Value: WS
  misc_feature: MA Experiment 20001911 PARAMETER Experiment Name: At_Drought_Reproduction_P Parameter: Timepoint (day) Value: 10
  misc_feature: MA Experiment 20001911 PARAMETER Experiment Name: At_Drought_Reproduction_P Parameter: Tissue Value: Flowers
  misc_feature: MA Experiment 20001911 PARAMETER Experiment Name: At_Drought_Reproduction_P Parameter: Treatment Value: Drought vs. No Drought
gatctcttcctttgattcttcttctaatcttcttcaatggcgattccaaggtttagctctctgttacggtgtagaaaatgggctaaaagtgactggcttgtcgcttctataggatgcgtattgatcgtttttttcctctctttcttcttcgatcccacttcagactctgtcccctccgttgaccgatctcggccaatcatatctcctagcgatctggtcaagctgaagttgtcgagtgtagctaaagagagaggagctttttgtttggatggaagcttgcctgggtaccactttcatgagggttctggatctggctcccaaagctggcttgttcatttggagggtggaggctggtgcaacacagttgcgtcatgttctgctcgagcattgactaaattaggttcttccaactactttgaacaagaagtggcctttcaaggtgttttaagtagtgacccatctcaaaatcctgaattctttaactggaacaaggttgcgataaggtactgtgatggtgcttctttttctggacgccctgaagctgaattcaagaatggcacacggcttttcttccggggccagcttatttgggaggctattattgatgaacttttgtcaatgggcatgtcagatgccaaacaggccatacttacaggatgttctgccggtggcttggcaagtcttatacattgtgactactttcgagatcatcttccaaaagatgcagctgtcaaatgtgtttctgatggaggctactttctcaacgtgcctgatgtccttggaaacccaacaatgaggtctttctatcatgatgttgttaatttgcagggcgtagagaagagcttggatcagaaatgtgtagccaaaacggagccatctaagtgtatgtttcctcaagaattcctgaaaaacataagaactccggtatttcttgtcaatccagcctacgatttttggcagattcaacatgtcttggtaccaacttctgcggatccagataaaagttgggcaaagtgcagactcaatattaaggaatgtgatgccgaacagattaaagttctacacggttttcgcagttctatgatgactgcaattggggaatttcatcagaacaaagatggtgggatgttcatagattcctgctatgctcattgccagacagtcatgtccgtgacatggcactccctgacctcaccaagaatcgaaaataagaaaaccggtgaagctaatcgattgtccatacccgtgcaatccttcttgttacaacatgaatttcacatgaacttgccttatatcctcattttaccacttcctctgcttgtggactttttcgattctccagaagcttcttcagcaagggagcagtcacttcctcaaaattctcaatccggaacatggtctaagagtgactggcttctcgcttcaatcggaatagtcttgatcgtttattccttttctttgtccttcaattcaacttcagactctatcccctccgttgaccgtagcgatctagttaaactgaagctgtcgagtaaagctaaagagagaggagctttttgcttagatggaagcttacctggttatcactttcataagggttcaggatctggctccaatagctggcttctttatttagagggtggaggcgggtgccgtacaattgagtcatgttctgctagagcaatgactaggttaggttcttccaacttctttgaacatgaagtgcctttttttggcgttttaagcagtgacccatctcaaaaccctgacttctttaactggaacagagttatgatacggtactgtgatggtgcttgtttttctggacaccctgaagctgaattcaagaatgaaacacggcttttcttccgcggccagctcatttgggaggctatcatggatgaattgttgtcgatgggcatgtcacatgcgaaacgtgccatgctcacaggatgttctgctggtggcttgtctactctaatacattgtgactactttcgagaccatctgcctaaagatgcaactgttaaatgtgtttccgatggaggctatattcttaatgtgcttgatgtccttggaaacccaacaatgggatctttctttcatgatgttgttaccctgcagagcgtagataagagcttggatcagaattgtgttgccaaaatggaaccatctaagtgtatgtttcctcaagaatctcttaaaaacataagaactccggtatttcttgtcaacacagcctacgattattggcagattcaaaacggcctggtaccagattctccggatctagatgaaagatggaaaatttgtagactcaatattcaggaatgtgatgccgcacaaatgaaagttctgcatggtttccgcagttccctgatcgatgcgataggagaatttcatgtgaacaaagagggtgggatgtttataaattcgtgcaattctcattgccagataagagagtcatggcattccgcaacctcaacaagaatcgaaaataagacgattgcagagtctgtaggtgattggtacttcaaccgaaaaccggtgaagctaatcgattgtccttatccgtgcaatgcctcttgttga

SEQ ID NO: 45138 - protein, 851 aa, Arabidopsis thaliana
  peptide (1)..(851): Ceres Seq. ID no. 13575907
  misc_feature (470)..(841): Pfam Name: Pectinacetylesterase Pfam Description: Pectinacetylesterase
  misc_feature (54)..(397): Homolog of NCBI NO: 28392968 NR Description: putative pectinacetylesterase [Arabidopsis
  misc_feature (474)..(851): Homolog of NCBI NO: 28392968 NR Description: putative pectinacetylesterase [Arabidopsis
  misc_feature (41)..(397): Homolog of NCBI NO: 15226462 NR Description: pectinacetylesterase, putative [Arabidopsis
  misc_feature (48)..(396): Homolog of NCBI NO: 10176854 NR Description: pectinacetylesterase [Arabidopsis thaliana]
  misc_feature (492)..(851): Homolog of NCBI NO: 15226462 NR Description: pectinacetylesterase, putative [Arabidopsis
  misc_feature (466)..(851): Homolog of NCBI NO: 10176854 NR Description: pectinacetylesterase [Arabidopsis thaliana]
  misc_feature (8)..(397): Homolog of NCBI NO: 6478941 NR Description: putative pectinacetylesterase [Arabidopsis
  misc_feature (454)..(851): Homolog of NCBI NO: 6478931 NR Description: putative pectinacetylesterase [Arabidopsis
  misc_feature (450)..(851): Homolog of NCBI NO: 6478941 NR Description: putative pectinacetylesterase [Arabidopsis
  misc_feature (1)..(397): Homolog of NCBI NO: 6478931 NR Description: putative pectinacetylesterase [Arabidopsis
MAIPRFSSLLRCRKWAKSDWLVASIGCVLIVFFLSFFFDPTSDSVPSVDRSRPIISPSDLVKLKLSSVAKERGAFCLDGSLPGYHFHEGSGSGSQSWLVHLEGGGWCNTVASCSARALTKLGSSNYFEQEVAFQGVLSSDPSQNPEFFNWNKVAIRYCDGASFSGRPEAEFKNGTRLFFRGQLIWEAIIDELLSMGMSDAKQAILTGCSAGGLASLIHCDYFRDHLPKDAAVKCVSDGGYFLNVPDVLGNPTMRSFYHDVVNLQGVEKSLDQKCVAKTEPSKCMFPQEFLKNIRTPVFLVNPAYDFWQIQHVLVPTSADPDKSWAKCRLNIKECDAEQIKVLHGFRSSMMTAIGEFHQNKDGGMFIDSCYAHCQTVMSVTWHSLTSPRIENKKTGEANRLSIPVQSFLLQHEFHMNLPYILILPLPLLVDFFDSPEASSAREQSLPQNSQSGTWSKSDWLLASIGIVLIVYSFSLSFNSTSDSIPSVDRSDLVKLKLSSKAKERGAFCLDGSLPGYHFHKGSGSGSNSWLLYLEGGGGCRTIESCSARAMTRLGSSNFFEHEVPFFGVLSSDPSQNPDFFNWNRVMIRYCDGACFSGHPEAEFKNETRLFFRGQLIWEAIMDELLSMGMSHAKRAMLTGCSAGGLSTLIHCDYFRDHLPKDATVKCVSDGGYILNVLDVLGNPTMGSFFHDVVTLQSVDKSLDQNCVAKMEPSKCMFPQESLKNIRTPVFLVNTAYDYWQIQNGLVPDSPDLDERWKICRLNIQECDAAQMKVLHGFRSSLIDAIGEFHVNKEGGMFINSCNSHCQIRESWHSATSTRIENKTIAESVGDWYFNRKPVKLIDCPYPCNASC

SEQ ID NO: 45139 - protein, 657 aa, Arabidopsis thaliana
  peptide (1)..(657): Ceres Seq. ID no. 13575908
  misc_feature (276)..(647): Pfam Name: Pectinacetylesterase Pfam Description: Pectinacetylesterase
  misc_feature (1)..(203): Homolog of NCBI NO: 28392968 NR Description: putative pectinacetylesterase [Arabidopsis
  misc_feature (280)..(657): Homolog of NCBI NO: 28392968 NR Description: putative pectinacetylesterase [Arabidopsis
  misc_feature (1)..(203): Homolog of NCBI NO: 15226462 NR Description: pectinacetylesterase, putative [Arabidopsis
  misc_feature (1)..(202): Homolog of NCBI NO: 10176854 NR Description: pectinacetylesterase [Arabidopsis thaliana]
  misc_feature (298)..(657): Homolog of NCBI NO: 15226462 NR Description: pectinacetylesterase, putative [Arabidopsis
  misc_feature (272)..(657): Homolog of NCBI NO: 10176854 NR Description: pectinacetylesterase [Arabidopsis thaliana]
  misc_feature (1)..(203): Homolog of NCBI NO: 6478941 NR Description: putative pectinacetylesterase [Arabidopsis
  misc_feature (260)..(657): Homolog of NCBI NO: 6478931 NR Description: putative pectinacetylesterase [Arabidopsis
  misc_feature (256)..(657): Homolog of NCBI NO: 6478941 NR Description: putative pectinacetylesterase [Arabidopsis
  misc_feature (1)..(203): Homolog of NCBI NO: 6478931 NR Description: putative pectinacetylesterase [Arabidopsis
MGMSDAKQAILTGCSAGGLASLIHCDYFRDHLPKDAAVKCVSDGGYFLNVPDVLGNPTMRSFYHDVVNLQGVEKSLDQKCVAKTEPSKCMFPQEFLKNIRTPVFLVNPAYDFWQIQHVLVPTSADPDKSWAKCRLNIKECDAEQIKVLHGFRSSMMTAIGEFHQNKDGGMFIDSCYAHCQTVMSVTWHSLTSPRIENKKTGEANRLSIPVQSFLLQHEFHMNLPYILILPLPLLVDFFDSPEASSAREQSLPQNSQSGTWSKSDWLLASIGIVLIVYSFSLSFNSTSDSIPSVDRSDLVKLKLSSKAKERGAFCLDGSLPGYHFHKGSGSGSNSWLLYLEGGGGCRTIESCSARAMTRLGSSNFFEHEVPFFGVLSSDPSQNPDFFNWNRVMIRYCDGACFSGHPEAEFKNETRLFFRGQLIWEAIMDELLSMGMSHAKRAMLTGCSAGGLSTLIHCDYFRDHLPKDATVKCVSDGGYILNVLDVLGNPTMGSFFHDVVTLQSVDKSLDQNCVAKMEPSKCMFPQESLKNIRTPVFLVNTAYDYWQIQNGLVPDSPDLDERWKICRLNIQECDAAQMKVLHGFRSSLIDAIGEFHVNKEGGMFINSCNSHCQIRESWHSATSTRIENKTIAESVGDWYFNRKPVKLIDCPYPCNASC

SEQ ID NO: 45140 - protein, 655 aa, Arabidopsis thaliana
  peptide (1)..(655): Ceres Seq. ID no. 13575909
  misc_feature (274)..(645): Pfam Name: Pectinacetylesterase Pfam Description: Pectinacetylesterase
  misc_feature (1)..(201): Homolog of NCBI NO: 28392968 NR Description: putative pectinacetylesterase [Arabidopsis
  misc_feature (278)..(655): Homolog of NCBI NO: 28392968 NR Description: putative pectinacetylesterase [Arabidopsis
  misc_feature (1)..(201): Homolog of NCBI NO: 15226462 NR Description: pectinacetylesterase, putative [Arabidopsis
  misc_feature (1)..(200): Homolog of NCBI NO: 10176854 NR Description: pectinacetylesterase [Arabidopsis thaliana]
  misc_feature (296)..(655): Homolog of NCBI NO: 15226462 NR Description: pectinacetylesterase, putative [Arabidopsis
  misc_feature (270)..(655): Homolog of NCBI NO: 10176854 NR Description: pectinacetylesterase [Arabidopsis thaliana]
  misc_feature (1)..(201): Homolog of NCBI NO: 6478941 NR Description: putative pectinacetylesterase [Arabidopsis
  misc_feature (258)..(655): Homolog of NCBI NO: 6478931 NR Description: putative pectinacetylesterase [Arabidopsis
  misc_feature (254)..(655): Homolog of NCBI NO: 6478941 NR Description: putative pectinacetylesterase [Arabidopsis
  misc_feature (1)..(201): Homolog of NCBI NO: 6478931 NR Description: putative pectinacetylesterase [Arabidopsis
MSDAKQAILTGCSAGGLASLIHCDYFRDHLPKDAAVKCVSDGGYFLNVPDVLGNPTMRSFYHDVVNLQGVEKSLDQKCVAKTEPSKCMFPQEFLKNIRTPVFLVNPAYDFWQIQHVLVPTSADPDKSWAKCRLNIKECDAEQIKVLHGFRSSMMTAIGEFHQNKDGGMFIDSCYAHCQTVMSVTWHSLTSPRIENKKTGEANRLSIPVQSFLLQHEFHMNLPYILILPLPLLVDFFDSPEASSAREQSLPQNSQSGTWSKSDWLLASIGIVLIVYSFSLSFNSTSDSIPSVDRSDLVKLKLSSKAKERGAFCLDGSLPGYHFHKGSGSGSNSWLLYLEGGGGCRTIESCSARAMTRLGSSNFFEHEVPFFGVLSSDPSQNPDFFNWNRVMIRYCDGACFSGHPEAEFKNETRLFFRGQLIWEAIMDELLSMGMSHAKRAMLTGCSAGGLSTLIHCDYFRDHLPKDATVKCVSDGGYILNVLDVLGNPTMGSFFHDVVTLQSVDKSLDQNCVAKMEPSKCMFPQESLKNIRTPVFLVNTAYDYWQIQNGLVPDSPDLDERWKICRLNIQECDAAQMKVLHGFRSSLIDAIGEFHVNKEGGMFINSCNSHCQIRESWHSATSTRIENKTIAESVGDWYFNRKPVKLIDCPYPCNASC

SEQ ID NO: 45141 - DNA, 1670 bp, Arabidopsis thaliana
  misc_feature (1)..(1670): Ceres Seq. ID no. 12560366
  misc_feature: MA Experiment ID: 20000179 Result: Down-regulated in Transcription
  misc_feature: MA Experiment 20000179 PARAMETER Experiment Name: At_Germinating_Seeds_P Parameter: Age (hr) Value: 6 vs. 0
  misc_feature: MA Experiment 20000179 PARAMETER Experiment Name: At_Germinating_Seeds_P Parameter: Tissue Value: Germinating Seeds
  misc_feature: MA Experiment ID: 20000184 Result: Up-regulated in Transcription
  misc_feature: MA Experiment 20000184 PARAMETER Experiment Name: At_Shoots__P Parameter: Age (day) Value: 7
  misc_feature: MA Experiment 20000184 PARAMETER Experiment Name: At_Shoots__P Parameter: Tissue Value: Shoots vs. Whole Plant
  misc_feature: MA Experiment ID: 20000185 Result: Down-regulated in Transcription
  misc_feature: MA Experiment 20000185 PARAMETER Experiment Name: At_Roots__P Parameter: Age (day) Value: 7 vs. 21
  misc_feature: MA Experiment 20000185 PARAMETER Experiment Name: At_Roots__P Parameter: Organism Value: A. thaliana
  misc_feature: MA Experiment 20000185 PARAMETER Experiment Name: At_Roots__P Parameter: Tissue Value: Roots vs. Whole Plant
  misc_feature: MA Experiment ID: 20000227 Result: Up-regulated in Transcription
  misc_feature: MA Experiment 20000227 PARAMETER Experiment Name: At_Root-Tips-vs-Tops_P Parameter: Tissue Value: Root Tips vs. Root Tops
  misc_feature: MA Experiment ID: 20000234 Result: Down-regulated in Transcription
  misc_feature: MA Experiment 20000234 PARAMETER Experiment Name: At_Siliques_P Parameter: Age (day) Value: 21
  misc_feature: MA Experiment 20000234 PARAMETER Experiment Name: At_Siliques_P Parameter: Organism Value: A. thaliana
  misc_feature: MA Experiment 20000234 PARAMETER Experiment Name: At_Siliques_P Parameter: Plant Line Value: WS
  misc_feature: MA Experiment 20000234 PARAMETER Experiment Name: At_Siliques_P Parameter: Tissue Value: Less Than 5mm Siliques vs. Whole Plant
  misc_feature: MA Experiment ID: 20000264 Result: Down-regulated in Transcription
  misc_feature: MA Experiment 20000264 PARAMETER Experiment Name: At_Open_Flower_P Parameter: Age (day) Value: 21
  misc_feature: MA Experiment 20000264 PARAMETER Experiment Name: At_Open_Flower_P Parameter: Plant Line Value: WS
  misc_feature: MA Experiment 20000264 PARAMETER Experiment Name: At_Open_Flower_P Parameter: Tissue Value: Open Flower vs. Whole Plant
  misc_feature: MA Experiment ID: 20000286 Result: Down-regulated in Transcription
  misc_feature: MA Experiment 20000286 PARAMETER Experiment Name: At_Open_Flower_P Parameter: Age (day) Value: 21
  misc_feature: MA Experiment 20000286 PARAMETER Experiment Name: At_Open_Flower_P Parameter: Plant Line Value: WS
  misc_feature: MA Experiment 20000286 PARAMETER Experiment Name: At_Open_Flower_P Parameter: Tissue Value: Half Open vs. Whole Plant
  misc_feature: MA Experiment ID: 20000438 Result: Up-regulated in Transcription
  misc_feature: MA Experiment 20000438 PARAMETER Experiment Name: At_Shoots__P Parameter: Age (day) Value: 14
  misc_feature: MA Experiment 20000438 PARAMETER Experiment Name: At_Shoots__P Parameter: Tissue Value: Shoots vs. Whole Plant
  misc_feature: MA Experiment ID: 20000439 Result: Down-regulated in Transcription
  misc_feature: MA Experiment 20000439 PARAMETER Experiment Name: At_Roots__P Parameter: Age (day) Value: 14 vs. 21
  misc_feature: MA Experiment 20000439 PARAMETER Experiment Name: At_Roots__P Parameter: Organism Value: A. thaliana
  misc_feature: MA Experiment 20000439 PARAMETER Experiment Name: At_Roots__P Parameter: Tissue Value: Roots vs. Whole Plant
  misc_feature: MA Experiment ID: 20000527 Result: Up-regulated in Transcription
  misc_feature: MA Experiment 20000527 PARAMETER Experiment Name: At_10percent_PEG_P Parameter: Age (day) Value: 20
  misc_feature: MA Experiment 20000527 PARAMETER Experiment Name: At_10percent_PEG_P Parameter: Organism Value: A. thaliana
  misc_feature: MA Experiment 20000527 PARAMETER Experiment Name: At_10percent_PEG_P Parameter: Plant Line Value: WS
  misc_feature: MA Experiment 20000527 PARAMETER Experiment Name: At_10percent_PEG_P Parameter: Timepoint (day) Value: 20
  misc_feature: MA Experiment 20000527 PARAMETER Experiment Name: At_10percent_PEG_P Parameter: Tissue Value: Whole Plant
  misc_feature: MA Experiment 20000527 PARAMETER Experiment Name: At_10percent_PEG_P Parameter: Treatment Value: 10percent PEG vs. No Treatment
  misc_feature: MA Experiment ID: 20000794 Result: Down-regulated in Transcription
  misc_feature: MA Experiment 20000794 PARAMETER Experiment Name: At_Petals_P Parameter: Age (day) Value: 23-25 days
  misc_feature: MA Experiment 20000794 PARAMETER Experiment Name: At_Petals_P Parameter: Plant Line Value: WS
  misc_feature: MA Experiment 20000794 PARAMETER Experiment Name: At_Petals_P Parameter: Tissue Value: Petals vs. Whole plant
  misc_feature: MA Experiment ID: 20001451 Result: Up-regulated in Transcription
  misc_feature: MA Experiment 20001451 PARAMETER Experiment Name: At_Far-red-induction_P Parameter: Age (day) Value: 7
  misc_feature: MA Experiment 20001451 PARAMETER Experiment Name: At_Far-red-induction_P Parameter: Light Value: Far-red vs. White
  misc_feature: MA Experiment 20001451 PARAMETER Experiment Name: At_Far-red-induction_P Parameter: Organism Value: A. thaliana
  misc_feature: MA Experiment 20001451 PARAMETER Experiment Name: At_Far-red-induction_P Parameter: Plant Line Value: Columbia
  misc_feature: MA Experiment 20001451 PARAMETER Experiment Name: At_Far-red-induction_P Parameter: Timepoint (hr) Value: 24
  misc_feature: MA Experiment 20001451 PARAMETER Experiment Name: At_Far-red-induction_P Parameter: Tissue Value: Whole Plant
  misc_feature: MA Experiment ID: 20001560 Result: Up-regulated in Transcription
  misc_feature: MA Experiment 20001560 PARAMETER Experiment Name: At_Drought_Soil_Dry_P Parameter: Age (day) Value: 28
  misc_feature: MA Experiment 20001560 PARAMETER Experiment Name: At_Drought_Soil_Dry_P Parameter: Organism Value: A. thaliana
  misc_feature: MA Experiment 20001560 PARAMETER Experiment Name: At_Drought_Soil_Dry_P Parameter: Plant Line Value: WS
  misc_feature: MA Experiment 20001560 PARAMETER Experiment Name: At_Drought_Soil_Dry_P Parameter: Post Timepoint (hr) Value: None
  misc_feature: MA Experiment 20001560 PARAMETER Experiment Name: At_Drought_Soil_Dry_P Parameter: Post-Treatment Value: None
  misc_feature: MA Experiment 20001560 PARAMETER Experiment Name: At_Drought_Soil_Dry_P Parameter: Timepoint (day) Value: 14
  misc_feature: MA Experiment 20001560 PARAMETER Experiment Name: At_Drought_Soil_Dry_P Parameter: Treatment Value: Drought vs. No Drought
aagtttatacagttttaaaacattctctctatctccctccggctaggctgtagctgttcgccatgggagacgcagagagcacctccaaaactagcttgctgctcccggtggaaagagttgaaaacgtgacatggagagatctgcgagatggattattcaccgcagaactcaagaggcttatctgctttgccgctcctatggcggctgttgttatcgctcagttcatgttgcagatcatctcaatggtgatggttggtcacctcggaaatctctccctcgctagtgcctctctcgcctcctccttctgcaacgtcaccggcttcagcttcatcgtaggattgtcatgtgccttagatactttgagtggtcaagcttatggagctaagctatatcggaaagtaggagttcagacttacacagcaatgttctgtcttgcattagtatgtctccctctcactctcatatggttaaacatggaaacgcttcttgtattccttggccaagatccttctattgctcacgaagccggcagatatgctgcttgcctcatcccaggactgtttgcttacgctgttctacagcctctcactcgctacttccaaaaccagagcatgattacacctctcctcatcacctcttgttttgtgttctgtctccatgttcctctctgctggcttttggtttataagtcagggcttggtaatcttggaggagccttagctctcagtttttcgaactgtctttataccattatccttggatctttaatgtgcttctcctctgcctgttctgagacacgcgcaccgctctccatggagatatttgacggcattggagagttcttcagatatgctcttccttctgcggctatgatttgcctggagtggtggtcatatgaactcataatattactctctggtctcttacccaacccacagctggagacttctgtgctctctgtctgtctccaaacaactgcgacagtctattcgatacatcttgcaatcgcagctgcagcaagcacaagaatctcaaatgagttaggtgctggaaactctcgagcagctaatattgtggtctacgcagcaatgtctcttgcagtagtggaaatattaatattgagtacttctctattagtcggcaggaatgttttcggccatgttttcagcagtgacaaggaaaccatcgactatgttgcaaagatggctccattggtctctatttctctcatactggacggtttacaaggggttctctcaggtattgcaaggggatgcggatggcaacatataggagcttacataaacttaggagctttctatctctgggggatacccattgctgcatctttagccttctggattcatctgaaaggtgttggcctttggattggaatccaagccggtgccgttctgcaaacgcttctgcttactcttgtcacgggctgcacaaactgggaaagccaggccgataaagcgagaaatcgaatggctttggcctatggaacgtaaggcgctgcagaacagctaaagatcatagtgagcataggttcctccggttttaccagttttgtagcagacgaattgctgtatgttactttgtggttattggaaggtttggttgtaataatactgcacaattttcatcagtattaataagcatccttcttc

SEQ ID NO: 45142 - protein, 482 aa, Arabidopsis thaliana
  peptide (1)..(482): Ceres Seq. ID no. 12560367
  misc_feature (23)..(476): Homolog of NCBI NO: 15228073 NR Description: hypothetical protein; protein id: At2g04050.1
  misc_feature (28)..(476): Homolog of NCBI NO: 15223961 NR Description: hypothetical protein; protein id: At1g71140.1
  misc_feature (1)..(468): Homolog of NCBI NO: 25518472 NR Description: hypothetical protein F9L1.9 [imported] -
  misc_feature (1)..(468): Homolog of NCBI NO: 25518548 NR Description: hypothetical protein F9L1.10 - Arabidopsis
  misc_feature (1)..(480): Homolog of NCBI NO: 22329577 NR Description: hypothetical protein
  misc_feature (1)..(480): Homolog of NCBI NO: 15218068 NR Description: hypothetical protein; protein id: At1g15160.1
  misc_feature (1)..(468): Homolog of NCBI NO: 25511632 NR Description: F9L1.11 protein - Arabidopsis thaliana
  misc_feature (1)..(482): Homolog of NCBI NO: 15218070 NR Description: hypothetical protein; protein id: At1g15170.1
  misc_feature (1)..(468): Homolog of NCBI NO: 25518684 NR Description: hypothetical protein F9L1.12 [imported] -
  misc_feature (1)..(482): Homolog of NCBI NO: 18394206 NR Description: expressed protein
MGDAESTSKTSLLLPVERVENVTWRDLRDGLFTAELKRLICFAAPMAAVVIAQFMLQIISMVMVGHLGNLSLASASLASSFCNVTGFSFIVGLSCALDTLSGQAYGAKLYRKVGVQTYTAMFCLALVCLPLTLIWLNMETLLVFLGQDPSIAHEAGRYAACLIPGLFAYAVLQPLTRYFQNQSMITPLLITSCFVFCLHVPLCWLLVYKSGLGNLGGALALSFSNCLYTIILGSLMCFSSACSETRAPLSMEIFDGIGEFFRYALPSAAMICLEWWSYELIILLSGLLPNPQLETSVLSVCLQTTATVYSIHLAIAAAASTRISNELGAGNSRAANIVVYAAMSLAVVEILILSTSLLVGRNVFGHVFSSDKETIDYVAKMAPLVSISLILDGLQGVLSGIARGCGWQHIGAYINLGAFYLWGIPIAASLAFWIHLKGVGLWIGIQAGAVLQTLLLTLVTGCTNWESQADKARNRMALAYGT

SEQ ID NO: 45143 - protein, 437 aa, Arabidopsis thaliana
  peptide (1)..(437): Ceres Seq. ID no. 12560368
  misc_feature (1)..(431): Homolog of NCBI NO: 15228073 NR Description: hypothetical protein; protein id: At2g04050.1
  misc_feature (1)..(431): Homolog of NCBI NO: 15223961 NR Description: hypothetical protein; protein id: At1g71140.1
  misc_feature (1)..(423): Homolog of NCBI NO: 25518472 NR Description: hypothetical protein F9L1.9 [imported] -
  misc_feature (1)..(423): Homolog of NCBI NO: 25518548 NR Description: hypothetical protein F9L1.10 - Arabidopsis
  misc_feature (1)..(435): Homolog of NCBI NO: 22329577 NR Description: hypothetical protein
  misc_feature (1)..(435): Homolog of NCBI NO: 15218068 NR Description: hypothetical protein; protein id: At1g15160.1
  misc_feature (1)..(423): Homolog of NCBI NO: 25511632 NR Description: F9L1.11 protein - Arabidopsis thaliana
  misc_feature (1)..(437): Homolog of NCBI NO: 15218070 NR Description: hypothetical protein; protein id: At1g15170.1
  misc_feature (1)..(423): Homolog of NCBI NO: 25518684 NR Description: hypothetical protein F9L1.12 [imported] -
  misc_feature (1)..(437): Homolog of NCBI NO: 18394206 NR Description: expressed protein
MAAVVIAQFMLQIISMVMVGHLGNLSLASASLASSFCNVTGFSFIVGLSCALDTLSGQAYGAKLYRKVGVQTYTAMFCLALVCLPLTLIWLNMETLLVFLGQDPSIAHEAGRYAACLIPGLFAYAVLQPLTRYFQNQSMITPLLITSCFVFCLHVPLCWLLVYKSGLGNLGGALALSFSNCLYTIILGSLMCFSSACSETRAPLSMEIFDGIGEFFRYALPSAAMICLEWWSYELIILLSGLLPNPQLETSVLSVCLQTTATVYSIHLAIAAAASTRISNELGAGNSRAANIVVYAAMSLAVVEILILSTSLLVGRNVFGHVFSSDKETIDYVAKMAPLVSISLILDGLQGVLSGIARGCGWQHIGAYINLGAFYLWGIPIAASLAFWIHLKGVGLWIGIQAGAVLQTLLLTLVTGCTNWESQADKARNRMALAYGT

SEQ ID NO: 45144 - protein, 428 aa, Arabidopsis thaliana
  peptide (1)..(428): Ceres Seq. ID no. 12560369
  misc_feature (1)..(422): Homolog of NCBI NO: 15228073 NR Description: hypothetical protein; protein id: At2g04050.1
  misc_feature (1)..(422): Homolog of NCBI NO: 15223961 NR Description: hypothetical protein; protein id: At1g71140.1
  misc_feature (1)..(414): Homolog of NCBI NO: 25518472 NR Description: hypothetical protein F9L1.9 [imported] -
  misc_feature (1)..(414): Homolog of NCBI NO: 25518548 NR Description: hypothetical protein F9L1.10 - Arabidopsis
  misc_feature (1)..(426): Homolog of NCBI NO: 22329577 NR Description: hypothetical protein
  misc_feature (1)..(426): Homolog of NCBI NO: 15218068 NR Description: hypothetical protein; protein id: At1g15160.1
  misc_feature (1)..(414): Homolog of NCBI NO: 25511632 NR Description: F9L1.11 protein - Arabidopsis thaliana
  misc_feature (1)..(428): Homolog of NCBI NO: 15218070 NR Description: hypothetical protein; protein id: At1g15170.1
  misc_feature (1)..(414): Homolog of NCBI NO: 25518684 NR Description: hypothetical protein F9L1.12 [imported] -
  misc_feature (1)..(428): Homolog of NCBI NO: 18394206 NR Description: expressed protein
MLQIISMVMVGHLGNLSLASASLASSFCNVTGFSFIVGLSCALDTLSGQAYGAKLYRKVGVQTYTAMFCLALVCLPLTLIWLNMETLLVFLGQDPSIAHEAGRYAACLIPGLFAYAVLQPLTRYFQNQSMITPLLITSCFVFCLHVPLCWLLVYKSGLGNLGGALALSFSNCLYTIILGSLMCFSSACSETRAPLSMEIFDGIGEFFRYALPSAAMICLEWWSYELIILLSGLLPNPQLETSVLSVCLQTTATVYSIHLAIAAAASTRISNELGAGNSRAANIVVYAAMSLAVVEILILSTSLLVGRNVFGHVFSSDKETIDYVAKMAPLVSISLILDGLQGVLSGIARGCGWQHIGAYINLGAFYLWGIPIAASLAFWIHLKGVGLWIGIQAGAVLQTLLLTLVTGCTNWESQADKARNRMALAYGT

SEQ ID NO: 45145 - DNA, 1741 bp, Arabidopsis thaliana
  misc_feature (1)..(1741): Ceres Seq. ID no. 13575914
  misc_feature: MA Experiment ID: 20000182 Result: Down-regulated in Transcription
  misc_feature: MA Experiment 20000182 PARAMETER Experiment Name: At_2mM_SA_P Parameter: Age (day) Value: 14
  misc_feature: MA Experiment 20000182 PARAMETER Experiment Name: At_2mM_SA_P Parameter: Organism Value: A. thaliana
  misc_feature: MA Experiment 20000182 PARAMETER Experiment Name: At_2mM_SA_P Parameter: Plant Line Value: WS
  misc_feature: MA Experiment 20000182 PARAMETER Experiment Name: At_2mM_SA_P Parameter: Timepoint (hr) Value: 6
  misc_feature: MA Experiment 20000182 PARAMETER Experiment Name: At_2mM_SA_P Parameter: Tissue Value: Aerial
  misc_feature: MA Experiment 20000182 PARAMETER Experiment Name: At_2mM_SA_P Parameter: Treatment Value: 2mM SA vs. No Treatment
  misc_feature: MA Experiment ID: 20000265 Result: Up-regulated in Transcription
  misc_feature: MA Experiment 20000265 PARAMETER Experiment Name: At_Open_Flower_P Parameter: Age (day) Value: 21
  misc_feature: MA Experiment 20000265 PARAMETER Experiment Name: At_Open_Flower_P Parameter: Plant Line Value: WS
  misc_feature: MA Experiment 20000265 PARAMETER Experiment Name: At_Open_Flower_P Parameter: Tissue Value: Closed Flower vs. Whole Plant
  misc_feature: MA Experiment ID: 20001248 Result: Down-regulated in Transcription
  misc_feature: MA Experiment 20001248 PARAMETER Experiment Name: At_Far-red-induction_P Parameter: Age (day) Value: 7
  misc_feature: MA Experiment 20001248 PARAMETER Experiment Name: At_Far-red-induction_P Parameter: Light Value: Far-red vs. White
  misc_feature: MA Experiment 20001248 PARAMETER Experiment Name: At_Far-red-induction_P Parameter: Organism Value: A. thaliana
  misc_feature: MA Experiment 20001248 PARAMETER Experiment Name: At_Far-red-induction_P Parameter: Plant Line Value: Columbia
  misc_feature: MA Experiment 20001248 PARAMETER Experiment Name: At_Far-red-induction_P Parameter: Timepoint (hr) Value: 4
  misc_feature: MA Experiment 20001248 PARAMETER Experiment Name: At_Far-red-induction_P Parameter: Tissue Value: Whole Plant
  misc_feature: MA Experiment ID: 20001760 Result: Up-regulated in Transcription
  misc_feature: MA Experiment 20001760 PARAMETER Experiment Name: At_50mM_NH4NO3_L-to-H_P Parameter: Timepoint (hr) Value: 2
  misc_feature: MA Experiment 20001760 PARAMETER Experiment Name: At_50mM_NH4NO3_L-to-H_P Parameter: Tissue Value: Siliques
  misc_feature: MA Experiment 20001760 PARAMETER Experiment Name: At_50mM_NH4NO3_L-to-H_P Parameter: Treatment Value: 50mM NH4NO3 vs 100mM Mannitol
gagcagcaagcttcttcttctgcatactggtcattgattggttaatcagagctctctcttttcttttcctatctctagagactagagaaatggctctctatctctcttcttcacgactcatcacctttctctctttcatcttgcttctctccaatggcttctcgtcctcttcctctcgccctagcatccaccatcgtcaccacctggacaaccacaattacaaagacgctctctccaagtccattctcttcttcgaaggtcaaagatccggaaagcttcctccaaaccagagaatgacttggagaagcaactctggtctctctgatggctctgctctcaacgtggatttggtgggaggatactacgatgcaggggacaatatgaagtttggattcccaatggcattcacaaccacaatgctctcatggagtttaattgagtttggtggtctcatgaaatctgagttaccaaacgcaaaagacgctattcgttgggctactgactttctcctcaaagccacttcacatcctgataccatttatgttcaggttggtgatcctaacatggaccatgcttgttgggagagaccagaagacatggacacaccaagaagtgtgtttaaagtcgacaagaacaatcctggttctgatatcgccggtgaaatcgccgccgctcttgccgctgcttcaattgttttcagaaaatgtgatccttcttactccaatcacctcctccaacgagccattacggtttttacatttgcggacaaatacagaggaccctacagtgcaggtctggccccagaagtttgtccattctactgttcttactctggatatcaggatgaattgttatggggagctgcttggttacaaaaagcaacaaataacccaacatatctcaattacatcaaagctaatggacaaatccttggagctgatgagtttgataacatgtttagttgggataataagcacgttggtgctagaatccttctctccaaggagtttctgattcagaaagtgaagtcacttgaagaatacaaagagcatgctgatagtttcatttgctctgttctacctggagcatcctcttcccaatatacaccaggtgggctattgttcaagatgggtgagagcaacatgcaatacgtgacgtctacatcgttcttgctcttgacctacgccaaatacttaacctctgctcgcaccgtcgcttattgcggtggctccgtcgtcacccctgcccgcctccgctccatcgcaaagaaacaggtggattatctacttggaggcaacccgttgaagatgtcatacatggttggttatggtctgaaatatccacgtcggattcaccaccgtggctcatctctcccctccgttgcagtccacccgaccaggatccagtgccacgacggcttctccttgtttacctctcaatctcctaatcctaacgacctagtcggtgcagtagtcggtggtccggaccagaacgatcaattccctgacgaacggtccgactacggacggtcagagccagcaacttacattaacgctccacttgttggagctttggcttatcttgctcgatcctaaggccaactttaactaagcttaaaccgcatttaattgttggtttacaatgttaattagtagtaatgattttataaatgaatggccaagattgtccgatccggctgaatgaatgttttagatgatgtggtatttgattttaattttct

SEQ ID NO: 45146 - protein, 530 aa, Arabidopsis thaliana
  peptide (1)..(530): Ceres Seq. ID no. 13575915
  misc_feature (72)..(527): Pfam Name: Glycosyl hydrolase family 9 Pfam Description: Glycosyl hydrolase family 9
  misc_feature (72)..(527): Pfam Name: Glycosyl hydrolase family 9 Pfam Description: Glycosyl hydrolase family 9
  misc_feature (70)..(528): Homolog of NCBI NO: 4691450 NR Description: endo-1,4-beta glucanase [Populus alba]
  misc_feature (70)..(530): Homolog of NCBI NO: 11357128 NR Description: cellulase (EC 3.2.1.4) 2 precursor - Monterey
  misc_feature (42)..(530): Homolog of NCBI NO: 7484476 NR Description: cellulase (EC 3.2.1.4) 1 precursor - Monterey
  misc_feature (38)..(530): Homolog of NCBI NO: 34894544 NR Description: putative endo-1,3(4)-beta-glucanase
  misc_feature (30)..(530): Homolog of NCBI NO: 6009979 NR Description: endo-1,4-beta-glucanase [Pisum sativum]
  misc_feature (70)..(528): Homolog of NCBI NO: 4691450 NR Description: endo-1,4-beta glucanase [Populus alba]
  misc_feature (42)..(530): Homolog of NCBI NO: 7484476 NR Description: cellulase (EC 3.2.1.4) 1 precursor - Monterey
  misc_feature (30)..(530): Homolog of NCBI NO: 6009979 NR Description: endo-1,4-beta-glucanase [Pisum sativum]
  misc_feature (30)..(530): Homolog of NCBI NO: 15218612 NR Description: glycosyl hydrolase family 9
  misc_feature (30)..(530): Homolog of NCBI NO: 25350173 NR Description: cellulase (EC 3.2.1.4) [imported] - Arabidopsis
  misc_feature (30)..(530): Homolog of NCBI NO: 15235301 NR Description: glycosyl hydrolase family 9 [Arabidopsis
  misc_feature (30)..(530): Homolog of NCBI NO: 11358947 NR Description: endo-1,3(4)-beta-glucanase (EC 3.2.1.6) - garden
  misc_feature (45)..(530): Homolog of NCBI NO: 1362091 NR Description: cellulase (EC 3.2.1.4) precursor - tomato
  misc_feature (38)..(530): Homolog of NCBI NO: 34894544 NR Description: putative endo-1,3(4)-beta-glucanase
  misc_feature (70)..(530): Homolog of NCBI NO: 11357128 NR Description: cellulase (EC 3.2.1.4) 2 precursor - Monterey
  misc_feature (45)..(530): Homolog of NCBI NO: 1362091 NR Description: cellulase (EC 3.2.1.4) precursor - tomato
  misc_feature (30)..(530): Homolog of NCBI NO: 11358947 NR Description: endo-1,3(4)-beta-glucanase (EC 3.2.1.6) - garden
  misc_feature (30)..(530): Homolog of NCBI NO: 15235301 NR Description: glycosyl hydrolase family 9 [Arabidopsis
  misc_feature (30)..(530): Homolog of NCBI NO: 25350173 NR Description: cellulase (EC 3.2.1.4) [imported] - Arabidopsis
  misc_feature (30)..(530): Homolog of NCBI NO: 15218612 NR Description: glycosyl hydrolase family 9
AASFFFCILVIDWLIRALSFLFLSLETREMALYLSSSRLITFLSFILLLSNGFSSSSSRPSIHHRHHLDNHNYKDALSKSILFFEGQRSGKLPPNQRMTWRSNSGLSDGSALNVDLVGGYYDAGDNMKFGFPMAFTTTMLSWSLIEFGGLMKSELPNAKDAIRWATDFLLKATSHPDTIYVQVGDPNMDHACWERPEDMDTPRSVFKVDKNNPGSDIAGEIAAALAAASIVFRKCDPSYSNHLLQRAITVFTFADKYRGPYSAGLAPEVCPFYCSYSGYQDELLWGAAWLQKATNNPTYLNYIKANGQILGADEFDNMFSWDNKHVGARILLSKEFLIQKVKSLEEYKEHADSFICSVLPGASSSQYTPGGLLFKMGESNMQYVTSTSFLLLTYAKYLTSARTVAYCGGSVVTPARLRSIAKKQVDYLLGGNPLKMSYMVGYGLKYPRRIHHRGSSLPSVAVHPTRIQCHDGFSLFTSQSPNPNDLVGAVVGGPDQNDQFPDERSDYGRSEPATYINAPLVGALAYLARS

SEQ ID NO: 45147 - protein, 501 aa, Arabidopsis thaliana
  peptide (1)..(501): Ceres Seq. ID no. 13575916
  misc_feature (43)..(498): Pfam Name: Glycosyl hydrolase family 9 Pfam Description: Glycosyl hydrolase family 9
  misc_feature (43)..(498): Pfam Name: Glycosyl hydrolase family 9 Pfam Description: Glycosyl hydrolase family 9
  misc_feature (41)..(499): Homolog of NCBI NO: 4691450 NR Description: endo-1,4-beta glucanase [Populus alba]
  misc_feature (41)..(501): Homolog of NCBI NO: 11357128 NR Description: cellulase (EC 3.2.1.4) 2 precursor - Monterey
  misc_feature (13)..(501): Homolog of NCBI NO: 7484476 NR Description: cellulase (EC 3.2.1.4) 1 precursor - Monterey
  misc_feature (9)..(501): Homolog of NCBI NO: 34894544 NR Description: putative endo-1,3(4)-beta-glucanase
  misc_feature (1)..(501): Homolog of NCBI NO: 6009979 NR Description: endo-1,4-beta-glucanase [Pisum sativum]
  misc_feature (41)..(499): Homolog of NCBI NO: 4691450 NR Description: endo-1,4-beta glucanase [Populus alba]
  misc_feature (13)..(501): Homolog of NCBI NO: 7484476 NR Description: cellulase (EC 3.2.1.4) 1 precursor - Monterey
  misc_feature (1)..(501): Homolog of NCBI NO: 6009979 NR Description: endo-1,4-beta-glucanase [Pisum sativum]
  misc_feature (1)..(501): Homolog of NCBI NO: 15218612 NR Description: glycosyl hydrolase family 9
  misc_feature (1)..(501): Homolog of NCBI NO: 25350173 NR Description: cellulase (EC 3.2.1.4) [imported] - Arabidopsis
  misc_feature (1)..(501): Homolog of NCBI NO: 15235301 NR Description: glycosyl hydrolase family 9 [Arabidopsis
  misc_feature (1)..(501): Homolog of NCBI NO: 11358947 NR Description: endo-1,3(4)-beta-glucanase (EC 3.2.1.6) - garden
  misc_feature (16)..(501): Homolog of NCBI NO: 1362091 NR Description: cellulase (EC 3.2.1.4) precursor - tomato
  misc_feature (9)..(501): Homolog of NCBI NO: 34894544 NR Description: putative endo-1,3(4)-beta-glucanase
  misc_feature (41)..(501): Homolog of NCBI NO: 11357128 NR Description: cellulase (EC 3.2.1.4) 2 precursor - Monterey
  misc_feature (16)..(501): Homolog of NCBI NO: 1362091 NR Description: cellulase (EC 3.2.1.4) precursor - tomato
  misc_feature (1)..(501): Homolog of NCBI NO: 11358947 NR Description: endo-1,3(4)-beta-glucanase (EC 3.2.1.6) - garden
  misc_feature (1)..(501): Homolog of NCBI NO: 15235301 NR Description: glycosyl hydrolase family 9 [Arabidopsis
  misc_feature (1)..(501): Homolog of NCBI NO: 25350173 NR Description: cellulase (EC 3.2.1.4) [imported] - Arabidopsis
  misc_feature (1)..(501): Homolog of NCBI NO: 15218612 NR Description: glycosyl hydrolase family 9
MALYLSSSRLITFLSFILLLSNGFSSSSSRPSIHHRHHLDNHNYKDALSKSILFFEGQRSGKLPPNQRMTWRSNSGLSDGSALNVDLVGGYYDAGDNMKFGFPMAFTTTMLSWSLIEFGGLMKSELPNAKDAIRWATDFLLKATSHPDTIYVQVGDPNMDHACWERPEDMDTPRSVFKVDKNNPGSDIAGEIAAALAAASIVFRKCDPSYSNHLLQRAITVFTFADKYRGPYSAGLAPEVCPFYCSYSGYQDELLWGAAWLQKATNNPTYLNYIKANGQILGADEFDNMFSWDNKHVGARILLSKEFLIQKVKSLEEYKEHADSFICSVLPGASSSQYTPGGLLFKMGESNMQYVTSTSFLLLTYAKYLTSARTVAYCGGSVVTPARLRSIAKKQVDYLLGGNPLKMSYMVGYGLKYPRRIHHRGSSLPSVAVHPTRIQCHDGFSLFTSQSPNPNDLVGAVVGGPDQNDQFPDERSDYGRSEPATYINAPLVGALAYLARS

SEQ ID NO: 45148 - protein, 433 aa, Arabidopsis thaliana
  peptide (1)..(433): Ceres Seq. ID no. 13575917
  misc_feature (1)..(430): Pfam Name: Glycosyl hydrolase family 9 Pfam Description: Glycosyl hydrolase family 9
  misc_feature (1)..(430): Pfam Name: Glycosyl hydrolase family 9 Pfam Description: Glycosyl hydrolase family 9
  misc_feature (1)..(431): Homolog of NCBI NO: 4691450 NR Description: endo-1,4-beta glucanase [Populus alba]
  misc_feature (1)..(433): Homolog of NCBI NO: 11357128 NR Description: cellulase (EC 3.2.1.4) 2 precursor - Monterey
  misc_feature (1)..(433): Homolog of NCBI NO: 7484476 NR Description: cellulase (EC 3.2.1.4) 1 precursor - Monterey
  misc_feature (1)..(433): Homolog of NCBI NO: 34894544 NR Description: putative endo-1,3(4)-beta-glucanase
  misc_feature (1)..(433): Homolog of NCBI NO: 6009979 NR Description: endo-1,4-beta-glucanase [Pisum sativum]
  misc_feature (1)..(431): Homolog of NCBI NO: 4691450 NR Description: endo-1,4-beta glucanase [Populus alba]
  misc_feature (1)..(433): Homolog of NCBI NO: 7484476 NR Description: cellulase (EC 3.2.1.4) 1 precursor - Monterey
  misc_feature (1)..(433): Homolog of NCBI NO: 6009979 NR Description: endo-1,4-beta-glucanase [Pisum sativum]
  misc_feature (1)..(433): Homolog of NCBI NO: 15218612 NR Description: glycosyl hydrolase family 9
  misc_feature (1)..(433): Homolog of NCBI NO: 25350173 NR Description: cellulase (EC 3.2.1.4) [imported] - Arabidopsis
  misc_feature (1)..(433): Homolog of NCBI NO: 15235301 NR Description: glycosyl hydrolase family 9 [Arabidopsis
  misc_feature (1)..(433): Homolog of NCBI NO: 11358947 NR Description: endo-1,3(4)-beta-glucanase (EC 3.2.1.6) - garden
  misc_feature (1)..(433): Homolog of NCBI NO: 1362091 NR Description: cellulase (EC 3.2.1.4) precursor - tomato
  misc_feature (1)..(433): Homolog of NCBI NO: 34894544 NR Description: putative endo-1,3(4)-beta-glucanase
  misc_feature (1)..(433): Homolog of NCBI NO: 11357128 NR Description: cellulase (EC 3.2.1.4) 2 precursor - Monterey
  misc_feature (1)..(433): Homolog of NCBI NO: 1362091 NR Description: cellulase (EC 3.2.1.4) precursor - tomato
  misc_feature (1)..(433): Homolog of NCBI NO: 11358947 NR Description: endo-1,3(4)-beta-glucanase (EC 3.2.1.6) - garden
  misc_feature (1)..(433): Homolog of NCBI NO: 15235301 NR Description: glycosyl hydrolase family 9 [Arabidopsis
  misc_feature (1)..(433): Homolog of NCBI NO: 25350173 NR Description: cellulase (EC 3.2.1.4) [imported] - Arabidopsis
  misc_feature (1)..(433): Homolog of NCBI NO: 15218612 NR Description: glycosyl hydrolase family 9
MTWRSNSGLSDGSALNVDLVGGYYDAGDNMKFGFPMAFTTTMLSWSLIEFGGLMKSELPNAKDAIRWATDFLLKATSHPDTIYVQVGDPNMDHACWERPEDMDTPRSVFKVDKNNPGSDIAGEIAAALAAASIVFRKCDPSYSNHLLQRAITVFTFADKYRGPYSAGLAPEVCPFYCSYSGYQDELLWGAAWLQKATNNPTYLNYIKANGQILGADEFDNMFSWDNKHVGARILLSKEFLIQKVKSLEEYKEHADSFICSVLPGASSSQYTPGGLLFKMGESNMQYVTSTSFLLLTYAKYLTSARTVAYCGGSVVTPARLRSIAKKQVDYLLGGNPLKMSYMVGYGLKYPRRIHHRGSSLPSVAVHPTRIQCHDGFSLFTSQSPNPNDLVGAVVGGPDQNDQFPDERSDYGRSEPATYINAPLVGALAYLARS

SEQ ID NO: 45149 - DNA, 3264 bp, Arabidopsis thaliana
  misc_feature (1)..(3264): Ceres Seq. ID no. 12600209
  misc_feature: MA Experiment ID: 20000171 Result: Down-regulated in Transcription
  misc_feature: MA Experiment 20000171 PARAMETER Experiment Name: At_42deg_Heat_P Parameter: Age (day) Value: 14
  misc_feature: MA Experiment 20000171 PARAMETER Experiment Name: At_42deg_Heat_P Parameter: Organism Value: A. thaliana
  misc_feature: MA Experiment 20000171 PARAMETER Experiment Name: At_42deg_Heat_P Parameter: Plant Line Value: WS
  misc_feature: MA Experiment 20000171 PARAMETER Experiment Name: At_42deg_Heat_P Parameter: Temperature (deg C) Value: 42 vs. 22
  misc_feature: MA Experiment 20000171 PARAMETER Experiment Name: At_42deg_Heat_P Parameter: Timepoint (hr) Value: 1
  misc_feature: MA Experiment 20000171 PARAMETER Experiment Name: At_42deg_Heat_P Parameter: Tissue Value: Aerial
  misc_feature: MA Experiment ID: 20000173 Result: Down-regulated in Transcription
  misc_feature: MA Experiment 20000173 PARAMETER Experiment Name: At_42deg_Heat_P Parameter: Age (day) Value: 14
  misc_feature: MA Experiment 20000173 PARAMETER Experiment Name: At_42deg_Heat_P Parameter: Organism Value: A. thaliana
  misc_feature: MA Experiment 20000173 PARAMETER Experiment Name: At_42deg_Heat_P Parameter: Plant Line Value: WS
  misc_feature: MA Experiment 20000173 PARAMETER Experiment Name: At_42deg_Heat_P Parameter: Temperature (deg C) Value: 42 vs. 22
  misc_feature: MA Experiment 20000173 PARAMETER Experiment Name: At_42deg_Heat_P Parameter: Timepoint (hr) Value: 6
  misc_feature: MA Experiment 20000173 PARAMETER Experiment Name: At_42deg_Heat_P Parameter: Tissue Value: Aerial
  misc_feature: MA Experiment ID: 20000234 Result: Up-regulated in Transcription
  misc_feature: MA Experiment 20000234 PARAMETER Experiment Name: At_Siliques_P Parameter: Age (day) Value: 21
  misc_feature: MA Experiment 20000234 PARAMETER Experiment Name: At_Siliques_P Parameter: Organism Value: A. thaliana
  misc_feature: MA Experiment 20000234 PARAMETER Experiment Name: At_Siliques_P Parameter: Plant Line Value: WS
  misc_feature: MA Experiment 20000234 PARAMETER Experiment Name: At_Siliques_P Parameter: Tissue Value: Less Than 5mm Siliques vs. Whole Plant
  misc_feature: MA Experiment ID: 20000264 Result: Up-regulated in Transcription
  misc_feature: MA Experiment 20000264 PARAMETER Experiment Name: At_Open_Flower_P Parameter: Age (day) Value: 21
  misc_feature: MA Experiment 20000264 PARAMETER Experiment Name: At_Open_Flower_P Parameter: Plant Line Value: WS
  misc_feature: MA Experiment 20000264 PARAMETER Experiment Name: At_Open_Flower_P Parameter: Tissue Value: Open Flower vs. Whole Plant
  misc_feature: MA Experiment ID: 20000265 Result: Up-regulated in Transcription
  misc_feature: MA Experiment 20000265 PARAMETER Experiment Name: At_Open_Flower_P Parameter: Age (day) Value: 21
  misc_feature: MA Experiment 20000265 PARAMETER Experiment Name: At_Open_Flower_P Parameter: Plant Line Value: WS
  misc_feature: MA Experiment 20000265 PARAMETER Experiment Name: At_Open_Flower_P Parameter: Tissue Value: Closed Flower vs. Whole Plant
  misc_feature: MA Experiment ID: 20000286 Result: Up-regulated in Transcription
  misc_feature: MA Experiment 20000286 PARAMETER Experiment Name: At_Open_Flower_P Parameter: Age (day) Value: 21
  misc_feature: MA Experiment 20000286 PARAMETER Experiment Name: At_Open_Flower_P Parameter: Plant Line Value: WS
  misc_feature: MA Experiment 20000286 PARAMETER Experiment Name: At_Open_Flower_P Parameter: Tissue Value: Half Open vs. Whole Plant
  misc_feature: MA Experiment ID: 20000436 Result: Down-regulated in Transcription
  misc_feature: MA Experiment 20000436 PARAMETER Experiment Name: At_Drought_P Parameter: Age (day) Value: 7
  misc_feature: MA Experiment 20000436 PARAMETER Experiment Name: At_Drought_P Parameter: Organism Value: A. thaliana
  misc_feature: MA Experiment 20000436 PARAMETER Experiment Name: At_Drought_P Parameter: Plant Line Value: WS
  misc_feature: MA Experiment 20000436 PARAMETER Experiment Name: At_Drought_P Parameter: Timepoint (hr) Value: 12
  misc_feature: MA Experiment 20000436 PARAMETER Experiment Name: At_Drought_P Parameter: Tissue Value: Whole Plant
  misc_feature: MA Experiment 20000436 PARAMETER Experiment Name: At_Drought_P Parameter: Treatment Value: Drought vs. No Drought
  misc_feature: MA Experiment ID: 20000437 Result: Down-regulated in Transcription
  misc_feature: MA Experiment 20000437 PARAMETER Experiment Name: At_Drought_P Parameter: Age (day) Value: 8
  misc_feature: MA Experiment 20000437 PARAMETER Experiment Name: At_Drought_P Parameter: Organism Value: A. thaliana
  misc_feature: MA Experiment 20000437 PARAMETER Experiment Name: At_Drought_P Parameter: Plant Line Value: WS
  misc_feature: MA Experiment 20000437 PARAMETER Experiment Name: At_Drought_P Parameter: Timepoint (hr) Value: 24
  misc_feature: MA Experiment 20000437 PARAMETER Experiment Name: At_Drought_P Parameter: Tissue Value: Whole Plant
  misc_feature: MA Experiment 20000437 PARAMETER Experiment Name: At_Drought_P Parameter: Treatment Value: Drought vs. No Drought
  misc_feature: MA Experiment ID: 20000438 Result: Up-regulated in Transcription
  misc_feature: MA Experiment 20000438 PARAMETER Experiment Name: At_Shoots__P Parameter: Age (day) Value: 14
  misc_feature: MA Experiment 20000438 PARAMETER Experiment Name: At_Shoots__P Parameter: Tissue Value: Shoots vs. Whole Plant
  misc_feature: MA Experiment ID: 20000794 Result: Up-regulated in Transcription
  misc_feature: MA Experiment 20000794 PARAMETER Experiment Name: At_Petals_P Parameter: Age (day) Value: 23-25 days
  misc_feature: MA Experiment 20000794 PARAMETER Experiment Name: At_Petals_P Parameter: Plant Line Value: WS
  misc_feature: MA Experiment 20000794 PARAMETER Experiment Name: At_Petals_P Parameter: Tissue Value: Petals vs. Whole plant
  misc_feature: MA Experiment ID: 20001554 Result: Down-regulated in Transcription
  misc_feature: MA Experiment 20001554 PARAMETER Experiment Name: At_Drought_Soil_Dry_P Parameter: Age (day) Value: 21
  misc_feature: MA Experiment 20001554 PARAMETER Experiment Name: At_Drought_Soil_Dry_P Parameter: Organism Value: A. thaliana
  misc_feature: MA Experiment 20001554 PARAMETER Experiment Name: At_Drought_Soil_Dry_P Parameter: Plant Line Value: WS
  misc_feature: MA Experiment 20001554 PARAMETER Experiment Name: At_Drought_Soil_Dry_P Parameter: Post Timepoint (hr) Value: None
  misc_feature: MA Experiment 20001554 PARAMETER Experiment Name: At_Drought_Soil_Dry_P Parameter: Post-Treatment Value: None
  misc_feature: MA Experiment 20001554 PARAMETER Experiment Name: At_Drought_Soil_Dry_P Parameter: Timepoint (day) Value: 7
  misc_feature: MA Experiment 20001554 PARAMETER Experiment Name: At_Drought_Soil_Dry_P Parameter: Treatment Value: Drought vs. No Drought
  misc_feature: MA Experiment ID: 20001555 Result: Down-regulated in Transcription
  misc_feature: MA Experiment 20001555 PARAMETER Experiment Name: At_Drought_Soil_Dry_P Parameter: Age (day) Value: 24
  misc_feature: MA Experiment 20001555 PARAMETER Experiment Name: At_Drought_Soil_Dry_P Parameter: Organism Value: A. thaliana
  misc_feature: MA Experiment 20001555 PARAMETER Experiment Name: At_Drought_Soil_Dry_P Parameter: Plant Line Value: WS
  misc_feature: MA Experiment 20001555 PARAMETER Experiment Name: At_Drought_Soil_Dry_P Parameter: Post Timepoint (hr) Value: None
  misc_feature: MA Experiment 20001555 PARAMETER Experiment Name: At_Drought_Soil_Dry_P Parameter: Post-Treatment Value: None
  misc_feature: MA Experiment 20001555 PARAMETER Experiment Name: At_Drought_Soil_Dry_P Parameter: Timepoint (day) Value: 10
  misc_feature: MA Experiment 20001555 PARAMETER Experiment Name: At_Drought_Soil_Dry_P Parameter: Treatment Value: Drought vs. No Drought
  misc_feature: MA Experiment ID: 20001556 Result: Down-regulated in Transcription
  misc_feature: MA Experiment 20001556 PARAMETER Experiment Name: At_Drought_Soil_Dry_P Parameter: Age (day) Value: 26
  misc_feature: MA Experiment 20001556 PARAMETER Experiment Name: At_Drought_Soil_Dry_P Parameter: Organism Value: A. thaliana
  misc_feature: MA Experiment 20001556 PARAMETER Experiment Name: At_Drought_Soil_Dry_P Parameter: Plant Line Value: WS
  misc_feature: MA Experiment 20001556 PARAMETER Experiment Name: At_Drought_Soil_Dry_P Parameter: Post Timepoint (hr) Value: None
  misc_feature: MA Experiment 20001556 PARAMETER Experiment Name: At_Drought_Soil_Dry_P Parameter: Post-Treatment Value: None
  misc_feature: MA Experiment 20001556 PARAMETER Experiment Name: At_Drought_Soil_Dry_P Parameter: Timepoint (day) Value: 12
  misc_feature: MA Experiment 20001556 PARAMETER Experiment Name: At_Drought_Soil_Dry_P Parameter: Treatment Value: Drought vs. No Drought
  misc_feature: MA Experiment ID: 20001904 Result: Down-regulated in Transcription
  misc_feature: MA Experiment 20001904 PARAMETER Experiment Name: At_Drought_Reproduction_P Parameter: Age (day) Value: 37
  misc_feature: MA Experiment 20001904 PARAMETER Experiment Name: At_Drought_Reproduction_P Parameter: Organism Value: A. thaliana
  misc_feature: MA Experiment 20001904 PARAMETER Experiment Name: At_Drought_Reproduction_P Parameter: Plant Line Value: WS
  misc_feature: MA Experiment 20001904 PARAMETER Experiment Name: At_Drought_Reproduction_P Parameter: Timepoint (day) Value: 7
  misc_feature: MA Experiment 20001904 PARAMETER Experiment Name: At_Drought_Reproduction_P Parameter: Tissue Value: Rosettes
  misc_feature: MA Experiment 20001904 PARAMETER Experiment Name: At_Drought_Reproduction_P Parameter: Treatment Value: Drought vs. No Drought
  misc_feature: MA Experiment ID: 20001905 Result: Down-regulated in Transcription
  misc_feature: MA Experiment 20001905 PARAMETER Experiment Name: At_Drought_Reproduction_P Parameter: Age (day) Value: 40
  misc_feature: MA Experiment 20001905 PARAMETER Experiment Name: At_Drought_Reproduction_P Parameter: Organism Value: A. thaliana
  misc_feature: MA Experiment 20001905 PARAMETER Experiment Name: At_Drought_Reproduction_P Parameter: Plant Line Value: WS
  misc_feature: MA Experiment 20001905 PARAMETER Experiment Name: At_Drought_Reproduction_P Parameter: Timepoint (day) Value: 10
  misc_feature: MA Experiment 20001905 PARAMETER Experiment Name: At_Drought_Reproduction_P Parameter: Tissue Value: Rosettes
  misc_feature: MA Experiment 20001905 PARAMETER Experiment Name: At_Drought_Reproduction_P Parameter: Treatment Value: Drought vs. No Drought
agactagagaagaaaaaccaaaaaccctaaaaaaagaaaaagagagagattgttttcacattttcgcggttttcttcttctccttgtatttatctctgaagtcgtgcttttgatgtgaaaggagaagaagcttgaagacagacaactttaaagttgacgaaaccaatgcttctggtgaagttttgagcttttgagcgatcttttgggtcttgctcttgctcttgaggcagagaacccatagacagttgttttgtctgtttgttggtgtcagatccaaaatcaagaggctgttatagctttgacttggaagtgatttgacacaatgaaggaagaagattcaaaaaaaataagagggtaggaatctatttggtcgcttttgcttcctcctattctggggagaatttgggatcttggagttgaatccgttgtgagaagaaggatctttttgagcttgtgtactgtgtcctctcagttgattcatcgcagagagaagaggtcctgtcatgtctatgagttttgtattcatctgaaaggtcttactggaatgacttatcaaaggggagagtctttggttcctgtcttgatttccaacttggtgggggcataggccaaataatgcaaacctaaaatccttgtttcttccagaatcttgtgagctttttaatctctccaacaaagtacaatttctctgaggattgtgttattacacagagaaaacaaaaagagggtccaagaaaatctcttgcattctcttctcctctctctggtattggtatcttcaaatgagtcgactacagaagcgagggaaacaggaaaagcctgttgtatctgatggagctcaaaaggttattgttgctgttaaagcatctagggagattccaaagactgccttgatttgggctttgactcatgttgttcagcctggggattgcattacccttattgttgttgtcccttctcacaactccggacgaaaactttggggtttcactaagagtttccctatgtttgctggggattgtgcaagtggtcatcggaaatcacattctgaagcactaccggagattaaaagtgatctcactgacacttgttcccaaatgattctccagcttcatgatgtctatgacccgaataagataaatgtcaagattaagattgtttctggatcaccctgtggagcagttgctgctgagtcgaagaaagcgcaagcgaactgggtagtaatggacaaacacctcaagcaggaagagaaacggtgtatggatgaattgcaatgcaacattgtggtgatgaagcgttcgcaggcaaaagttctacgcttaaaccttgttggatctcctaagaaagatgctggaaaagagtgtcccttaccatctggaccagaagcagcatctgagaaacactcaaagaacactaaaggattgttagatgctgatagaggactacctgtcactcctactagcagccctgagctggggacaccgttcacaagtacagaagccgggacttcatctgtgtcgagctccgacctgggaacttcacctttcttcacattgggaatgaacggatacatgaagaaggatggagcattggtgatcaaggagaatgatggtcttgatgattctggctctgaaacagagagtgaaaaccaatcattagcgtcaacgagtatgagattccagccatggatatcagaatatattggcacccatcgccactcatcccaggaggccgaagaaagcttattatggaaaaatgatgacagggcacaaatatccactacaaaggctttgcttgaaaagttctctaaacttgatgttgaagttgggttgtcgtctagtcgaaggatggatttagagtttagtggaaacgtaagagatgcaatatcactctctcgaagtgctcctcctggtccacctcctctctgttcaatttgccagcacaaggcgccagtatttgggaaacccccaaggctgtttacatacgctgaattagagcttgcaacgggtgggttttcacaggctaacttcttggctgagggtggttatggatctgttcatcggggtgtgctaccagaaggccaggtagttgcagtaaagcaacacaaattggccagttctcaaggagatgtagagttttgctccgaagtggaagttctcagctgtgctcagcacagaaacgtcgttatgctaattggtttctgcattgaagacagcagacggctcttggtctatgaatacatttgcaatggttcacttgactctcatctatacggtcgtcaaaaggaaactctggaatggccagcacggcaaaagattgctgttggagctgcaagaggtcttcggtatcttcacgaagagtgcagagttggctgtattgtccacagagacatgcgtcctaacaacatcctcatcactcatgataatgagccactggttggagattttggtctagcaagatggcagcctgatggggaaatgggtgtagatacacgagtgataggaaccttcggctatctagctcccgaatatgctcaaagcgggcaaatcacagaaaaagctgatgtctactcgttcggggttgttctagttgagctagtcactggccgcaaagccattgatatcaccaggccgaaaggccagcaatgcctgactgaatgggcacgtcctctactggaagaatatgcgatagatgaacttatcgatccgaggcttgggaaccgttttgtagaaagtgaggtcatttgtatgcttcatgcagcttcgttgtgcatacgtagagatccacatttgaggccacgcatgtctcaggtgttgcgtatactggaaggagatatgataatggatggaaactacgcatcaactccaggttcagaggcaggcaaccgaagcgggaggttctgggcggatcattacagcggtcagctaacgaatgatggctcggataggttcagtgaaaggctgtctgttgaaacgccaagactagctttgagggagagggaaagaagccagaggtttgaactaaaccataacaagcaatactaatcacactactttgctttatgataagtttagttgatagggtatttagtaaagtcctctgttttaagtgatgtggtccaaagctggcaacacagctttttttgtttgtatagtggggtaagatgcaaaaacagttgctaaatatgttatcaaggaatttaaaattgtttttggtaaaggagtattaaaagaacaaaacaacaagagaggctttttctccttt

SEQ ID NO: 45150 - protein, 753 aa, Arabidopsis thaliana
  peptide (1)..(753): Ceres Seq. ID no. 12600210
  misc_feature (18)..(148): Pfam Name: Universal stress protein family Pfam Description: Universal stress protein family
  misc_feature (399)..(715): Homolog of NCBI NO: 34904234 NR Description: putative receptor protein kinase PERK1
  misc_feature (350)..(682): Homolog of NCBI NO: 15221470 NR Description: protein kinase, putative
  misc_feature (399)..(718): Homolog of NCBI NO: 29367569 NR Description: putative receptor protein kinase
  misc_feature (1)..(287): Homolog of NCBI NO: 15222672 NR Description: protein kinase, putative
  misc_feature (139)..(710): Homolog of NCBI NO: 10880466 NR Description: dual-specific kinase DSK1 [Nicotiana tabacum]
  misc_feature (200)..(702): Homolog of NCBI NO: 15222672 NR Description: protein kinase, putative
  misc_feature (23)..(677): Homolog of NCBI NO: 10176783 NR Description: contains similarity to protein
  misc_feature (20)..(688): Homolog of NCBI NO: 15810441 NR Description: unknown protein [Arabidopsis thaliana]
  misc_feature (20)..(688): Homolog of NCBI NO: 18423902 NR Description: putative protein; protein id: At5g56790.1
  misc_feature (1)..(705): Homolog of NCBI NO: 34912394 NR Description: putative protein kinase APK1B, Serine/Threonine
MSRLQKRGKQEKPVVSDGAQKVIVAVKASREIPKTALIWALTHVVQPGDCITLIVVVPSHNSGRKLWGFTKSFPMFAGDCASGHRKSHSEALPEIKSDLTDTCSQMILQLHDVYDPNKINVKIKIVSGSPCGAVAAESKKAQANWVVMDKHLKQEEKRCMDELQCNIVVMKRSQAKVLRLNLVGSPKKDAGKECPLPSGPEAASEKHSKNTKGLLDADRGLPVTPTSSPELGTPFTSTEAGTSSVSSSDLGTSPFFTLGMNGYMKKDGALVIKENDGLDDSGSETESENQSLASTSMRFQPWISEYIGTHRHSSQEAEESLLWKNDDRAQISTTKALLEKFSKLDVEVGLSSSRRMDLEFSGNVRDAISLSRSAPPGPPPLCSICQHKAPVFGKPPRLFTYAELELATGGFSQANFLAEGGYGSVHRGVLPEGQVVAVKQHKLASSQGDVEFCSEVEVLSCAQHRNVVMLIGFCIEDSRRLLVYEYICNGSLDSHLYGRQKETLEWPARQKIAVGAARGLRYLHEECRVGCIVHRDMRPNNILITHDNEPLVGDFGLARWQPDGEMGVDTRVIGTFGYLAPEYAQSGQITEKADVYSFGVVLVELVTGRKAIDITRPKGQQCLTEWARPLLEEYAIDELIDPRLGNRFVESEVICMLHAASLCIRRDPHLRPRMSQVLRILEGDMIMDGNYASTPGSEAGNRSGRFWADHYSGQLTNDGSDRFSERLSVETPRLALRERERSQRFELNHNKQY

SEQ ID NO: 45151 - protein, 679 aa, Arabidopsis thaliana
  peptide (1)..(679): Ceres Seq. ID no. 12600211
  misc_feature (1)..(74): Pfam Name: Universal stress protein family Pfam Description: Universal stress protein family
  misc_feature (325)..(641): Homolog of NCBI NO: 34904234 NR Description: putative receptor protein kinase PERK1
  misc_feature (276)..(608): Homolog of NCBI NO: 15221470 NR Description: protein kinase, putative
  misc_feature (325)..(644): Homolog of NCBI NO: 29367569 NR Description: putative receptor protein kinase
  misc_feature (1)..(213): Homolog of NCBI NO: 15222672 NR Description: protein kinase, putative
  misc_feature (65)..(636): Homolog of NCBI NO: 10880466 NR Description: dual-specific kinase DSK1 [Nicotiana tabacum]
  misc_feature (126)..(628): Homolog of NCBI NO: 15222672 NR Description: protein kinase, putative
  misc_feature (1)..(603): Homolog of NCBI NO: 10176783 NR Description: contains similarity to protein
  misc_feature (1)..(614): Homolog of NCBI NO: 15810441 NR Description: unknown protein [Arabidopsis thaliana]
  misc_feature (1)..(614): Homolog of NCBI NO: 18423902 NR Description: putative protein; protein id: At5g56790.1
  misc_feature (1)..(631): Homolog of NCBI NO: 34912394 NR Description: putative protein kinase APK1B, Serine/Threonine
MFAGDCASGHRKSHSEALPEIKSDLTDTCSQMILQLHDVYDPNKINVKIKIVSGSPCGAVAAESKKAQANWVVMDKHLKQEEKRCMDELQCNIVVMKRSQAKVLRLNLVGSPKKDAGKECPLPSGPEAASEKHSKNTKGLLDADRGLPVTPTSSPELGTPFTSTEAGTSSVSSSDLGTSPFFTLGMNGYMKKDGALVIKENDGLDDSGSETESENQSLASTSMRFQPWISEYIGTHRHSSQEAEESLLWKNDDRAQISTTKALLEKFSKLDVEVGLSSSRRMDLEFSGNVRDAISLSRSAPPGPPPLCSICQHKAPVFGKPPRLFTYAELELATGGFSQANFLAEGGYGSVHRGVLPEGQVVAVKQHKLASSQGDVEFCSEVEVLSCAQHRNVVMLIGFCIEDSRRLLVYEYICNGSLDSHLYGRQKETLEWPARQKIAVGAARGLRYLHEECRVGCIVHRDMRPNNILITHDNEPLVGDFGLARWQPDGEMGVDTRVIGTFGYLAPEYAQSGQITEKADVYSFGVVLVELVTGRKAIDITRPKGQQCLTEWARPLLEEYAIDELIDPRLGNRFVESEVICMLHAASLCIRRDPHLRPRMSQVLRILEGDMIMDGNYASTPGSEAGNRSGRFWADHYSGQLTNDGSDRFSERLSVETPRLALRERERSQRFELNHNKQY

SEQ ID NO: 45152 - protein, 648 aa, Arabidopsis thaliana
  peptide (1)..(648): Ceres Seq. ID no. 12600212
  misc_feature (294)..(610): Homolog of NCBI NO: 34904234 NR Description: putative receptor protein kinase PERK1
  misc_feature (245)..(577): Homolog of NCBI NO: 15221470 NR Description: protein kinase, putative
  misc_feature (294)..(613): Homolog of NCBI NO: 29367569 NR Description: putative receptor protein kinase
  misc_feature (1)..(182): Homolog of NCBI NO: 15222672 NR Description: protein kinase, putative
  misc_feature (34)..(605): Homolog of NCBI NO: 10880466 NR Description: dual-specific kinase DSK1 [Nicotiana tabacum]
  misc_feature (95)..(597): Homolog of NCBI NO: 15222672 NR Description: protein kinase, putative
  misc_feature (1)..(572): Homolog of NCBI NO: 10176783 NR Description: contains similarity to protein
  misc_feature (1)..(583): Homolog of NCBI NO: 15810441 NR Description: unknown protein [Arabidopsis thaliana]
  misc_feature (1)..(583): Homolog of NCBI NO: 18423902 NR Description: putative protein; protein id: At5g56790.1
  misc_feature (1)..(600): Homolog of NCBI NO: 34912394 NR Description: putative protein kinase APK1B, Serine/Threonine
MILQLHDVYDPNKINVKIKIVSGSPCGAVAAESKKAQANWVVMDKHLKQEEKRCMDELQCNIVVMKRSQAKVLRLNLVGSPKKDAGKECPLPSGPEAASEKHSKNTKGLLDADRGLPVTPTSSPELGTPFTSTEAGTSSVSSSDLGTSPFFTLGMNGYMKKDGALVIKENDGLDDSGSETESENQSLASTSMRFQPWISEYIGTHRHSSQEAEESLLWKNDDRAQISTTKALLEKFSKLDVEVGLSSSRRMDLEFSGNVRDAISLSRSAPPGPPPLCSICQHKAPVFGKPPRLFTYAELELATGGFSQANFLAEGGYGSVHRGVLPEGQVVAVKQHKLASSQGDVEFCSEVEVLSCAQHRNVVMLIGFCIEDSRRLLVYEYICNGSLDSHLYGRQKETLEWPARQKIAVGAARGLRYLHEECRVGCIVHRDMRPNNILITHDNEPLVGDFGLARWQPDGEMGVDTRVIGTFGYLAPEYAQSGQITEKADVYSFGVVLVELVTGRKAIDITRPKGQQCLTEWARPLLEEYAIDELIDPRLGNRFVESEVICMLHAASLCIRRDPHLRPRMSQVLRILEGDMIMDGNYASTPGSEAGNRSGRFWADHYSGQLTNDGSDRFSERLSVETPRLALRERERSQRFELNHNKQY

SEQ ID NO: 45153 - DNA, 3085 bp, Arabidopsis thaliana
  misc_feature (1)..(3085): Ceres Seq. ID no. 13592143
  misc_feature: MA Experiment ID: 20000182 Result: Up-regulated in Transcription
  misc_feature: MA Experiment 20000182 PARAMETER Experiment Name: At_2mM_SA_P Parameter: Age (day) Value: 14
  misc_feature: MA Experiment 20000182 PARAMETER Experiment Name: At_2mM_SA_P Parameter: Organism Value: A. thaliana
  misc_feature: MA Experiment 20000182 PARAMETER Experiment Name: At_2mM_SA_P Parameter: Plant Line Value: WS
  misc_feature: MA Experiment 20000182 PARAMETER Experiment Name: At_2mM_SA_P Parameter: Timepoint (hr) Value: 6
  misc_feature: MA Experiment 20000182 PARAMETER Experiment Name: At_2mM_SA_P Parameter: Tissue Value: Aerial
  misc_feature: MA Experiment 20000182 PARAMETER Experiment Name: At_2mM_SA_P Parameter: Treatment Value: 2mM SA vs. No Treatment
  misc_feature: MA Experiment ID: 20000184 Result: Up-regulated in Transcription
  misc_feature: MA Experiment 20000184 PARAMETER Experiment Name: At_Shoots__P Parameter: Age (day) Value: 7
  misc_feature: MA Experiment 20000184 PARAMETER Experiment Name: At_Shoots__P Parameter: Tissue Value: Shoots vs. Whole Plant
  misc_feature: MA Experiment ID: 20000185 Result: Down-regulated in Transcription
  misc_feature: MA Experiment 20000185 PARAMETER Experiment Name: At_Roots__P Parameter: Age (day) Value: 7 vs. 21
  misc_feature: MA Experiment 20000185 PARAMETER Experiment Name: At_Roots__P Parameter: Organism Value: A. thaliana
  misc_feature: MA Experiment 20000185 PARAMETER Experiment Name: At_Roots__P Parameter: Tissue Value: Roots vs. Whole Plant
  misc_feature: MA Experiment ID: 20000213 Result: Up-regulated in Transcription
  misc_feature: MA Experiment 20000213 PARAMETER Experiment Name: At_4deg_Cold_P Parameter: Timepoint (hr) Value: 2
  misc_feature: MA Experiment ID: 20000234 Result: Down-regulated in Transcription
  misc_feature: MA Experiment 20000234 PARAMETER Experiment Name: At_Siliques_P Parameter: Age (day) Value: 21
  misc_feature: MA Experiment 20000234 PARAMETER Experiment Name: At_Siliques_P Parameter: Organism Value: A. thaliana
  misc_feature: MA Experiment 20000234 PARAMETER Experiment Name: At_Siliques_P Parameter: Plant Line Value: WS
  misc_feature: MA Experiment 20000234 PARAMETER Experiment Name: At_Siliques_P Parameter: Tissue Value: Less Than 5mm Siliques vs. Whole Plant
  misc_feature: MA Experiment ID: 20000264 Result: Down-regulated in Transcription
  misc_feature: MA Experiment 20000264 PARAMETER Experiment Name: At_Open_Flower_P Parameter: Age (day) Value: 21
  misc_feature: MA Experiment 20000264 PARAMETER Experiment Name: At_Open_Flower_P Parameter: Plant Line Value: WS
  misc_feature: MA Experiment 20000264 PARAMETER Experiment Name: At_Open_Flower_P Parameter: Tissue Value: Open Flower vs. Whole Plant
  misc_feature: MA Experiment ID: 20000265 Result: Down-regulated in Transcription
  misc_feature: MA Experiment 20000265 PARAMETER Experiment Name: At_Open_Flower_P Parameter: Age (day) Value: 21
  misc_feature: MA Experiment 20000265 PARAMETER Experiment Name: At_Open_Flower_P Parameter: Plant Line Value: WS
  misc_feature: MA Experiment 20000265 PARAMETER Experiment Name: At_Open_Flower_P Parameter: Tissue Value: Closed Flower vs. Whole Plant
  misc_feature: MA Experiment ID: 20000267 Result: Down-regulated in Transcription
  misc_feature: MA Experiment 20000267 PARAMETER Experiment Name: At_Drought_P Parameter: Age (day) Value: 7
  misc_feature: MA Experiment 20000267 PARAMETER Experiment Name: At_Drought_P Parameter: Organism Value: A. thaliana
  misc_feature: MA Experiment 20000267 PARAMETER Experiment Name: At_Drought_P Parameter: Plant Line Value: WS
  misc_feature: MA Experiment 20000267 PARAMETER Experiment Name: At_Drought_P Parameter: Timepoint (hr) Value: 6
  misc_feature: MA Experiment 20000267 PARAMETER Experiment Name: At_Drought_P Parameter: Tissue Value: Whole Plant
  misc_feature: MA Experiment 20000267 PARAMETER Experiment Name: At_Drought_P Parameter: Treatment Value: Drought vs. No Drought
  misc_feature: MA Experiment ID: 20000269 Result: Up-regulated in Transcription
  misc_feature: MA Experiment 20000269 PARAMETER Experiment Name: At_1mM_KNO3_L-vs-H_Roots_P Parameter: Age (day) Value: 7,10,12
  misc_feature: MA Experiment 20000269 PARAMETER Experiment Name: At_1mM_KNO3_L-vs-H_Roots_P Parameter: Organism Value: A. thaliana
  misc_feature: MA Experiment 20000269 PARAMETER Experiment Name: At_1mM_KNO3_L-vs-H_Roots_P Parameter: Plant Line Value: WS
  misc_feature: MA Experiment 20000269 PARAMETER Experiment Name: At_1mM_KNO3_L-vs-H_Roots_P Parameter: Timepoint (day) Value: 7,10,12
  misc_feature: MA Experiment 20000269 PARAMETER Experiment Name: At_1mM_KNO3_L-vs-H_Roots_P Parameter: Tissue Value: Roots
  misc_feature: MA Experiment 20000269 PARAMETER Experiment Name: At_1mM_KNO3_L-vs-H_Roots_P Parameter: Treatment Value: 1mM KNO3 vs. 50mM KNO3
  misc_feature: MA Experiment ID: 20000286 Result: Down-regulated in Transcription
  misc_feature: MA Experiment 20000286 PARAMETER Experiment Name: At_Open_Flower_P Parameter: Age (day) Value: 21
  misc_feature: MA Experiment 20000286 PARAMETER Experiment Name: At_Open_Flower_P Parameter: Plant Line Value: WS
  misc_feature: MA Experiment 20000286 PARAMETER Experiment Name: At_Open_Flower_P Parameter: Tissue Value: Half Open vs. Whole Plant
  misc_feature: MA Experiment ID: 20000308 Result: Down-regulated in Transcription
  misc_feature: MA Experiment 20000308 PARAMETER Experiment Name: At_100mM_NaCl__P Parameter: Age (day) Value: 17
  misc_feature: MA Experiment 20000308 PARAMETER Experiment Name: At_100mM_NaCl__P Parameter: Organism Value: A. thaliana
  misc_feature: MA Experiment 20000308 PARAMETER Experiment Name: At_100mM_NaCl__P Parameter: Plant Line Value: WS
  misc_feature: MA Experiment 20000308 PARAMETER Experiment Name: At_100mM_NaCl__P Parameter: Timepoint (hr) Value: 72
  misc_feature: MA Experiment 20000308 PARAMETER Experiment Name: At_100mM_NaCl__P Parameter: Tissue Value: Whole Plant
  misc_feature: MA Experiment 20000308 PARAMETER Experiment Name: At_100mM_NaCl__P Parameter: Treatment Value: 100mM NaCl vs. No Treatment
  misc_feature: MA Experiment ID: 20000437 Result: Down-regulated in Transcription
  misc_feature: MA Experiment 20000437 PARAMETER Experiment Name: At_Drought_P Parameter: Age (day) Value: 8
  misc_feature: MA Experiment 20000437 PARAMETER Experiment Name: At_Drought_P Parameter: Organism Value: A. thaliana
  misc_feature: MA Experiment 20000437 PARAMETER Experiment Name: At_Drought_P Parameter: Plant Line Value: WS
  misc_feature: MA Experiment 20000437 PARAMETER Experiment Name: At_Drought_P Parameter: Timepoint (hr) Value: 24
  misc_feature: MA Experiment 20000437 PARAMETER Experiment Name: At_Drought_P Parameter: Tissue Value: Whole Plant
  misc_feature: MA Experiment 20000437 PARAMETER Experiment Name: At_Drought_P Parameter: Treatment Value: Drought vs. No Drought
  misc_feature: MA Experiment ID: 20000441 Result: Up-regulated in Transcription
  misc_feature: MA Experiment 20000441 PARAMETER Experiment Name: At_1uM_BR-BRZ__P Parameter: Tissue Value: Shoot Apices
  misc_feature: MA Experiment 20000441 PARAMETER Experiment Name: At_1uM_BR-BRZ__P Parameter: Treatment Value: 1uM BR vs. No Treatment
  misc_feature: MA Experiment ID: 20000443 Result: Up-regulated in Transcription
  misc_feature: MA Experiment 20000443 PARAMETER Experiment Name: At_1uM_BR-BRZ__P Parameter: Tissue Value: Shoot Apices
  misc_feature: MA Experiment 20000443 PARAMETER Experiment Name: At_1uM_BR-BRZ__P Parameter: Treatment Value: 1uM BRZ vs. No Treatment
  misc_feature: MA Experiment ID: 20000495 Result: Down-regulated in Transcription
  misc_feature: MA Experiment 20000495 PARAMETER Experiment Name: At_Guard_Cells_P Parameter: Harvest Date Value: 8/2/2002
  misc_feature: MA Experiment 20000495 PARAMETER Experiment Name: At_Guard_Cells_P Parameter: Organism Value: A. thaliana
  misc_feature: MA Experiment 20000495 PARAMETER Experiment Name: At_Guard_Cells_P Parameter: Tissue Value: Guard Cells vs. Leaves
  misc_feature: MA Experiment ID: 20000709 Result: Up-regulated in Transcription
  misc_feature: MA Experiment 20000709 PARAMETER Experiment Name: At_15mM_NH4NO3_L-to-H_P Parameter: Age (hr) Value: 14
  misc_feature: MA Experiment 20000709 PARAMETER Experiment Name: At_15mM_NH4NO3_L-to-H_P Parameter: Organism Value: A. thaliana
  misc_feature: MA Experiment 20000709 PARAMETER Experiment Name: At_15mM_NH4NO3_L-to-H_P Parameter: Plant Line Value: WS
  misc_feature: MA Experiment 20000709 PARAMETER Experiment Name: At_15mM_NH4NO3_L-to-H_P Parameter: Timepoint (hr) Value: 4
  misc_feature: MA Experiment 20000709 PARAMETER Experiment Name: At_15mM_NH4NO3_L-to-H_P Parameter: Tissue Value: Aerial
  misc_feature: MA Experiment 20000709 PARAMETER Experiment Name: At_15mM_NH4NO3_L-to-H_P Parameter: Treatment Value: 15mM NH4NO3 vs. 30mM Mannitol
  misc_feature: MA Experiment ID: 20000794 Result: Down-regulated in Transcription
  misc_feature: MA Experiment 20000794 PARAMETER Experiment Name: At_Petals_P Parameter: Age (day) Value: 23-25 days
  misc_feature: MA Experiment 20000794 PARAMETER Experiment Name: At_Petals_P Parameter: Plant Line Value: WS
  misc_feature: MA Experiment 20000794 PARAMETER Experiment Name: At_Petals_P Parameter: Tissue Value: Petals vs. Whole plant
  misc_feature: MA Experiment ID: 20001457 Result: Up-regulated in Transcription
  misc_feature: MA Experiment 20001457 PARAMETER Experiment Name: At_50mM_NH4NO3_L-to-H_P Parameter: Age (day) Value: Undefined
  misc_feature: MA Experiment 20001457 PARAMETER Experiment Name: At_50mM_NH4NO3_L-to-H_P Parameter: Organism Value: Undefined
  misc_feature: MA Experiment 20001457 PARAMETER Experiment Name: At_50mM_NH4NO3_L-to-H_P Parameter: Plant Line Value: Undefined
  misc_feature: MA Experiment 20001457 PARAMETER Experiment Name: At_50mM_NH4NO3_L-to-H_P Parameter: Timepoint (hr) Value: 0.5
  misc_feature: MA Experiment 20001457 PARAMETER Experiment Name: At_50mM_NH4NO3_L-to-H_P Parameter: Tissue Value: Siliques
  misc_feature: MA Experiment 20001457 PARAMETER Experiment Name: At_50mM_NH4NO3_L-to-H_P Parameter: Treatment Value: 50mM NH4NO3 vs. 100mM Manitol
  misc_feature: MA Experiment ID: 20001458 Result: Up-regulated in Transcription
  misc_feature: MA Experiment 20001458 PARAMETER Experiment Name: At_50mM_NH4NO3_L-to-H_P Parameter: Age (day) Value: Undefined
  misc_feature: MA Experiment 20001458 PARAMETER Experiment Name: At_50mM_NH4NO3_L-to-H_P Parameter: Organism Value: Undefined
  misc_feature: MA Experiment 20001458 PARAMETER Experiment Name: At_50mM_NH4NO3_L-to-H_P Parameter: Plant Line Value: Undefined
  misc_feature: MA Experiment 20001458 PARAMETER Experiment Name: At_50mM_NH4NO3_L-to-H_P Parameter: Timepoint (hr) Value: 2
  misc_feature: MA Experiment 20001458 PARAMETER Experiment Name: At_50mM_NH4NO3_L-to-H_P Parameter: Tissue Value: Siliques
  misc_feature: MA Experiment 20001458 PARAMETER Experiment Name: At_50mM_NH4NO3_L-to-H_P Parameter: Treatment Value: 50mM NH4NO3 vs. 100mM Manitol
  misc_feature: MA Experiment ID: 20001459 Result: Up-regulated in Transcription
  misc_feature: MA Experiment 20001459 PARAMETER Experiment Name: At_50mM_NH4NO3_L-to-H_P Parameter: Age (day) Value: Undefined
  misc_feature: MA Experiment 20001459 PARAMETER Experiment Name: At_50mM_NH4NO3_L-to-H_P Parameter: Organism Value: Undefined
  misc_feature: MA Experiment 20001459 PARAMETER Experiment Name: At_50mM_NH4NO3_L-to-H_P Parameter: Plant Line Value: Undefined
  misc_feature: MA Experiment 20001459 PARAMETER Experiment Name: At_50mM_NH4NO3_L-to-H_P Parameter: Timepoint (hr) Value: 4
  misc_feature: MA Experiment 20001459 PARAMETER Experiment Name: At_50mM_NH4NO3_L-to-H_P Parameter: Tissue Value: Siliques
  misc_feature: MA Experiment 20001459 PARAMETER Experiment Name: At_50mM_NH4NO3_L-to-H_P Parameter: Treatment Value: 50mM NH4NO3 vs. 100mM Manitol
  misc_feature: MA Experiment ID: 20001557 Result: Up-regulated in Transcription
  misc_feature: MA Experiment 20001557 PARAMETER Experiment Name: At_Drought_Soil_Dry_P Parameter: Age (day) Value: 27
  misc_feature: MA Experiment 20001557 PARAMETER Experiment Name: At_Drought_Soil_Dry_P Parameter: Organism Value: A. thaliana
  misc_feature: MA Experiment 20001557 PARAMETER Experiment Name: At_Drought_Soil_Dry_P Parameter: Plant Line Value: WS
  misc_feature: MA Experiment 20001557 PARAMETER Experiment Name: At_Drought_Soil_Dry_P Parameter: Post Timepoint (hr) Value: 3
  misc_feature: MA Experiment 20001557 PARAMETER Experiment Name: At_Drought_Soil_Dry_P Parameter: Post-Treatment Value: Re-Water vs. No Drought
  misc_feature: MA Experiment 20001557 PARAMETER Experiment Name: At_Drought_Soil_Dry_P Parameter: Timepoint (day) Value: 13
  misc_feature: MA Experiment 20001557 PARAMETER Experiment Name: At_Drought_Soil_Dry_P Parameter: Treatment Value: Drought vs. No Drought
  misc_feature: MA Experiment ID: 20001755 Result: Up-regulated in Transcription
  misc_feature: MA Experiment 20001755 PARAMETER Experiment Name: At_50mM_NH4NO3_L-to-H_P Parameter: Timepoint (hr) Value: 2
  misc_feature: MA Experiment 20001755 PARAMETER Experiment Name: At_50mM_NH4NO3_L-to-H_P Parameter: Tissue Value: Leaf
  misc_feature: MA Experiment 20001755 PARAMETER Experiment Name: At_50mM_NH4NO3_L-to-H_P Parameter: Treatment Value: 50mM NH4NO3 vs 100mM Mannitol
  misc_feature: MA Experiment ID: 20001757 Result: Up-regulated in Transcription
  misc_feature: MA Experiment 20001757 PARAMETER Experiment Name: At_50mM_NH4NO3_L-to-H_P Parameter: Timepoint (hr) Value: 6
  misc_feature: MA Experiment 20001757 PARAMETER Experiment Name: At_50mM_NH4NO3_L-to-H_P Parameter: Tissue Value: Leaf
  misc_feature: MA Experiment 20001757 PARAMETER Experiment Name: At_50mM_NH4NO3_L-to-H_P Parameter: Treatment Value: 50mM NH4NO3 vs 100mM Mannitol
  misc_feature: MA Experiment ID: 20001759 Result: Up-regulated in Transcription
  misc_feature: MA Experiment 20001759 PARAMETER Experiment Name: At_50mM_NH4NO3_L-to-H_P Parameter: Timepoint (hr) Value: 1
  misc_feature: MA Experiment 20001759 PARAMETER Experiment Name: At_50mM_NH4NO3_L-to-H_P Parameter: Tissue Value: Siliques
  misc_feature: MA Experiment 20001759 PARAMETER Experiment Name: At_50mM_NH4NO3_L-to-H_P Parameter: Treatment Value: 50mM NH4NO3 vs 100mM Mannitol
  misc_feature: MA Experiment ID: 20001760 Result: Up-regulated in Transcription
  misc_feature: MA Experiment 20001760 PARAMETER Experiment Name: At_50mM_NH4NO3_L-to-H_P Parameter: Timepoint (hr) Value: 2
  misc_feature: MA Experiment 20001760 PARAMETER Experiment Name: At_50mM_NH4NO3_L-to-H_P Parameter: Tissue Value: Siliques
  misc_feature: MA Experiment 20001760 PARAMETER Experiment Name: At_50mM_NH4NO3_L-to-H_P Parameter: Treatment Value: 50mM NH4NO3 vs 100mM Mannitol
  misc_feature: MA Experiment ID: 20001906 Result: Down-regulated in Transcription
  misc_feature: MA Experiment 20001906 PARAMETER Experiment Name: At_Drought_Reproduction_P Parameter: Age (day) Value: 35
  misc_feature: MA Experiment 20001906 PARAMETER Experiment Name: At_Drought_Reproduction_P Parameter: Organism Value: A. thaliana
  misc_feature: MA Experiment 20001906 PARAMETER Experiment Name: At_Drought_Reproduction_P Parameter: Plant Line Value: WS
  misc_feature: MA Experiment 20001906 PARAMETER Experiment Name: At_Drought_Reproduction_P Parameter: Timepoint (day) Value: 5
  misc_feature: MA Experiment 20001906 PARAMETER Experiment Name: At_Drought_Reproduction_P Parameter: Tissue Value: Siliques
  misc_feature: MA Experiment 20001906 PARAMETER Experiment Name: At_Drought_Reproduction_P Parameter: Treatment Value: Drought vs. No Drought
  misc_feature: MA Experiment ID: 20001910 Result: Down-regulated in Transcription
  misc_feature: MA Experiment 20001910 PARAMETER Experiment Name: At_Drought_Reproduction_P Parameter: Age (day) Value: 37
  misc_feature: MA Experiment 20001910 PARAMETER Experiment Name: At_Drought_Reproduction_P Parameter: Organism Value: A. thaliana
  misc_feature: MA Experiment 20001910 PARAMETER Experiment Name: At_Drought_Reproduction_P Parameter: Plant Line Value: WS
  misc_feature: MA Experiment 20001910 PARAMETER Experiment Name: At_Drought_Reproduction_P Parameter: Timepoint (day) Value: 7
  misc_feature: MA Experiment 20001910 PARAMETER Experiment Name: At_Drought_Reproduction_P Parameter: Tissue Value: Flowers
  misc_feature: MA Experiment 20001910 PARAMETER Experiment Name: At_Drought_Reproduction_P Parameter: Treatment Value: Drought vs. No Drought
cctygtcgtcctcagatctcatctcactcacaagagagagatagagagagaaaaaggctctgctttctacattatttacgattatacactttccaacatggcggcctctgtagataatcgccaatacgctcgtctcgagccaggtttgaacggcgtggttcgttcttacaaacctcccgttccaggccggtccgattcccctaaggcgcaccagaaccaaaccaccaaccaaaccgtgttcttgaaaccagccaaggttcatgacgatgacgaagacgtgtcgagcgaagacgagaacgagacacacaacagcaacgccgtgtactacaaggagatgataagaaaatccaacgccgagcttgaaccgtccgttttggacccgagggacgaatacacggctgatagctggatcgagcgtaacccttccatggtacgtctcacagggaaacatcccttcaactccgaggcgcctcttaaccgtttaatgcaccacgggtttatcacccctgtcccgttgcactacgttcgtaaccacggccacgtccctaaagcccaatgggccgaatggacggtcgaggtgaccggattcgtcaaacggcccatgaaattcaccatggaccagctcgtctccgagtttgcttaccgcgagttcgccgcgacgctagtctgcgcggggaaccgccgtaaggaacagaacatggtgaagaagtcaaagggattcaactggggatccgccggagtttccacctccgtgtggcgtggtgtccctctctgcgacgtactgcgtcgctgcgggatctttagccgaaaaggcggcgctctcaacgtctgcttcgaagggtcggaggatcttccgggcggtgccggaactgctggttccaaatacggaacgagcatcaagaaggaatatgccatggatccatcaagagacatcattttggcttatatgcaaaacggagagtatctaacaccagaccacggttttccggttcggatcatcatccccggtttcattggtggccggatggttaaatggttgaaacgaatcattgtcacaactaaagaatccgacaatttctaccatttcaaggacaacagagttttaccttctttggtagacgccgaactcgccgacgaagaaggttggtggtataagccagagtacataatcaacgagctaaacataaactccgtgattacgacgccatgtcacgaggagattcttcccatcaacgctttcacaacccaaagaccttatactttaaagggttacgcatattccggaggtggaaaaaaagtgacccgtgtggaggtcacggtagatggtggagagacatggaacgtatgtgcacttgaccatcaagagaagccaaacaagtatgggaagttctggtgttggtgtttttggtcacttgaggttgaggttttggacttgcttagtgccaaagagattgctgttcgtgcatgggacgagactctcaacacgcagcccgagaaaatgatatggaatctcatggggatgatgaataactgctggtttagagtgaagactaacgtgtgcaagccacacaagggagagattgggattgtgttcgagcatccaacgcttcctggtaatgaatctggtggatggatggcgaaggaacgtcacctcgaaaaatcggctgacgcgcctcctagtctaaagaagtctgtctcgacgccgtttatgaacacaactgcgaagatgtactcgatgtccgaggtcaagaagcataattcggctgactcttgctggatcattgtccatggacatatctatgattgtacacgattccttatggatcacccgggtggttcggattcaatcttgatcaatgctggtacggattgtacggaggagtttgaagccattcactcggataaagccaagaagatgcttgaggattaccgtatcggtgagctcatcaccactggttattcctctgactcttcctcgcctaacaactcggttcacggttcatccgccgtgttctcgctgttggctcccattggagaggcgactccggttaggaacctcgctttggttaatccccgggctaaagtcccggttcaactcgtcgaaaagacttccatttctcatgatgttcgtaaattccggtttgctttaccggttgaggatatggttctaggcttaccggttggtaagcacattttcctttgcgccaccatcaatgacaagctctgcctcagagcttacacaccaagcagcaccgttgatgtggttggctacttcgagctcgtggtcaagatttactttggcggtgtccacccaagattccctaacggcgggctcatgtctcagtacctagactctttgcctatagggtcaactttggagattaaaggaccattgggtcacgttgagtatctcggcaagggtagtttcacggttcacggtaaaccaaagtttgctgataaattggcaatgttggcaggtggaaccggaataactccggtttaccaaattatccaagccattctcaaggatccagaggatgagactgaaatgtacgtcatttatgctaaccggaccgaggaagatattctcctaagggaggaactggatggttgggcagagcaatacccggaccggttaaaggtttggtacgtagtggaatcagctaaggaaggttgggcatacagtaccgggtttatttccgaggcgattatgcgagaacatatccctgatggattagatggctcagcccttgccatggcttgcggaccaccaccgatgattcagtttgcggttcagccgaatttggagaagatgcaatataacatcaaggaggatttcttgatattctagtctaaagccaagatatttcaaagtcaaaacgttaagtcgtcaaaaagcctagtgttatgatagattctaaataagtattgagggatttgtttgtatataatgttggttctttaaagtcttggatttggaaatataatgtgttcgttgtattcacgatcgatattttttttcacaataatatacaaaaagtaatttcagaaaaaaaaaaaaaaaaaactcgagggggggcccggt

SEQ ID NO: 45154 - protein, 949 aa, Arabidopsis thaliana
  peptide (1)..(949): Ceres Seq. ID no. 15221079
  misc_feature (129)..(361): Pfam Name: Oxidoreductase molybdopterin binding domain Pfam Description: Oxidoreductase molybdopterin binding domain
  misc_feature (129)..(361): Pfam Name: Oxidoreductase molybdopterin binding domain Pfam Description: Oxidoreductase molybdopterin binding domain
  misc_feature (592)..(909): Homolog of NCBI NO: 14456133 NR Description: putative nitrate reductase [Ustilago maydis]
  misc_feature (29)..(453): Homolog of NCBI NO: 14456133 NR Description: putative nitrate reductase [Ustilago maydis]
  misc_feature (122)..(949): Homolog of NCBI NO: 1171706 NR Description: Nitrate reductase [NADPH] (NR)
  misc_feature (118)..(949): Homolog of NCBI NO: 730145 NR Description: Nitrate reductase [NADPH] (NR)
  misc_feature (127)..(455): Homolog of NCBI NO: 1071816 NR Description: nitrate reductase (NADPH) (EC 1.6.6.3) -
  misc_feature (592)..(909): Homolog of NCBI NO: 14456133 NR Description: putative nitrate reductase [Ustilago maydis]
  misc_feature (122)..(949): Homolog of NCBI NO: 1171706 NR Description: Nitrate reductase [NADPH] (NR)
  misc_feature (127)..(455): Homolog of NCBI NO: 1071816 NR Description: nitrate reductase (NADPH) (EC 1.6.6.3) -
  misc_feature (124)..(940): Homolog of NCBI NO: 7432652 NR Description: nitrate reductase (NADH) (EC 1.7.1.1)
  misc_feature (125)..(949): Homolog of NCBI NO: 730148 NR Description: Nitrate reductase [NADPH] (NR)
  misc_feature (375)..(949): Homolog of NCBI NO: 548358 NR Description: Nitrate reductase [NADPH] (NR)
  misc_feature (375)..(949): Homolog of NCBI NO: 1071816 NR Description: nitrate reductase (NADPH) (EC 1.6.6.3) -
  misc_feature (127)..(455): Homolog of NCBI NO: 548358 NR Description: Nitrate reductase [NADPH] (NR)
  misc_feature (118)..(949): Homolog of NCBI NO: 730145 NR Description: Nitrate reductase [NADPH] (NR)
  misc_feature (29)..(453): Homolog of NCBI NO: 14456133 NR Description: putative nitrate reductase [Ustilago maydis]
  misc_feature (127)..(455): Homolog of NCBI NO: 548358 NR Description: Nitrate reductase [NADPH] (NR)
  misc_feature (375)..(949): Homolog of NCBI NO: 1071816 NR Description: nitrate reductase (NADPH) (EC 1.6.6.3) -
  misc_feature (375)..(949): Homolog of NCBI NO: 548358 NR Description: Nitrate reductase [NADPH] (NR)
  misc_feature (125)..(949): Homolog of NCBI NO: 730148 NR Description: Nitrate reductase [NADPH] (NR)
  misc_feature (124)..(940): Homolog of NCBI NO: 7432652 NR Description: nitrate reductase (NADH) (EC 1.7.1.1)
  misc_feature (1)..(1): Xaa is any aa, unknown or other
XVVLRSHLTHKREIEREKGSAFYIIYDYTLSNMAASVDNRQYARLEPGLNGVVRSYKPPVPGRSDSPKAHQNQTTNQTVFLKPAKVHDDDEDVSSEDENETHNSNAVYYKEMIRKSNAELEPSVLDPRDEYTADSWIERNPSMVRLTGKHPFNSEAPLNRLMHHGFITPVPLHYVRNHGHVPKAQWAEWTVEVTGFVKRPMKFTMDQLVSEFAYREFAATLVCAGNRRKEQNMVKKSKGFNWGSAGVSTSVWRGVPLCDVLRRCGIFSRKGGALNVCFEGSEDLPGGAGTAGSKYGTSIKKEYAMDPSRDIILAYMQNGEYLTPDHGFPVRIIIPGFIGGRMVKWLKRIIVTTKESDNFYHFKDNRVLPSLVDAELADEEGWWYKPEYIINELNINSVITTPCHEEILPINAFTTQRPYTLKGYAYSGGGKKVTRVEVTVDGGETWNVCALDHQEKPNKYGKFWCWCFWSLEVEVLDLLSAKEIAVRAWDETLNTQPEKMIWNLMGMMNNCWFRVKTNVCKPHKGEIGIVFEHPTLPGNESGGWMAKERHLEKSADAPPSLKKSVSTPFMNTTAKMYSMSEVKKHNSADSCWIIVHGHIYDCTRFLMDHPGGSDSILINAGTDCTEEFEAIHSDKAKKMLEDYRIGELITTGYSSDSSSPNNSVHGSSAVFSLLAPIGEATPVRNLALVNPRAKVPVQLVEKTSISHDVRKFRFALPVEDMVLGLPVGKHIFLCATINDKLCLRAYTPSSTVDVVGYFELVVKIYFGGVHPRFPNGGLMSQYLDSLPIGSTLEIKGPLGHVEYLGKGSFTVHGKPKFADKLAMLAGGTGITPVYQIIQAILKDPEDETEMYVIYANRTEEDILLREELDGWAEQYPDRLKVWYVVESAKEGWAYSTGFISEAIMREHIPDGLDGSALAMACGPPPMIQFAVQPNLEKMQYNIKEDFLIF

SEQ ID NO: 45155 - protein, 917 aa, Arabidopsis thaliana
  peptide (1)..(917): Ceres Seq. ID no. 15221080
  misc_feature (97)..(329): Pfam Name: Oxidoreductase molybdopterin binding domain Pfam Description: Oxidoreductase molybdopterin binding domain
  misc_feature (97)..(329): Pfam Name: Oxidoreductase molybdopterin binding domain Pfam Description: Oxidoreductase molybdopterin binding domain
  misc_feature (560)..(877): Homolog of NCBI NO: 14456133 NR Description: putative nitrate reductase [Ustilago maydis]
  misc_feature (1)..(421): Homolog of NCBI NO: 14456133 NR Description: putative nitrate reductase [Ustilago maydis]
  misc_feature (90)..(917): Homolog of NCBI NO: 1171706 NR Description: Nitrate reductase [NADPH] (NR)
  misc_feature (86)..(917): Homolog of NCBI NO: 730145 NR Description: Nitrate reductase [NADPH] (NR)
  misc_feature (95)..(423): Homolog of NCBI NO: 1071816 NR Description: nitrate reductase (NADPH) (EC 1.6.6.3) -
  misc_feature (560)..(877): Homolog of NCBI NO: 14456133 NR Description: putative nitrate reductase [Ustilago maydis]
  misc_feature (90)..(917): Homolog of NCBI NO: 1171706 NR Description: Nitrate reductase [NADPH] (NR)
  misc_feature (95)..(423): Homolog of NCBI NO: 1071816 NR Description: nitrate reductase (NADPH) (EC 1.6.6.3) -
  misc_feature (92)..(908): Homolog of NCBI NO: 7432652 NR Description: nitrate reductase (NADH) (EC 1.7.1.1)
  misc_feature (93)..(917): Homolog of NCBI NO: 730148 NR Description: Nitrate reductase [NADPH] (NR)
  misc_feature (343)..(917): Homolog of NCBI NO: 548358 NR Description: Nitrate reductase [NADPH] (NR)
  misc_feature (343)..(917): Homolog of NCBI NO: 1071816 NR Description: nitrate reductase (NADPH) (EC 1.6.6.3) -
  misc_feature (95)..(423): Homolog of NCBI NO: 548358 NR Description: Nitrate reductase [NADPH] (NR)
  misc_feature (86)..(917): Homolog of NCBI NO: 730145 NR Description: Nitrate reductase [NADPH] (NR)
  misc_feature (1)..(421): Homolog of NCBI NO: 14456133 NR Description: putative nitrate reductase [Ustilago maydis]
  misc_feature (95)..(423): Homolog of NCBI NO: 548358 NR Description: Nitrate reductase [NADPH] (NR)
  misc_feature (343)..(917): Homolog of NCBI NO: 1071816 NR Description: nitrate reductase (NADPH) (EC 1.6.6.3) -
  misc_feature (343)..(917): Homolog of NCBI NO: 548358 NR Description: Nitrate reductase [NADPH] (NR)
  misc_feature (93)..(917): Homolog of NCBI NO: 730148 NR Description: Nitrate reductase [NADPH] (NR)
  misc_feature (92)..(908): Homolog of NCBI NO: 7432652 NR Description: nitrate reductase (NADH) (EC 1.7.1.1)
MAASVDNRQYARLEPGLNGVVRSYKPPVPGRSDSPKAHQNQTTNQTVFLKPAKVHDDDEDVSSEDENETHNSNAVYYKEMIRKSNAELEPSVLDPRDEYTADSWIERNPSMVRLTGKHPFNSEAPLNRLMHHGFITPVPLHYVRNHGHVPKAQWAEWTVEVTGFVKRPMKFTMDQLVSEFAYREFAATLVCAGNRRKEQNMVKKSKGFNWGSAGVSTSVWRGVPLCDVLRRCGIFSRKGGALNVCFEGSEDLPGGAGTAGSKYGTSIKKEYAMDPSRDIILAYMQNGEYLTPDHGFPVRIIIPGFIGGRMVKWLKRIIVTTKESDNFYHFKDNRVLPSLVDAELADEEGWWYKPEYIINELNINSVITTPCHEEILPINAFTTQRPYTLKGYAYSGGGKKVTRVEVTVDGGETWNVCALDHQEKPNKYGKFWCWCFWSLEVEVLDLLSAKEIAVRAWDETLNTQPEKMIWNLMGMMNNCWFRVKTNVCKPHKGEIGIVFEHPTLPGNESGGWMAKERHLEKSADAPPSLKKSVSTPFMNTTAKMYSMSEVKKHNSADSCWIIVHGHIYDCTRFLMDHPGGSDSILINAGTDCTEEFEAIHSDKAKKMLEDYRIGELITTGYSSDSSSPNNSVHGSSAVFSLLAPIGEATPVRNLALVNPRAKVPVQLVEKTSISHDVRKFRFALPVEDMVLGLPVGKHIFLCATINDKLCLRAYTPSSTVDVVGYFELVVKIYFGGVHPRFPNGGLMSQYLDSLPIGSTLEIKGPLGHVEYLGKGSFTVHGKPKFADKLAMLAGGTGITPVYQIIQAILKDPEDETEMYVIYANRTEEDILLREELDGWAEQYPDRLKVWYVVESAKEGWAYSTGFISEAIMREHIPDGLDGSALAMACGPPPMIQFAVQPNLEKMQYNIKEDFLIF

SEQ ID NO: 45156 - protein, 838 aa, Arabidopsis thaliana
  peptide (1)..(838): Ceres Seq. ID no. 15221081
  misc_feature (18)..(250): Pfam Name: Oxidoreductase molybdopterin binding domain Pfam Description: Oxidoreductase molybdopterin binding domain
  misc_feature (18)..(250): Pfam Name: Oxidoreductase molybdopterin binding domain Pfam Description: Oxidoreductase molybdopterin binding domain
  misc_feature (481)..(798): Homolog of NCBI NO: 14456133 NR Description: putative nitrate reductase [Ustilago maydis]
  misc_feature (1)..(342): Homolog of NCBI NO: 14456133 NR Description: putative nitrate reductase [Ustilago maydis]
  misc_feature (11)..(838): Homolog of NCBI NO: 1171706 NR Description: Nitrate reductase [NADPH] (NR)
  misc_feature (7)..(838): Homolog of NCBI NO: 730145 NR Description: Nitrate reductase [NADPH] (NR)
  misc_feature (16)..(344): Homolog of NCBI NO: 1071816 NR Description: nitrate reductase (NADPH) (EC 1.6.6.3) -
  misc_feature (481)..(798): Homolog of NCBI NO: 14456133 NR Description: putative nitrate reductase [Ustilago maydis]
  misc_feature (11)..(838): Homolog of NCBI NO: 1171706 NR Description: Nitrate reductase [NADPH] (NR)
  misc_feature (16)..(344): Homolog of NCBI NO: 1071816 NR Description: nitrate reductase (NADPH) (EC 1.6.6.3) -
  misc_feature (13)..(829): Homolog of NCBI NO: 7432652 NR Description: nitrate reductase (NADH) (EC 1.7.1.1)
  misc_feature (14)..(838): Homolog of NCBI NO: 730148 NR Description: Nitrate reductase [NADPH] (NR)
  misc_feature (264)..(838): Homolog of NCBI NO: 548358 NR Description: Nitrate reductase [NADPH] (NR)
  misc_feature (264)..(838): Homolog of NCBI NO: 1071816 NR Description: nitrate reductase (NADPH) (EC 1.6.6.3) -
  misc_feature (16)..(344): Homolog of NCBI NO: 548358 NR Description: Nitrate reductase [NADPH] (NR)
  misc_feature (7)..(838): Homolog of NCBI NO: 730145 NR Description: Nitrate reductase [NADPH] (NR)
  misc_feature (1)..(342): Homolog of NCBI NO: 14456133 NR Description: putative nitrate reductase [Ustilago maydis]
  misc_feature (16)..(344): Homolog of NCBI NO: 548358 NR Description: Nitrate reductase [NADPH] (NR)
  misc_feature (264)..(838): Homolog of NCBI NO: 1071816 NR Description: nitrate reductase (NADPH) (EC 1.6.6.3) -
  misc_feature (264)..(838): Homolog of NCBI NO: 548358 NR Description: Nitrate reductase [NADPH] (NR)
  misc_feature (14)..(838): Homolog of NCBI NO: 730148 NR Description: Nitrate reductase [NADPH] (NR)
  misc_feature (13)..(829): Homolog of NCBI NO: 7432652 NR Description: nitrate reductase (NADH) (EC 1.7.1.1)
MIRKSNAELEPSVLDPRDEYTADSWIERNPSMVRLTGKHPFNSEAPLNRLMHHGFITPVPLHYVRNHGHVPKAQWAEWTVEVTGFVKRPMKFTMDQLVSEFAYREFAATLVCAGNRRKEQNMVKKSKGFNWGSAGVSTSVWRGVPLCDVLRRCGIFSRKGGALNVCFEGSEDLPGGAGTAGSKYGTSIKKEYAMDPSRDIILAYMQNGEYLTPDHGFPVRIIIPGFIGGRMVKWLKRIIVTTKESDNFYHFKDNRVLPSLVDAELADEEGWWYKPEYIINELNINSVITTPCHEEILPINAFTTQRPYTLKGYAYSGGGKKVTRVEVTVDGGETWNVCALDHQEKPNKYGKFWCWCFWSLEVEVLDLLSAKEIAVRAWDETLNTQPEKMIWNLMGMMNNCWFRVKTNVCKPHKGEIGIVFEHPTLPGNESGGWMAKERHLEKSADAPPSLKKSVSTPFMNTTAKMYSMSEVKKHNSADSCWIIVHGHIYDCTRFLMDHPGGSDSILINAGTDCTEEFEAIHSDKAKKMLEDYRIGELITTGYSSDSSSPNNSVHGSSAVFSLLAPIGEATPVRNLALVNPRAKVPVQLVEKTSISHDVRKFRFALPVEDMVLGLPVGKHIFLCATINDKLCLRAYTPSSTVDVVGYFELVVKIYFGGVHPRFPNGGLMSQYLDSLPIGSTLEIKGPLGHVEYLGKGSFTVHGKPKFADKLAMLAGGTGITPVYQIIQAILKDPEDETEMYVIYANRTEEDILLREELDGWAEQYPDRLKVWYVVESAKEGWAYSTGFISEAIMREHIPDGLDGSALAMACGPPPMIQFAVQPNLEKMQYNIKEDFLIF

SEQ ID NO: 45157 - DNA, 3621 bp, Arabidopsis thaliana
  misc_feature (1)..(3621): Ceres Seq. ID no. 12560421
  misc_feature: MA Experiment ID: 20000264 Result: Up-regulated in Transcription
  misc_feature: MA Experiment 20000264 PARAMETER Experiment Name: At_Open_Flower_P Parameter: Age (day) Value: 21
  misc_feature: MA Experiment 20000264 PARAMETER Experiment Name: At_Open_Flower_P Parameter: Plant Line Value: WS
  misc_feature: MA Experiment 20000264 PARAMETER Experiment Name: At_Open_Flower_P Parameter: Tissue Value: Open Flower vs. Whole Plant
  misc_feature: MA Experiment ID: 20000286 Result: Up-regulated in Transcription
  misc_feature: MA Experiment 20000286 PARAMETER Experiment Name: At_Open_Flower_P Parameter: Age (day) Value: 21
  misc_feature: MA Experiment 20000286 PARAMETER Experiment Name: At_Open_Flower_P Parameter: Plant Line Value: WS
  misc_feature: MA Experiment 20000286 PARAMETER Experiment Name: At_Open_Flower_P Parameter: Tissue Value: Half Open vs. Whole Plant
  misc_feature: MA Experiment ID: 20000439 Result: Up-regulated in Transcription
  misc_feature: MA Experiment 20000439 PARAMETER Experiment Name: At_Roots__P Parameter: Age (day) Value: 14 vs. 21
  misc_feature: MA Experiment 20000439 PARAMETER Experiment Name: At_Roots__P Parameter: Organism Value: A. thaliana
  misc_feature: MA Experiment 20000439 PARAMETER Experiment Name: At_Roots__P Parameter: Tissue Value: Roots vs. Whole Plant
  misc_feature: MA Experiment ID: 20000794 Result: Up-regulated in Transcription
  misc_feature: MA Experiment 20000794 PARAMETER Experiment Name: At_Petals_P Parameter: Age (day) Value: 23-25 days
  misc_feature: MA Experiment 20000794 PARAMETER Experiment Name: At_Petals_P Parameter: Plant Line Value: WS
  misc_feature: MA Experiment 20000794 PARAMETER Experiment Name: At_Petals_P Parameter: Tissue Value: Petals vs. Whole plant
tatacacacaaactaaactatacgaaaacaaaaacaaagaacaagtgtgaagccaaacgcagaattttgggaaaccatcgcacaagcttccatagatttctctcttgttccttcccgtttcttcctctcccccatatttctctccagctccgcctcactgttccgcgatccaatttccttttccagcaggctataagtgtagttagcacttcttctataaaaagcagtgtctcacatttggatatgaagaaagcatttggtcaaactgtcagagacctcaagagaggggtcaacaagaaagtgcttaaagtacctggaatagaacagaaggttctagatgctaccagcaatgagtcctggggtccgcatggatcacttcttgcggacattgcacatgcttcgagaaattaccatgaataccagattactatgggagtgttatggaaacgtcttagtgactctggaaaaaattggcggcatgtctataaggcattgacagtcttggagtacatggtaggccatggatcagaacgtgtcatagaagaggttaaagaacatgcatatcaaattacgacattatctggttttcagtatattgattccagcggtaaagatcaaggtagcaatgtcaggaagaaggcgcagagccttgtggctttggttaatgacaaagaaagaataacggaggtcagagagaaggctgctgctaacagagataagtatcataactcaatgcataggccgtcaggaggatatggggacaaatatgattacgaaggccgctatggagacagagatgaagggcgaagtagttatgggaaagagagagaatatggttacagggatgatgatagaaatagtcgtgatggcgatcgttattctagagactctgaagaccgatatggaagagatggtaacacggatgacgaataccgtggaaggagcagaagtgttgataattacaatggatcaagaggtaggagctcggacagggaacggcctattgaggatgatggccaatcctcatcgcgggatagtggtgcgccagctgatgatcattctcaagatgggagaggggggctagagagaaagttctctgaacaaaatattggtgctgctccacctagttatgaagaagctgtgagtgaatcacggagccctgtatacagtgaaagggatggtggagagaccccacaagttgctcctccaggagctgctgcttctcctcttgctgaaaacatcagcgtggacaacaaagctgctgattttgttaatgaatcatctcctcagcaagttgaggcttttgatgaatttgatccacgaggttcagtttcagcagcatgtgcacctacagctggtgcttcggttcctgcacctatcccaccaacagtggtttctacgcctgccccgcctgcctcaattaatgcagaaatggatttgcttggctctctttcagatgtattttcaccaaatcccttggctattgtaacatctgattccacttctgttgaaaccaatggacaagcaaacactggtttagctccatcgttttctacttctcagtcatctactcagccttttgatgatccatttggtgactctcctttcaaagccatcacttctgctgacactgagacaagccaacatcagagttttggagttccttttcagccaacaccaccaacttcaaatcctaacaatgaacataactttggttttggggaagcattttcagctgttaccgattctgaacctggcgttcaaaatatgcaagctccaccgaacttatccgtctttcctcaagagcagtttgatacatcgcagagcgaaatcgatattcttgccggcattctcccaccatctggaccgccagtttctctgtctccacaaccagattccactatgccaacatcccaatttcatcccaatggtaactcctatgaaagctatcatcatcaagccgcgcctacagatctaaacatgcaaggacaaacaccgtttggtcaagcttcacaacaatttaacatggtttcacattcacaaaatcatcatgaaggtatgcaattcaacaatgggggcttcacgcaacagccaggctatgcaggtccagcaacctctcaacctccacaatatactcctggtgtatcttcacacccaccaagtgagagttttcctcaccaaccaggttctgccacctcagcaagctcgcaaactccttacgctactacacccaatgtatcagctgggcagtttgatggtgggagtttcatgacacagcaaccttatggtgtgacacaacaagttcatgttgtcccttcccatataccacagcgaactcaatctggacctgttgcagcgtttgggaataataacaatatcgttggagatatgcaccaacctggttctaccccctcatcaagctcgcaaactccttaccctactacgcccaatgcaccaagtggtcagtttgatggtggaaattttatgacacaacaaccttatggtgtgataccgcaagttcatggcgtcccttcccatataccacagcgaactcaatctggacctgttgcagcgcacgggaatagtaacaatgttgttggggatatgttttcaccagctggactaagttccttggagacatcagcatcgcaaccatctctcacacctttaacaggagcaattgaaattgttccccaaaatcagaagaagtttgagccaaaatcaacaatttgggctgatacattaagtagagggctagttaacttcaacatttctggaccgaaaacaaatccattggcggatataggagttgacttcgaggcaatcaacaggaaagagaaacggctagagaaaccaactatcacacaacaacaagtaacatcaactatcaacatggggaaagccatgggatctggtactggcttaggtcgcgctggtgcaggtgctatgagacctccaacaaattcaatggtaggctcaagcatgcccacgggcatgaatgttggtggctatggaggcatgaaccaacaccaacccataggcatgaaccaaaaccatcccatgggcatgaaccaaaacctttccatgggaatgaaccagaactatcccatgggaatgaaccaaaactatccaatgggaatgggcatgaacatgaacatgggcgggtatggacaagggtatccgatgcaaccacaacaaggaatgggcatggctcctcctggtgcaccacaaggcatgaccggtgcctataatccaatgatgggtcaaggcggttacaaccctcagcagcagcaaccatatggtggaggttaccggtaagattcgagccaatcacggttacccattttacttatcatggtaaaaagagaaaacatcaaagaacagaacacaatcagtttgacctggatttgtaaattttatggtcggttcaggtaagttggggtttggtcagtcatattattggattaatacctcagcttcatcagttattttgctttttctttacaaaaataattctcgaccaaattgagttttgttaggaattttgtaacgggtaaagagagagacagagaggcacaaccttcactcggggtttgctatatacatatgtattttgatatt

SEQ ID NO: 45158 - protein, 1105 aa, Arabidopsis thaliana
  peptide (1)..(1105): Ceres Seq. ID no. 12560422
  misc_feature (104)..(227): Pfam Name: ENTH domain Pfam Description: ENTH domain
  misc_feature (469)..(727): Homolog of NCBI NO: 25408842 NR Description: hypothetical protein At2g43170 [imported] -
  misc_feature (877)..(979): Homolog of NCBI NO: 22326733 NR Description: clathrin binding protein - like
  misc_feature (80)..(531): Homolog of NCBI NO: 22326733 NR Description: clathrin binding protein - like
  misc_feature (483)..(1096): Homolog of NCBI NO: 15215854 NR Description: At2g43170/F14B2.11 [Arabidopsis thaliana]
  misc_feature (621)..(1096): Homolog of NCBI NO: 25408842 NR Description: hypothetical protein At2g43170 [imported] -
  misc_feature (483)..(1096): Homolog of NCBI NO: 30689266 NR Description: clathrin binding protein (epsin) -related
  misc_feature (82)..(819): Homolog of NCBI NO: 15451572 NR Description: Putative epsin [Oryza sativa]
  misc_feature (82)..(344): Homolog of NCBI NO: 25408841 NR Description: probable clathrin binding protein (epsin)
  misc_feature (82)..(727): Homolog of NCBI NO: 15215854 NR Description: At2g43170/F14B2.11 [Arabidopsis thaliana]
  misc_feature (82)..(727): Homolog of NCBI NO: 30689266 NR Description: clathrin binding protein (epsin) -related
YTHKLNYTKTKTKNKCEAKRRILGNHRTSFHRFLSCSFPFLPLPHISLQLRLTVPRSNFLFQQAISVVSTSSIKSSVSHLDMKKAFGQTVRDLKRGVNKKVLKVPGIEQKVLDATSNESWGPHGSLLADIAHASRNYHEYQITMGVLWKRLSDSGKNWRHVYKALTVLEYMVGHGSERVIEEVKEHAYQITTLSGFQYIDSSGKDQGSNVRKKAQSLVALVNDKERITEVREKAAANRDKYHNSMHRPSGGYGDKYDYEGRYGDRDEGRSSYGKEREYGYRDDDRNSRDGDRYSRDSEDRYGRDGNTDDEYRGRSRSVDNYNGSRGRSSDRERPIEDDGQSSSRDSGAPADDHSQDGRGGLERKFSEQNIGAAPPSYEEAVSESRSPVYSERDGGETPQVAPPGAAASPLAENISVDNKAADFVNESSPQQVEAFDEFDPRGSVSAACAPTAGASVPAPIPPTVVSTPAPPASINAEMDLLGSLSDVFSPNPLAIVTSDSTSVETNGQANTGLAPSFSTSQSSTQPFDDPFGDSPFKAITSADTETSQHQSFGVPFQPTPPTSNPNNEHNFGFGEAFSAVTDSEPGVQNMQAPPNLSVFPQEQFDTSQSEIDILAGILPPSGPPVSLSPQPDSTMPTSQFHPNGNSYESYHHQAAPTDLNMQGQTPFGQASQQFNMVSHSQNHHEGMQFNNGGFTQQPGYAGPATSQPPQYTPGVSSHPPSESFPHQPGSATSASSQTPYATTPNVSAGQFDGGSFMTQQPYGVTQQVHVVPSHIPQRTQSGPVAAFGNNNNIVGDMHQPGSTPSSSSQTPYPTTPNAPSGQFDGGNFMTQQPYGVIPQVHGVPSHIPQRTQSGPVAAHGNSNNVVGDMFSPAGLSSLETSASQPSLTPLTGAIEIVPQNQKKFEPKSTIWADTLSRGLVNFNISGPKTNPLADIGVDFEAINRKEKRLEKPTITQQQVTSTINMGKAMGSGTGLGRAGAGAMRPPTNSMVGSSMPTGMNVGGYGGMNQHQPIGMNQNHPMGMNQNLSMGMNQNYPMGMNQNYPMGMGMNMNMGGYGQGYPMQPQQGMGMAPPGAPQGMTGAYNPMMGQGGYNPQQQQPYGGGYR

SEQ ID NO: 45159 - protein, 1024 aa, Arabidopsis thaliana
  peptide (1)..(1024): Ceres Seq. ID no. 12560423
  misc_feature (23)..(146): Pfam Name: ENTH domain Pfam Description: ENTH domain
  misc_feature (388)..(646): Homolog of NCBI NO: 25408842 NR Description: hypothetical protein At2g43170 [imported] -
  misc_feature (796)..(898): Homolog of NCBI NO: 22326733 NR Description: clathrin binding protein - like
  misc_feature (1)..(450): Homolog of NCBI NO: 22326733 NR Description: clathrin binding protein - like
  misc_feature (402)..(1015): Homolog of NCBI NO: 15215854 NR Description: At2g43170/F14B2.11 [Arabidopsis thaliana]
  misc_feature (540)..(1015): Homolog of NCBI NO: 25408842 NR Description: hypothetical protein At2g43170 [imported] -
  misc_feature (402)..(1015): Homolog of NCBI NO: 30689266 NR Description: clathrin binding protein (epsin) -related
  misc_feature (1)..(738): Homolog of NCBI NO: 15451572 NR Description: Putative epsin [Oryza sativa]
  misc_feature (1)..(263): Homolog of NCBI NO: 25408841 NR Description: probable clathrin binding protein (epsin)
  misc_feature (1)..(646): Homolog of NCBI NO: 15215854 NR Description: At2g43170/F14B2.11 [Arabidopsis thaliana]
  misc_feature (1)..(646): Homolog of NCBI NO: 30689266 NR Description: clathrin binding protein (epsin) -related
MKKAFGQTVRDLKRGVNKKVLKVPGIEQKVLDATSNESWGPHGSLLADIAHASRNYHEYQITMGVLWKRLSDSGKNWRHVYKALTVLEYMVGHGSERVIEEVKEHAYQITTLSGFQYIDSSGKDQGSNVRKKAQSLVALVNDKERITEVREKAAANRDKYHNSMHRPSGGYGDKYDYEGRYGDRDEGRSSYGKEREYGYRDDDRNSRDGDRYSRDSEDRYGRDGNTDDEYRGRSRSVDNYNGSRGRSSDRERPIEDDGQSSSRDSGAPADDHSQDGRGGLERKFSEQNIGAAPPSYEEAVSESRSPVYSERDGGETPQVAPPGAAASPLAENISVDNKAADFVNESSPQQVEAFDEFDPRGSVSAACAPTAGASVPAPIPPTVVSTPAPPASINAEMDLLGSLSDVFSPNPLAIVTSDSTSVETNGQANTGLAPSFSTSQSSTQPFDDPFGDSPFKAITSADTETSQHQSFGVPFQPTPPTSNPNNEHNFGFGEAFSAVTDSEPGVQNMQAPPNLSVFPQEQFDTSQSEIDILAGILPPSGPPVSLSPQPDSTMPTSQFHPNGNSYESYHHQAAPTDLNMQGQTPFGQASQQFNMVSHSQNHHEGMQFNNGGFTQQPGYAGPATSQPPQYTPGVSSHPPSESFPHQPGSATSASSQTPYATTPNVSAGQFDGGSFMTQQPYGVTQQVHVVPSHIPQRTQSGPVAAFGNNNNIVGDMHQPGSTPSSSSQTPYPTTPNAPSGQFDGGNFMTQQPYGVIPQVHGVPSHIPQRTQSGPVAAHGNSNNVVGDMFSPAGLSSLETSASQPSLTPLTGAIEIVPQNQKKFEPKSTIWADTLSRGLVNFNISGPKTNPLADIGVDFEAINRKEKRLEKPTITQQQVTSTINMGKAMGSGTGLGRAGAGAMRPPTNSMVGSSMPTGMNVGGYGGMNQHQPIGMNQNHPMGMNQNLSMGMNQNYPMGMNQNYPMGMGMNMNMGGYGQGYPMQPQQGMGMAPPGAPQGMTGAYNPMMGQGGYNPQQQQPYGGGYR

SEQ ID NO: 45160 - protein, 962 aa, Arabidopsis thaliana
  peptide (1)..(962): Ceres Seq. ID no. 12560424
  misc_feature (1)..(84): Pfam Name: ENTH domain Pfam Description: ENTH domain
  misc_feature (326)..(584): Homolog of NCBI NO: 25408842 NR Description: hypothetical protein At2g43170 [imported] -
  misc_feature (734)..(836): Homolog of NCBI NO: 22326733 NR Description: clathrin binding protein - like
  misc_feature (1)..(388): Homolog of NCBI NO: 22326733 NR Description: clathrin binding protein - like
  misc_feature (340)..(953): Homolog of NCBI NO: 15215854 NR Description: At2g43170/F14B2.11 [Arabidopsis thaliana]
  misc_feature (478)..(953): Homolog of NCBI NO: 25408842 NR Description: hypothetical protein At2g43170 [imported] -
  misc_feature (340)..(953): Homolog of NCBI NO: 30689266 NR Description: clathrin binding protein (epsin) -related
  misc_feature (1)..(676): Homolog of NCBI NO: 15451572 NR Description: Putative epsin [Oryza sativa]
  misc_feature (1)..(201): Homolog of NCBI NO: 25408841 NR Description: probable clathrin binding protein (epsin)
  misc_feature (1)..(584): Homolog of NCBI NO: 15215854 NR Description: At2g43170/F14B2.11 [Arabidopsis thaliana]
  misc_feature (1)..(584): Homolog of NCBI NO: 30689266 NR Description: clathrin binding protein (epsin) -related
MGVLWKRLSDSGKNWRHVYKALTVLEYMVGHGSERVIEEVKEHAYQITTLSGFQYIDSSGKDQGSNVRKKAQSLVALVNDKERITEVREKAAANRDKYHNSMHRPSGGYGDKYDYEGRYGDRDEGRSSYGKEREYGYRDDDRNSRDGDRYSRDSEDRYGRDGNTDDEYRGRSRSVDNYNGSRGRSSDRERPIEDDGQSSSRDSGAPADDHSQDGRGGLERKFSEQNIGAAPPSYEEAVSESRSPVYSERDGGETPQVAPPGAAASPLAENISVDNKAADFVNESSPQQVEAFDEFDPRGSVSAACAPTAGASVPAPIPPTVVSTPAPPASINAEMDLLGSLSDVFSPNPLAIVTSDSTSVETNGQANTGLAPSFSTSQSSTQPFDDPFGDSPFKAITSADTETSQHQSFGVPFQPTPPTSNPNNEHNFGFGEAFSAVTDSEPGVQNMQAPPNLSVFPQEQFDTSQSEIDILAGILPPSGPPVSLSPQPDSTMPTSQFHPNGNSYESYHHQAAPTDLNMQGQTPFGQASQQFNMVSHSQNHHEGMQFNNGGFTQQPGYAGPATSQPPQYTPGVSSHPPSESFPHQPGSATSASSQTPYATTPNVSAGQFDGGSFMTQQPYGVTQQVHVVPSHIPQRTQSGPVAAFGNNNNIVGDMHQPGSTPSSSSQTPYPTTPNAPSGQFDGGNFMTQQPYGVIPQVHGVPSHIPQRTQSGPVAAHGNSNNVVGDMFSPAGLSSLETSASQPSLTPLTGAIEIVPQNQKKFEPKSTIWADTLSRGLVNFNISGPKTNPLADIGVDFEAINRKEKRLEKPTITQQQVTSTINMGKAMGSGTGLGRAGAGAMRPPTNSMVGSSMPTGMNVGGYGGMNQHQPIGMNQNHPMGMNQNLSMGMNQNYPMGMNQNYPMGMGMNMNMGGYGQGYPMQPQQGMGMAPPGAPQGMTGAYNPMMGQGGYNPQQQQPYGGGYR

SEQ ID NO: 45161 - DNA, 1919 bp, Arabidopsis thaliana
  misc_feature (1)..(1919): Ceres Seq. ID no. 13575934
  misc_feature: MA Experiment ID: 20000234 Result: Down-regulated in Transcription
  misc_feature: MA Experiment 20000234 PARAMETER Experiment Name: At_Siliques_P Parameter: Age (day) Value: 21
  misc_feature: MA Experiment 20000234 PARAMETER Experiment Name: At_Siliques_P Parameter: Organism Value: A. thaliana
  misc_feature: MA Experiment 20000234 PARAMETER Experiment Name: At_Siliques_P Parameter: Plant Line Value: WS
  misc_feature: MA Experiment 20000234 PARAMETER Experiment Name: At_Siliques_P Parameter: Tissue Value: Less Than 5mm Siliques vs. Whole Plant
  misc_feature: MA Experiment ID: 20000265 Result: Down-regulated in Transcription
  misc_feature: MA Experiment 20000265 PARAMETER Experiment Name: At_Open_Flower_P Parameter: Age (day) Value: 21
  misc_feature: MA Experiment 20000265 PARAMETER Experiment Name: At_Open_Flower_P Parameter: Plant Line Value: WS
  misc_feature: MA Experiment 20000265 PARAMETER Experiment Name: At_Open_Flower_P Parameter: Tissue Value: Closed Flower vs. Whole Plant
  misc_feature: MA Experiment ID: 20000286 Result: Down-regulated in Transcription
  misc_feature: MA Experiment 20000286 PARAMETER Experiment Name: At_Open_Flower_P Parameter: Age (day) Value: 21
  misc_feature: MA Experiment 20000286 PARAMETER Experiment Name: At_Open_Flower_P Parameter: Plant Line Value: WS
  misc_feature: MA Experiment 20000286 PARAMETER Experiment Name: At_Open_Flower_P Parameter: Tissue Value: Half Open vs. Whole Plant
  misc_feature: MA Experiment ID: 20000437 Result: Up-regulated in Transcription
  misc_feature: MA Experiment 20000437 PARAMETER Experiment Name: At_Drought_P Parameter: Age (day) Value: 8
  misc_feature: MA Experiment 20000437 PARAMETER Experiment Name: At_Drought_P Parameter: Organism Value: A. thaliana
  misc_feature: MA Experiment 20000437 PARAMETER Experiment Name: At_Drought_P Parameter: Plant Line Value: WS
  misc_feature: MA Experiment 20000437 PARAMETER Experiment Name: At_Drought_P Parameter: Timepoint (hr) Value: 24
  misc_feature: MA Experiment 20000437 PARAMETER Experiment Name: At_Drought_P Parameter: Tissue Value: Whole Plant
  misc_feature: MA Experiment 20000437 PARAMETER Experiment Name: At_Drought_P Parameter: Treatment Value: Drought vs. No Drought
  misc_feature: MA Experiment ID: 20000794 Result: Down-regulated in Transcription
  misc_feature: MA Experiment 20000794 PARAMETER Experiment Name: At_Petals_P Parameter: Age (day) Value: 23-25 days
  misc_feature: MA Experiment 20000794 PARAMETER Experiment Name: At_Petals_P Parameter: Plant Line Value: WS
  misc_feature: MA Experiment 20000794 PARAMETER Experiment Name: At_Petals_P Parameter: Tissue Value: Petals vs. Whole plant
  misc_feature: MA Experiment ID: 20001559 Result: Up-regulated in Transcription
  misc_feature: MA Experiment 20001559 PARAMETER Experiment Name: At_Drought_Soil_Dry_P Parameter: Age (day) Value: 28
  misc_feature: MA Experiment 20001559 PARAMETER Experiment Name: At_Drought_Soil_Dry_P Parameter: Organism Value: A. thaliana
  misc_feature: MA Experiment 20001559 PARAMETER Experiment Name: At_Drought_Soil_Dry_P Parameter: Plant Line Value: WS
  misc_feature: MA Experiment 20001559 PARAMETER Experiment Name: At_Drought_Soil_Dry_P Parameter: Post Timepoint (hr) Value: 29
  misc_feature: MA Experiment 20001559 PARAMETER Experiment Name: At_Drought_Soil_Dry_P Parameter: Post-Treatment Value: Re-Water vs. No Drought
  misc_feature: MA Experiment 20001559 PARAMETER Experiment Name: At_Drought_Soil_Dry_P Parameter: Timepoint (day) Value: 14
  misc_feature: MA Experiment 20001559 PARAMETER Experiment Name: At_Drought_Soil_Dry_P Parameter: Treatment Value: Drought vs. No Drought
  misc_feature: MA Experiment ID: 20001905 Result: Up-regulated in Transcription
  misc_feature: MA Experiment 20001905 PARAMETER Experiment Name: At_Drought_Reproduction_P Parameter: Age (day) Value: 40
  misc_feature: MA Experiment 20001905 PARAMETER Experiment Name: At_Drought_Reproduction_P Parameter: Organism Value: A. thaliana
  misc_feature: MA Experiment 20001905 PARAMETER Experiment Name: At_Drought_Reproduction_P Parameter: Plant Line Value: WS
  misc_feature: MA Experiment 20001905 PARAMETER Experiment Name: At_Drought_Reproduction_P Parameter: Timepoint (day) Value: 10
  misc_feature: MA Experiment 20001905 PARAMETER Experiment Name: At_Drought_Reproduction_P Parameter: Tissue Value: Rosettes
  misc_feature: MA Experiment 20001905 PARAMETER Experiment Name: At_Drought_Reproduction_P Parameter: Treatment Value: Drought vs. No Drought
  misc_feature: MA Experiment ID: 20001911 Result: Up-regulated in Transcription
  misc_feature: MA Experiment 20001911 PARAMETER Experiment Name: At_Drought_Reproduction_P Parameter: Age (day) Value: 40
  misc_feature: MA Experiment 20001911 PARAMETER Experiment Name: At_Drought_Reproduction_P Parameter: Organism Value: A. thaliana
  misc_feature: MA Experiment 20001911 PARAMETER Experiment Name: At_Drought_Reproduction_P Parameter: Plant Line Value: WS
  misc_feature: MA Experiment 20001911 PARAMETER Experiment Name: At_Drought_Reproduction_P Parameter: Timepoint (day) Value: 10
  misc_feature: MA Experiment 20001911 PARAMETER Experiment Name: At_Drought_Reproduction_P Parameter: Tissue Value: Flowers
  misc_feature: MA Experiment 20001911 PARAMETER Experiment Name: At_Drought_Reproduction_P Parameter: Treatment Value: Drought vs. No Drought
ggttggattctttctccttcaaatcaaattataaatcccatcaaacagagagagagagagaagaggaggagaattcgaagaataaaagataagaactttgacgttttgaagcttaaagcttgaaacttgtttcatccatggcggctcgtagagtgtcttctcttttatctcgatctttttcagcttcctctcccttactgtttcgttctcaagggagaaattgttacaatggagggatcttaaggagatttggaacctcttctgctgctgctgaggaaatcataaacccatctgttcaagtttctcacacacagctcctcatcaatgggaactttgttgactctgcttctggtaagacgtttccgactcttgatccgaggacaggcgaagtcattgctcatgtagctgaaggcgatgctgaagatatcaatcgagctgtgaaagctgcaaggacggcctttgatgaaggaccttggcctaaaatgagtgcttatgaaaggtcaagagttttgttgaggtttgcagatttggttgagaaacacagcgaagagctcgcgtctctagagacatgggacaatggcaagccttaccaacaatccttgaccgcagagattcccatgtttgcaagattgttccgttactatgctggatgggcggataagattcatggactaacaattccagctgatggaaactatcaagttcacacattacatgaaccgataggtgtagctggacagatcataccgtggaattttccacttttgatgtttgcttggaaagttggtcctgctcttgcttgtggtaacaccattgtcctcaaaaccgctgagcaaacacctctcacggctttctatgctggaaagcttttccttgaagcgggtcttcctcctggtgttctgaatattgtttcgggattcggtgcaacagcaggtgctgccctcgcgagtcatatggatgtagacaagcttgcttttacaggatcgactgatacggggaaagttatacttggattggctgctaacagcaatcttaagcccgtaactctggaacttggagggaaatcaccgttcatcgtattcgaagatgctgatattgataaagctgtagagcttgcacactttgccctcttcttcaaccaggggcaatgttgctgcgcggggtctcggacatttgttcatgagaaagtgtatgatgagtttgttgagaaatcaaaggcacgcgcattgaaacgtgttgttggtgatcctttcaggaaaggcattgaacagggtcctcagatcgatttgaagcaatttgagaaagtgatgaagtacataaagtcaggtatcgaaagcaatgctactcttgaatgtggtggtgatcagattggagacaaaggttacttcatccaacctactgtcttctctaatgttaaggatgacatgcttatcgctcaagacgagattttcggtccagtccaatcgatcttgaagttcagtgatgtggatgaggtgataaagagggcgaacgagacgaagtacgggctagcggcaggggttttcacgaagaatctggacacggcaaacagggtttcaagggctttgaaagctggtaccgtatgggttaactgcttcgacgtatttgatgcagccataccatttggtggttacaagatgagtgggaatgggagagagaaaggcatatacagtctcaataattacttgcagatcaaggcagtcgtcactgctctaaataagcctgcctggatctgatctctggagtgtggtttcagcatcataaatgctcaaacaaaagaaatagactctataaagttacaatagtaataattaaggtcatggtttgtaatttgagtaacggattgtgatacttctaataaatttttcattgttgtttattcatcacatagctgttgttac

SEQ ID NO: 45162 - protein, 538 aa, Arabidopsis thaliana
  peptide (1)..(538): Ceres Seq. ID no. 13575935
  misc_feature (1)..(538): Homolog of NCBI NO: 7431451 NR Description: rf2 nuclear restorer protein - maize
  misc_feature (1)..(538): Homolog of NCBI NO: 8163730 NR Description: aldehyde dehydrogenase [Oryza sativa]
  misc_feature (1)..(538): Homolog of NCBI NO: 11691926 NR Description: aldehyde dehydrogenase ALDH2b
  misc_feature (1)..(538): Homolog of NCBI NO: 20530131 NR Description: mitochondrial aldehyde dehydrogenase [Sorghum
  misc_feature (1)..(538): Homolog of NCBI NO: 7431444 NR Description: aldehyde dehydrogenase (NAD) (EC 1.2.1.3) 2A
  misc_feature (1)..(538): Homolog of NCBI NO: 15128580 NR Description: mitochondrial aldehyde dehydrogenase ALDH2
  misc_feature (1)..(538): Homolog of NCBI NO: 18395300 NR Description: mitochondrial aldehyde dehydrogenase (ALDH3)
  misc_feature (1)..(538): Homolog of NCBI NO: 20530127 NR Description: mitochondrial aldehyde dehydrogenase [Secale
  misc_feature (1)..(538): Homolog of NCBI NO: 29373073 NR Description: aldehyde dehydrogenase 1 precursor [Lotus
  misc_feature (1)..(538): Homolog of NCBI NO: 15228319 NR Description: mitochondrial aldehyde dehydrogenase, putative
MAARRVSSLLSRSFSASSPLLFRSQGRNCYNGGILRRFGTSSAAAEEIINPSVQVSHTQLLINGNFVDSASGKTFPTLDPRTGEVIAHVAEGDAEDINRAVKAARTAFDEGPWPKMSAYERSRVLLRFADLVEKHSEELASLETWDNGKPYQQSLTAEIPMFARLFRYYAGWADKIHGLTIPADGNYQVHTLHEPIGVAGQIIPWNFPLLMFAWKVGPALACGNTIVLKTAEQTPLTAFYAGKLFLEAGLPPGVLNIVSGFGATAGAALASHMDVDKLAFTGSTDTGKVILGLAANSNLKPVTLELGGKSPFIVFEDADIDKAVELAHFALFFNQGQCCCAGSRTFVHEKVYDEFVEKSKARALKRVVGDPFRKGIEQGPQIDLKQFEKVMKYIKSGIESNATLECGGDQIGDKGYFIQPTVFSNVKDDMLIAQDEIFGPVQSILKFSDVDEVIKRANETKYGLAAGVFTKNLDTANRVSRALKAGTVWVNCFDVFDAAIPFGGYKMSGNGREKGIYSLNNYLQIKAVVTALNKPAWI

SEQ ID NO: 45163 - protein, 423 aa, Arabidopsis thaliana
  peptide (1)..(423): Ceres Seq. ID no. 13575936
  misc_feature (1)..(423): Homolog of NCBI NO: 7431451 NR Description: rf2 nuclear restorer protein - maize
  misc_feature (1)..(423): Homolog of NCBI NO: 8163730 NR Description: aldehyde dehydrogenase [Oryza sativa]
  misc_feature (1)..(423): Homolog of NCBI NO: 11691926 NR Description: aldehyde dehydrogenase ALDH2b
  misc_feature (1)..(423): Homolog of NCBI NO: 20530131 NR Description: mitochondrial aldehyde dehydrogenase [Sorghum
  misc_feature (1)..(423): Homolog of NCBI NO: 7431444 NR Description: aldehyde dehydrogenase (NAD) (EC 1.2.1.3) 2A
  misc_feature (1)..(423): Homolog of NCBI NO: 15128580 NR Description: mitochondrial aldehyde dehydrogenase ALDH2
  misc_feature (1)..(423): Homolog of NCBI NO: 18395300 NR Description: mitochondrial aldehyde dehydrogenase (ALDH3)
  misc_feature (1)..(423): Homolog of NCBI NO: 20530127 NR Description: mitochondrial aldehyde dehydrogenase [Secale
  misc_feature (1)..(423): Homolog of NCBI NO: 29373073 NR Description: aldehyde dehydrogenase 1 precursor [Lotus
  misc_feature (1)..(423): Homolog of NCBI NO: 15228319 NR Description: mitochondrial aldehyde dehydrogenase, putative
MSAYERSRVLLRFADLVEKHSEELASLETWDNGKPYQQSLTAEIPMFARLFRYYAGWADKIHGLTIPADGNYQVHTLHEPIGVAGQIIPWNFPLLMFAWKVGPALACGNTIVLKTAEQTPLTAFYAGKLFLEAGLPPGVLNIVSGFGATAGAALASHMDVDKLAFTGSTDTGKVILGLAANSNLKPVTLELGGKSPFIVFEDADIDKAVELAHFALFFNQGQCCCAGSRTFVHEKVYDEFVEKSKARALKRVVGDPFRKGIEQGPQIDLKQFEKVMKYIKSGIESNATLECGGDQIGDKGYFIQPTVFSNVKDDMLIAQDEIFGPVQSILKFSDVDEVIKRANETKYGLAAGVFTKNLDTANRVSRALKAGTVWVNCFDVFDAAIPFGGYKMSGNGREKGIYSLNNYLQIKAVVTALNKPAWI

SEQ ID NO: 45164 - protein, 378 aa, Arabidopsis thaliana
  peptide (1)..(378): Ceres Seq. ID no. 13575937
  misc_feature (1)..(378): Homolog of NCBI NO: 7431451 NR Description: rf2 nuclear restorer protein - maize
  misc_feature (1)..(378): Homolog of NCBI NO: 8163730 NR Description: aldehyde dehydrogenase [Oryza sativa]
  misc_feature (1)..(378): Homolog of NCBI NO: 11691926 NR Description: aldehyde dehydrogenase ALDH2b
  misc_feature (1)..(378): Homolog of NCBI NO: 20530131 NR Description: mitochondrial aldehyde dehydrogenase [Sorghum
  misc_feature (1)..(378): Homolog of NCBI NO: 7431444 NR Description: aldehyde dehydrogenase (NAD) (EC 1.2.1.3) 2A
  misc_feature (1)..(378): Homolog of NCBI NO: 15128580 NR Description: mitochondrial aldehyde dehydrogenase ALDH2
  misc_feature (1)..(378): Homolog of NCBI NO: 18395300 NR Description: mitochondrial aldehyde dehydrogenase (ALDH3)
  misc_feature (1)..(378): Homolog of NCBI NO: 20530127 NR Description: mitochondrial aldehyde dehydrogenase [Secale
  misc_feature (1)..(378): Homolog of NCBI NO: 29373073 NR Description: aldehyde dehydrogenase 1 precursor [Lotus
  misc_feature (1)..(378): Homolog of NCBI NO: 15228319 NR Description: mitochondrial aldehyde dehydrogenase, putative
MFARLFRYYAGWADKIHGLTIPADGNYQVHTLHEPIGVAGQIIPWNFPLLMFAWKVGPALACGNTIVLKTAEQTPLTAFYAGKLFLEAGLPPGVLNIVSGFGATAGAALASHMDVDKLAFTGSTDTGKVILGLAANSNLKPVTLELGGKSPFIVFEDADIDKAVELAHFALFFNQGQCCCAGSRTFVHEKVYDEFVEKSKARALKRVVGDPFRKGIEQGPQIDLKQFEKVMKYIKSGIESNATLECGGDQIGDKGYFIQPTVFSNVKDDMLIAQDEIFGPVQSILKFSDVDEVIKRANETKYGLAAGVFTKNLDTANRVSRALKAGTVWVNCFDVFDAAIPFGGYKMSGNGREKGIYSLNNYLQIKAVVTALNKPAWI

SEQ ID NO: 45165 - DNA, 2012 bp, Arabidopsis thaliana
  misc_feature (1)..(2012): Ceres Seq. ID no. 12560443
  misc_feature: MA Experiment ID: 20000169 Result: Up-regulated in Transcription
  misc_feature: MA Experiment 20000169 PARAMETER Experiment Name: At_100uM_ABA_P Parameter: Age (day) Value: 14
  misc_feature: MA Experiment 20000169 PARAMETER Experiment Name: At_100uM_ABA_P Parameter: Organism Value: A. thaliana
  misc_feature: MA Experiment 20000169 PARAMETER Experiment Name: At_100uM_ABA_P Parameter: Plant Line Value: WS
  misc_feature: MA Experiment 20000169 PARAMETER Experiment Name: At_100uM_ABA_P Parameter: Timepoint (hr) Value: 6
  misc_feature: MA Experiment 20000169 PARAMETER Experiment Name: At_100uM_ABA_P Parameter: Tissue Value: Aerial
  misc_feature: MA Experiment 20000169 PARAMETER Experiment Name: At_100uM_ABA_P Parameter: Treatment Value: 100uM ABA vs. No Treatment
  misc_feature: MA Experiment ID: 20000185 Result: Down-regulated in Transcription
  misc_feature: MA Experiment 20000185 PARAMETER Experiment Name: At_Roots__P Parameter: Age (day) Value: 7 vs. 21
  misc_feature: MA Experiment 20000185 PARAMETER Experiment Name: At_Roots__P Parameter: Organism Value: A. thaliana
  misc_feature: MA Experiment 20000185 PARAMETER Experiment Name: At_Roots__P Parameter: Tissue Value: Roots vs. Whole Plant
  misc_feature: MA Experiment ID: 20000264 Result: Up-regulated in Transcription
  misc_feature: MA Experiment 20000264 PARAMETER Experiment Name: At_Open_Flower_P Parameter: Age (day) Value: 21
  misc_feature: MA Experiment 20000264 PARAMETER Experiment Name: At_Open_Flower_P Parameter: Plant Line Value: WS
  misc_feature: MA Experiment 20000264 PARAMETER Experiment Name: At_Open_Flower_P Parameter: Tissue Value: Open Flower vs. Whole Plant
  misc_feature: MA Experiment ID: 20000436 Result: Up-regulated in Transcription
  misc_feature: MA Experiment 20000436 PARAMETER Experiment Name: At_Drought_P Parameter: Age (day) Value: 7
  misc_feature: MA Experiment 20000436 PARAMETER Experiment Name: At_Drought_P Parameter: Organism Value: A. thaliana
  misc_feature: MA Experiment 20000436 PARAMETER Experiment Name: At_Drought_P Parameter: Plant Line Value: WS
  misc_feature: MA Experiment 20000436 PARAMETER Experiment Name: At_Drought_P Parameter: Timepoint (hr) Value: 12
  misc_feature: MA Experiment 20000436 PARAMETER Experiment Name: At_Drought_P Parameter: Tissue Value: Whole Plant
  misc_feature: MA Experiment 20000436 PARAMETER Experiment Name: At_Drought_P Parameter: Treatment Value: Drought vs. No Drought
  misc_feature: MA Experiment ID: 20000437 Result: Up-regulated in Transcription
  misc_feature: MA Experiment 20000437 PARAMETER Experiment Name: At_Drought_P Parameter: Age (day) Value: 8
  misc_feature: MA Experiment 20000437 PARAMETER Experiment Name: At_Drought_P Parameter: Organism Value: A. thaliana
  misc_feature: MA Experiment 20000437 PARAMETER Experiment Name: At_Drought_P Parameter: Plant Line Value: WS
  misc_feature: MA Experiment 20000437 PARAMETER Experiment Name: At_Drought_P Parameter: Timepoint (hr) Value: 24
  misc_feature: MA Experiment 20000437 PARAMETER Experiment Name: At_Drought_P Parameter: Tissue Value: Whole Plant
  misc_feature: MA Experiment 20000437 PARAMETER Experiment Name: At_Drought_P Parameter: Treatment Value: Drought vs. No Drought
  misc_feature: MA Experiment ID: 20000439 Result: Down-regulated in Transcription
  misc_feature: MA Experiment 20000439 PARAMETER Experiment Name: At_Roots__P Parameter: Age (day) Value: 14 vs. 21
  misc_feature: MA Experiment 20000439 PARAMETER Experiment Name: At_Roots__P Parameter: Organism Value: A. thaliana
  misc_feature: MA Experiment 20000439 PARAMETER Experiment Name: At_Roots__P Parameter: Tissue Value: Roots vs. Whole Plant
  misc_feature: MA Experiment ID: 20000453 Result: Up-regulated in Transcription
  misc_feature: MA Experiment 20000453 PARAMETER Experiment Name: At_100uM_ABA_P Parameter: Age (day) Value: 15
  misc_feature: MA Experiment 20000453 PARAMETER Experiment Name: At_100uM_ABA_P Parameter: Organism Value: A. thaliana
  misc_feature: MA Experiment 20000453 PARAMETER Experiment Name: At_100uM_ABA_P Parameter: Plant Line Value: WS
  misc_feature: MA Experiment 20000453 PARAMETER Experiment Name: At_100uM_ABA_P Parameter: Timepoint (hr) Value: 24
  misc_feature: MA Experiment 20000453 PARAMETER Experiment Name: At_100uM_ABA_P Parameter: Tissue Value: Aerial
  misc_feature: MA Experiment 20000453 PARAMETER Experiment Name: At_100uM_ABA_P Parameter: Treatment Value: 100uM ABA vs. No Treatment
  misc_feature: MA Experiment ID: 20000794 Result: Up-regulated in Transcription
  misc_feature: MA Experiment 20000794 PARAMETER Experiment Name: At_Petals_P Parameter: Age (day) Value: 23-25 days
  misc_feature: MA Experiment 20000794 PARAMETER Experiment Name: At_Petals_P Parameter: Plant Line Value: WS
  misc_feature: MA Experiment 20000794 PARAMETER Experiment Name: At_Petals_P Parameter: Tissue Value: Petals vs. Whole plant
  misc_feature: MA Experiment ID: 20001559 Result: Up-regulated in Transcription
  misc_feature: MA Experiment 20001559 PARAMETER Experiment Name: At_Drought_Soil_Dry_P Parameter: Age (day) Value: 28
  misc_feature: MA Experiment 20001559 PARAMETER Experiment Name: At_Drought_Soil_Dry_P Parameter: Organism Value: A. thaliana
  misc_feature: MA Experiment 20001559 PARAMETER Experiment Name: At_Drought_Soil_Dry_P Parameter: Plant Line Value: WS
  misc_feature: MA Experiment 20001559 PARAMETER Experiment Name: At_Drought_Soil_Dry_P Parameter: Post Timepoint (hr) Value: 29
  misc_feature: MA Experiment 20001559 PARAMETER Experiment Name: At_Drought_Soil_Dry_P Parameter: Post-Treatment Value: Re-Water vs. No Drought
  misc_feature: MA Experiment 20001559 PARAMETER Experiment Name: At_Drought_Soil_Dry_P Parameter: Timepoint (day) Value: 14
  misc_feature: MA Experiment 20001559 PARAMETER Experiment Name: At_Drought_Soil_Dry_P Parameter: Treatment Value: Drought vs. No Drought
  misc_feature: MA Experiment ID: 20001904 Result: Up-regulated in Transcription
  misc_feature: MA Experiment 20001904 PARAMETER Experiment Name: At_Drought_Reproduction_P Parameter: Age (day) Value: 37
  misc_feature: MA Experiment 20001904 PARAMETER Experiment Name: At_Drought_Reproduction_P Parameter: Organism Value: A. thaliana
  misc_feature: MA Experiment 20001904 PARAMETER Experiment Name: At_Drought_Reproduction_P Parameter: Plant Line Value: WS
  misc_feature: MA Experiment 20001904 PARAMETER Experiment Name: At_Drought_Reproduction_P Parameter: Timepoint (day) Value: 7
  misc_feature: MA Experiment 20001904 PARAMETER Experiment Name: At_Drought_Reproduction_P Parameter: Tissue Value: Rosettes
  misc_feature: MA Experiment 20001904 PARAMETER Experiment Name: At_Drought_Reproduction_P Parameter: Treatment Value: Drought vs. No Drought
  misc_feature: MA Experiment ID: 20001905 Result: Up-regulated in Transcription
  misc_feature: MA Experiment 20001905 PARAMETER Experiment Name: At_Drought_Reproduction_P Parameter: Age (day) Value: 40
  misc_feature: MA Experiment 20001905 PARAMETER Experiment Name: At_Drought_Reproduction_P Parameter: Organism Value: A. thaliana
  misc_feature: MA Experiment 20001905 PARAMETER Experiment Name: At_Drought_Reproduction_P Parameter: Plant Line Value: WS
  misc_feature: MA Experiment 20001905 PARAMETER Experiment Name: At_Drought_Reproduction_P Parameter: Timepoint (day) Value: 10
  misc_feature: MA Experiment 20001905 PARAMETER Experiment Name: At_Drought_Reproduction_P Parameter: Tissue Value: Rosettes
  misc_feature: MA Experiment 20001905 PARAMETER Experiment Name: At_Drought_Reproduction_P Parameter: Treatment Value: Drought vs. No Drought
  misc_feature: MA Experiment ID: 20001906 Result: Up-regulated in Transcription
  misc_feature: MA Experiment 20001906 PARAMETER Experiment Name: At_Drought_Reproduction_P Parameter: Age (day) Value: 35
  misc_feature: MA Experiment 20001906 PARAMETER Experiment Name: At_Drought_Reproduction_P Parameter: Organism Value: A. thaliana
  misc_feature: MA Experiment 20001906 PARAMETER Experiment Name: At_Drought_Reproduction_P Parameter: Plant Line Value: WS
  misc_feature: MA Experiment 20001906 PARAMETER Experiment Name: At_Drought_Reproduction_P Parameter: Timepoint (day) Value: 5
  misc_feature: MA Experiment 20001906 PARAMETER Experiment Name: At_Drought_Reproduction_P Parameter: Tissue Value: Siliques
  misc_feature: MA Experiment 20001906 PARAMETER Experiment Name: At_Drought_Reproduction_P Parameter: Treatment Value: Drought vs. No Drought
  misc_feature: MA Experiment ID: 20001908 Result: Up-regulated in Transcription
  misc_feature: MA Experiment 20001908 PARAMETER Experiment Name: At_Drought_Reproduction_P Parameter: Age (day) Value: 40
  misc_feature: MA Experiment 20001908 PARAMETER Experiment Name: At_Drought_Reproduction_P Parameter: Organism Value: A. thaliana
  misc_feature: MA Experiment 20001908 PARAMETER Experiment Name: At_Drought_Reproduction_P Parameter: Plant Line Value: WS
  misc_feature: MA Experiment 20001908 PARAMETER Experiment Name: At_Drought_Reproduction_P Parameter: Timepoint (day) Value: 10
  misc_feature: MA Experiment 20001908 PARAMETER Experiment Name: At_Drought_Reproduction_P Parameter: Tissue Value: Siliques
  misc_feature: MA Experiment 20001908 PARAMETER Experiment Name: At_Drought_Reproduction_P Parameter: Treatment Value: Drought vs. No Drought
tccttcttcttcttcttctcacgctcacggcctttggagttttgtgttaccattttcgctcgcgtcattactggtgttagggttttcttcaaaagcttcttaatccgtcgaaattgctcttttctctccctcattacagagataaatggcttcaaagattattgctggcaagccggatgataccgagtatgaaatcattgaaggtgagtctgagagcgctttagcagcggggacaagcccttggatgaattcatcaacgttgaagcttcgacatcgaattggaagaggtcccttcggtgatgtttggctggctactcatcatcagtcaactgaggactatgatgagcatcatgaagtggccatcaaaatgctttatcccatcaaggaagatcaaagaagggttgtggtagataagtttgaagatctcttctctaaatgtcaaggactagagaatgtctgtctgctcaggggagtctctagtatcaatggaaagatatgtgtcgtcatgaaattctacgagggctctcttggtgacaagatggctcggcttaaaggaggaaagctttcactgccagatgttttgagatacggggttgatctggctacagggatcctggagttgcactcaaaagggtttctcattctcaatctcaagccctctaactttcttctcagtgataacgacaaggccatcctcggggatgttgggatcccttatctccttcttagtatccctttaccaagttctgatatgacagagagacttggaactccaaactatatggcaccagaacagtggcaaccggatgtcagaggtcccatgtcctttgagactgattcttggggatttggttgcagcattgttgaaatgctgactggtgtacaaccttggtctgggagatctgccgatgaaatatatgatttggtggtgagaaagcaagaaaagcttagtatccccagtagcataccgcctcctctcgagaacctacttcggggttgctttatgtatgatcttcgaagccgaccttcgatgactgacatcttactcgtcttaaagagcttgcagaactcggaggaggaacaggtcaggagaggcattgatagtagagaaatcaggaagagctcggctactcttggttatacagaatggtttctttcaaaggatcatctgcaagtgcgcgacaccgtgcgttcaagaaagcctgccaattcgtgtaagcatgagaacatggatgtgccagaaggaatggtggttggtttagaacgtgactccacagacccagatggatttgtgctagttaaagtccatggtgtacatgatccattaagggttcacgtatctgttcttgaacgggtaactaacggcttagcttctggagattgggtgcgtctgaaggtcaggaaagacaagaggcactctccggttggtgttctccattcaattgaccgtgagggaaatgtagctgttggatttattgggttgccaactctctggaaagggacatcatcgcagcttcagatggctaaagtatacagtgtgggtcaatttgtgaaactcaaagccaatgttgtcatcccgagattcaaatggatgcgtaaaggtagaggtatttgggcaactggcaggatctctcaggttctaccaaacggttgccttgaagtggacttccctggaatgttaccttttggagaggaacatggaagctatcttgcagatccggctgaagtagagattgtgaatttcaatacatgtcaaggagctgtggaaaaatatcaacatctggaggattttcattgggctgtgagacctttgcttattgctatgggtctattgacagcgatgaagttagggatctgtgtcaggaagaaaataggaaggtcaaaggatgggaaacaacgcgatggctcgactggacaaggtgactgtaagattccggatggtaagggctctgacaaatctaaatggcttgtgttcttttaggtctgctatgagacacagaccttgtctggtc

SEQ ID NO: 45166 - protein, 611 aa, Arabidopsis thaliana
  peptide (1)..(611): Ceres Seq. ID no. 12560444
  misc_feature (1)..(306): Homolog of NCBI NO: 15227883 NR Description: putative protein kinase
  misc_feature (24)..(300): Homolog of NCBI NO: 34334391 NR Description: NIMA-related kinase 1 [Chlamydomonas reinhardtii]
  misc_feature (47)..(316): Homolog of NCBI NO: 27085282 NR Description: serine/threonine protein kinase
  misc_feature (40)..(302): Homolog of NCBI NO: 39588025 NR Description: Hypothetical protein CBG00136 [Caenorhabditis
  misc_feature (33)..(309): Homolog of NCBI NO: 38345798 NR Description: OSJNBa0085I10.15 [Oryza sativa (japonica
  misc_feature (41)..(308): Homolog of NCBI NO: 25146954 NR Description: Protein kinase [Caenorhabditis elegans]
  misc_feature (5)..(311): Homolog of NCBI NO: 34901608 NR Description: P0571D04.18 [Oryza sativa (japonica
  misc_feature (45)..(300): Homolog of NCBI NO: 34334393 NR Description: NIMA-related kinase 2 [Chlamydomonas reinhardtii]
  misc_feature (5)..(309): Homolog of NCBI NO: 34393850 NR Description: putative serine/threonine protein kinase
  misc_feature (29)..(331): Homolog of NCBI NO: 18420244 NR Description: protein kinase like protein; protein id:
MASKIIAGKPDDTEYEIIEGESESALAAGTSPWMNSSTLKLRHRIGRGPFGDVWLATHHQSTEDYDEHHEVAIKMLYPIKEDQRRVVVDKFEDLFSKCQGLENVCLLRGVSSINGKICVVMKFYEGSLGDKMARLKGGKLSLPDVLRYGVDLATGILELHSKGFLILNLKPSNFLLSDNDKAILGDVGIPYLLLSIPLPSSDMTERLGTPNYMAPEQWQPDVRGPMSFETDSWGFGCSIVEMLTGVQPWSGRSADEIYDLVVRKQEKLSIPSSIPPPLENLLRGCFMYDLRSRPSMTDILLVLKSLQNSEEEQVRRGIDSREIRKSSATLGYTEWFLSKDHLQVRDTVRSRKPANSCKHENMDVPEGMVVGLERDSTDPDGFVLVKVHGVHDPLRVHVSVLERVTNGLASGDWVRLKVRKDKRHSPVGVLHSIDREGNVAVGFIGLPTLWKGTSSQLQMAKVYSVGQFVKLKANVVIPRFKWMRKGRGIWATGRISQVLPNGCLEVDFPGMLPFGEEHGSYLADPAEVEIVNFNTCQGAVEKYQHLEDFHWAVRPLLIAMGLLTAMKLGICVRKKIGRSKDGKQRDGSTGQGDCKIPDGKGSDKSKWLVFF

SEQ ID NO: 45167 - protein, 578 aa, Arabidopsis thaliana
  peptide (1)..(578): Ceres Seq. ID no. 12560445
  misc_feature (1)..(273): Homolog of NCBI NO: 15227883 NR Description: putative protein kinase
  misc_feature (1)..(267): Homolog of NCBI NO: 34334391 NR Description: NIMA-related kinase 1 [Chlamydomonas reinhardtii]
  misc_feature (14)..(283): Homolog of NCBI NO: 27085282 NR Description: serine/threonine protein kinase
  misc_feature (7)..(269): Homolog of NCBI NO: 39588025 NR Description: Hypothetical protein CBG00136 [Caenorhabditis
  misc_feature (1)..(276): Homolog of NCBI NO: 38345798 NR Description: OSJNBa0085I10.15 [Oryza sativa (japonica
  misc_feature (8)..(275): Homolog of NCBI NO: 25146954 NR Description: Protein kinase [Caenorhabditis elegans]
  misc_feature (1)..(278): Homolog of NCBI NO: 34901608 NR Description: P0571D04.18 [Oryza sativa (japonica
  misc_feature (12)..(267): Homolog of NCBI NO: 34334393 NR Description: NIMA-related kinase 2 [Chlamydomonas reinhardtii]
  misc_feature (1)..(276): Homolog of NCBI NO: 34393850 NR Description: putative serine/threonine protein kinase
  misc_feature (1)..(298): Homolog of NCBI NO: 18420244 NR Description: protein kinase like protein; protein id:
MNSSTLKLRHRIGRGPFGDVWLATHHQSTEDYDEHHEVAIKMLYPIKEDQRRVVVDKFEDLFSKCQGLENVCLLRGVSSINGKICVVMKFYEGSLGDKMARLKGGKLSLPDVLRYGVDLATGILELHSKGFLILNLKPSNFLLSDNDKAILGDVGIPYLLLSIPLPSSDMTERLGTPNYMAPEQWQPDVRGPMSFETDSWGFGCSIVEMLTGVQPWSGRSADEIYDLVVRKQEKLSIPSSIPPPLENLLRGCFMYDLRSRPSMTDILLVLKSLQNSEEEQVRRGIDSREIRKSSATLGYTEWFLSKDHLQVRDTVRSRKPANSCKHENMDVPEGMVVGLERDSTDPDGFVLVKVHGVHDPLRVHVSVLERVTNGLASGDWVRLKVRKDKRHSPVGVLHSIDREGNVAVGFIGLPTLWKGTSSQLQMAKVYSVGQFVKLKANVVIPRFKWMRKGRGIWATGRISQVLPNGCLEVDFPGMLPFGEEHGSYLADPAEVEIVNFNTCQGAVEKYQHLEDFHWAVRPLLIAMGLLTAMKLGICVRKKIGRSKDGKQRDGSTGQGDCKIPDGKGSDKSKWLVFF

SEQ ID NO: 45168 - protein, 537 aa, Arabidopsis thaliana
  peptide (1)..(537): Ceres Seq. ID no. 12560446
  misc_feature (1)..(232): Homolog of NCBI NO: 15227883 NR Description: putative protein kinase
  misc_feature (1)..(226): Homolog of NCBI NO: 34334391 NR Description: NIMA-related kinase 1 [Chlamydomonas reinhardtii]
  misc_feature (1)..(242): Homolog of NCBI NO: 27085282 NR Description: serine/threonine protein kinase
  misc_feature (1)..(228): Homolog of NCBI NO: 39588025 NR Description: Hypothetical protein CBG00136 [Caenorhabditis
  misc_feature (1)..(235): Homolog of NCBI NO: 38345798 NR Description: OSJNBa0085I10.15 [Oryza sativa (japonica
  misc_feature (1)..(234): Homolog of NCBI NO: 25146954 NR Description: Protein kinase [Caenorhabditis elegans]
  misc_feature (1)..(237): Homolog of NCBI NO: 34901608 NR Description: P0571D04.18 [Oryza sativa (japonica
  misc_feature (1)..(226): Homolog of NCBI NO: 34334393 NR Description: NIMA-related kinase 2 [Chlamydomonas reinhardtii]
  misc_feature (1)..(235): Homolog of NCBI NO: 34393850 NR Description: putative serine/threonine protein kinase
  misc_feature (1)..(257): Homolog of NCBI NO: 18420244 NR Description: protein kinase like protein; protein id:
MLYPIKEDQRRVVVDKFEDLFSKCQGLENVCLLRGVSSINGKICVVMKFYEGSLGDKMARLKGGKLSLPDVLRYGVDLATGILELHSKGFLILNLKPSNFLLSDNDKAILGDVGIPYLLLSIPLPSSDMTERLGTPNYMAPEQWQPDVRGPMSFETDSWGFGCSIVEMLTGVQPWSGRSADEIYDLVVRKQEKLSIPSSIPPPLENLLRGCFMYDLRSRPSMTDILLVLKSLQNSEEEQVRRGIDSREIRKSSATLGYTEWFLSKDHLQVRDTVRSRKPANSCKHENMDVPEGMVVGLERDSTDPDGFVLVKVHGVHDPLRVHVSVLERVTNGLASGDWVRLKVRKDKRHSPVGVLHSIDREGNVAVGFIGLPTLWKGTSSQLQMAKVYSVGQFVKLKANVVIPRFKWMRKGRGIWATGRISQVLPNGCLEVDFPGMLPFGEEHGSYLADPAEVEIVNFNTCQGAVEKYQHLEDFHWAVRPLLIAMGLLTAMKLGICVRKKIGRSKDGKQRDGSTGQGDCKIPDGKGSDKSKWLVFF

SEQ ID NO: 45169 - DNA, 1294 bp, Arabidopsis thaliana
  misc_feature (1)..(1294): Ceres Seq. ID no. 12560447
  misc_feature: MA Experiment ID: 20001451 Result: Up-regulated in Transcription
  misc_feature: MA Experiment 20001451 PARAMETER Experiment Name: At_Far-red-induction_P Parameter: Age (day) Value: 7
  misc_feature: MA Experiment 20001451 PARAMETER Experiment Name: At_Far-red-induction_P Parameter: Light Value: Far-red vs. White
  misc_feature: MA Experiment 20001451 PARAMETER Experiment Name: At_Far-red-induction_P Parameter: Organism Value: A. thaliana
  misc_feature: MA Experiment 20001451 PARAMETER Experiment Name: At_Far-red-induction_P Parameter: Plant Line Value: Columbia
  misc_feature: MA Experiment 20001451 PARAMETER Experiment Name: At_Far-red-induction_P Parameter: Timepoint (hr) Value: 24
  misc_feature: MA Experiment 20001451 PARAMETER Experiment Name: At_Far-red-induction_P Parameter: Tissue Value: Whole Plant
atcatttttcccttttttctaaaattctctctttgattcctatcttcttctctttattttcactttgtgctttctctgtctctactattatgagtctaaaagtctactagctgttcaatagttttgtctttctgtgtttcttcttcttcaaaaccgaaagaaattcaaaaagagtctttcgctgcttgttagtggggtgaggaacaaatgggaagaacaccttgttgtgacaagattggtttgaagaaaggtccttggacgcctgaagaagatgaggttcttgttgcgcatatcaagaaaaatggacatggaagctggagaacacttcctaaacttgctggtttacttcgctgtgggaagagttgcaggctgagatggacaaactatctgagaccagacataaagagaggtcctttcactgctgatgaagagaaacttgttatccagcttcatgccattctcggcaacaggtgggctgctattgcagcacagcttccaggaagaacagacaacgagatcaagaacttatggaacactcatttgaagaaacgtcttttatctatgggtcttgatcccagaactcatgagccattaccttcatatgggttagctaaacaagctccatcttcaccaacaactcgccacatggctcaatgggaaagtgctagggttgaagctgaggcaaggctttctagagaatcaatgctctttagcccttctttttactctggtgtagtaaaaactgaatgtgatcacttcttacgcatttggaattccgagattggtgaagctttcaggaatctcgctccattagatgaatcaactattactagtcaaagcccttgctcgagggcaacatcgacctcatctgcacttctgaagagctcaacaaattcttggggagggaaagaggttactgtggcgattcatggctcagattattctccatattcaaatgatcttgaagatgattcaacagactctgctcttcaacttctgcttgatttccctataagcgatgatgatatgagcttcttggaagagaacattgacagctactcacaggctcctcctattggtcttgtttccatggtttccaaattctagtcttatgagagcctaatatctaagaaaaagattcaaactttgcttccttttggtttttagtgatgataagtagggatatagtatctatgtaaatcagcattagttagttgaagtacttaatcaaccctttcttttatgatttgatcatgtttgagaaaattgcagaacattaaacaattaaccattc

SEQ ID NO: 45170 - protein, 299 aa, Arabidopsis thaliana
  peptide (1)..(299): Ceres Seq. ID no. 12560448
  misc_feature (14)..(61): Pfam Name: Myb-like DNA-binding domain Pfam Description: Myb-like DNA-binding domain
  misc_feature (1)..(162): Homolog of NCBI NO: 19072736 NR Description: typical P-type R2R3 Myb protein [Zea mays]
  misc_feature (1)..(167): Homolog of NCBI NO: 27125807 NR Description: MYB27 protein [Oryza sativa (japonica
  misc_feature (1)..(233): Homolog of NCBI NO: 13346188 NR Description: GHMYB25 [Gossypium hirsutum]
  misc_feature (1)..(173): Homolog of NCBI NO: 15232045 NR Description: myb family transcription factor
  misc_feature (1)..(289): Homolog of NCBI NO: 28628947 NR Description: MYB1 [Dendrobium sp. XMW-2002-1]
  misc_feature (1)..(183): Homolog of NCBI NO: 15242272 NR Description: myb family transcription factor
  misc_feature (1)..(180): Homolog of NCBI NO: 282964 NR Description: myb-related protein 1 - garden petunia
  misc_feature (35)..(288): Homolog of NCBI NO: 4115565 NR Description: MYB homologue [Perilla frutescens]
  misc_feature (76)..(299): Homolog of NCBI NO: 11358681 NR Description: probable transcription factor MYB17
  misc_feature (1)..(299): Homolog of NCBI NO: 15233066 NR Description: myb DNA-binding protein (MYB17); protein id:
MGRTPCCDKIGLKKGPWTPEEDEVLVAHIKKNGHGSWRTLPKLAGLLRCGKSCRLRWTNYLRPDIKRGPFTADEEKLVIQLHAILGNRWAAIAAQLPGRTDNEIKNLWNTHLKKRLLSMGLDPRTHEPLPSYGLAKQAPSSPTTRHMAQWESARVEAEARLSRESMLFSPSFYSGVVKTECDHFLRIWNSEIGEAFRNLAPLDESTITSQSPCSRATSTSSALLKSSTNSWGGKEVTVAIHGSDYSPYSNDLEDDSTDSALQLLLDFPISDDDMSFLEENIDSYSQAPPIGLVSMVSKF

SEQ ID NO: 45171 - protein, 181 aa, Arabidopsis thaliana
  peptide (1)..(181): Ceres Seq. ID no. 12560449
  misc_feature (1)..(44): Homolog of NCBI NO: 19072736 NR Description: typical P-type R2R3 Myb protein [Zea mays]
  misc_feature (1)..(49): Homolog of NCBI NO: 27125807 NR Description: MYB27 protein [Oryza sativa (japonica
  misc_feature (1)..(115): Homolog of NCBI NO: 13346188 NR Description: GHMYB25 [Gossypium hirsutum]
  misc_feature (1)..(55): Homolog of NCBI NO: 15232045 NR Description: myb family transcription factor
  misc_feature (1)..(171): Homolog of NCBI NO: 28628947 NR Description: MYB1 [Dendrobium sp. XMW-2002-1]
  misc_feature (1)..(65): Homolog of NCBI NO: 15242272 NR Description: myb family transcription factor
  misc_feature (1)..(62): Homolog of NCBI NO: 282964 NR Description: myb-related protein 1 - garden petunia
  misc_feature (1)..(170): Homolog of NCBI NO: 4115565 NR Description: MYB homologue [Perilla frutescens]
  misc_feature (1)..(181): Homolog of NCBI NO: 11358681 NR Description: probable transcription factor MYB17
  misc_feature (1)..(181): Homolog of NCBI NO: 15233066 NR Description: myb DNA-binding protein (MYB17); protein id:
MGLDPRTHEPLPSYGLAKQAPSSPTTRHMAQWESARVEAEARLSRESMLFSPSFYSGVVKTECDHFLRIWNSEIGEAFRNLAPLDESTITSQSPCSRATSTSSALLKSSTNSWGGKEVTVAIHGSDYSPYSNDLEDDSTDSALQLLLDFPISDDDMSFLEENIDSYSQAPPIGLVSMVSKF

SEQ ID NO: 45172 - protein, 153 aa, Arabidopsis thaliana
  peptide (1)..(153): Ceres Seq. ID no. 12560450
  misc_feature (1)..(16): Homolog of NCBI NO: 19072736 NR Description: typical P-type R2R3 Myb protein [Zea mays]
  misc_feature (1)..(21): Homolog of NCBI NO: 27125807 NR Description: MYB27 protein [Oryza sativa (japonica
  misc_feature (1)..(87): Homolog of NCBI NO: 13346188 NR Description: GHMYB25 [Gossypium hirsutum]
  misc_feature (1)..(27): Homolog of NCBI NO: 15232045 NR Description: myb family transcription factor
  misc_feature (1)..(143): Homolog of NCBI NO: 28628947 NR Description: MYB1 [Dendrobium sp. XMW-2002-1]
  misc_feature (1)..(37): Homolog of NCBI NO: 15242272 NR Description: myb family transcription factor
  misc_feature (1)..(34): Homolog of NCBI NO: 282964 NR Description: myb-related protein 1 - garden petunia
  misc_feature (1)..(142): Homolog of NCBI NO: 4115565 NR Description: MYB homologue [Perilla frutescens]
  misc_feature (1)..(153): Homolog of NCBI NO: 11358681 NR Description: probable transcription factor MYB17
  misc_feature (1)..(153): Homolog of NCBI NO: 15233066 NR Description: myb DNA-binding protein (MYB17); protein id:
MAQWESARVEAEARLSRESMLFSPSFYSGVVKTECDHFLRIWNSEIGEAFRNLAPLDESTITSQSPCSRATSTSSALLKSSTNSWGGKEVTVAIHGSDYSPYSNDLEDDSTDSALQLLLDFPISDDDMSFLEENIDSYSQAPPIGLVSMVSKF

SEQ ID NO: 45173 - DNA, 2957 bp, Arabidopsis thaliana; identical to SEQ ID NO: 38468
  misc_feature (1)..(2957): Ceres Seq. ID no. 12560451
  misc_feature: MA Experiment ID: 20000171 Result: Down-regulated in Transcription
  misc_feature: MA Experiment 20000171 PARAMETER Experiment Name: At_42deg_Heat_P Parameter: Age (day) Value: 14
  misc_feature: MA Experiment 20000171 PARAMETER Experiment Name: At_42deg_Heat_P Parameter: Organism Value: A. thaliana
  misc_feature: MA Experiment 20000171 PARAMETER Experiment Name: At_42deg_Heat_P Parameter: Plant Line Value: WS
  misc_feature: MA Experiment 20000171 PARAMETER Experiment Name: At_42deg_Heat_P Parameter: Temperature (deg C) Value: 42 vs. 22
  misc_feature: MA Experiment 20000171 PARAMETER Experiment Name: At_42deg_Heat_P Parameter: Timepoint (hr) Value: 1
  misc_feature: MA Experiment 20000171 PARAMETER Experiment Name: At_42deg_Heat_P Parameter: Tissue Value: Aerial
  misc_feature: MA Experiment ID: 20000173 Result: Down-regulated in Transcription
  misc_feature: MA Experiment 20000173 PARAMETER Experiment Name: At_42deg_Heat_P Parameter: Age (day) Value: 14
  misc_feature: MA Experiment 20000173 PARAMETER Experiment Name: At_42deg_Heat_P Parameter: Organism Value: A. thaliana
  misc_feature: MA Experiment 20000173 PARAMETER Experiment Name: At_42deg_Heat_P Parameter: Plant Line Value: WS
  misc_feature: MA Experiment 20000173 PARAMETER Experiment Name: At_42deg_Heat_P Parameter: Temperature (deg C) Value: 42 vs. 22
  misc_feature: MA Experiment 20000173 PARAMETER Experiment Name: At_42deg_Heat_P Parameter: Timepoint (hr) Value: 6
  misc_feature: MA Experiment 20000173 PARAMETER Experiment Name: At_42deg_Heat_P Parameter: Tissue Value: Aerial
  misc_feature: MA Experiment ID: 20000286 Result: Up-regulated in Transcription
  misc_feature: MA Experiment 20000286 PARAMETER Experiment Name: At_Open_Flower_P Parameter: Age (day) Value: 21
  misc_feature: MA Experiment 20000286 PARAMETER Experiment Name: At_Open_Flower_P Parameter: Plant Line Value: WS
  misc_feature: MA Experiment 20000286 PARAMETER Experiment Name: At_Open_Flower_P Parameter: Tissue Value: Half Open vs. Whole Plant
  misc_feature: MA Experiment ID: 20000495 Result: Down-regulated in Transcription
  misc_feature: MA Experiment 20000495 PARAMETER Experiment Name: At_Guard_Cells_P Parameter: Harvest Date Value: 8/2/2002
  misc_feature: MA Experiment 20000495 PARAMETER Experiment Name: At_Guard_Cells_P Parameter: Organism Value: A. thaliana
  misc_feature: MA Experiment 20000495 PARAMETER Experiment Name: At_Guard_Cells_P Parameter: Tissue Value: Guard Cells vs. Leaves
  misc_feature: MA Experiment ID: 20000794 Result: Up-regulated in Transcription
  misc_feature: MA Experiment 20000794 PARAMETER Experiment Name: At_Petals_P Parameter: Age (day) Value: 23-25 days
  misc_feature: MA Experiment 20000794 PARAMETER Experiment Name: At_Petals_P Parameter: Plant Line Value: WS
  misc_feature: MA Experiment 20000794 PARAMETER Experiment Name: At_Petals_P Parameter: Tissue Value: Petals vs. Whole plant

SEQ ID NO: 45174 - protein, 809 aa, Arabidopsis thaliana; identical to SEQ ID NO: 38469
  peptide (1)..(809): Ceres Seq. ID no. 12560452
  misc_feature (552)..(756): Pfam Name: Peptidase family M41 Pfam Description: Peptidase family M41
  misc_feature (552)..(756): Pfam Name: Peptidase family M41 Pfam Description: Peptidase family M41
  misc_feature (552)..(756): Pfam Name: Peptidase family M41 Pfam Description: Peptidase family M41
  misc_feature (100)..(809): Homolog of NCBI NO: 12082993 NR Description: matrix AAA protease MAP-1 [Neurospora crassa]
  misc_feature (209)..(785): Homolog of NCBI NO: 16905099 NR Description: AFG3(ATPase family gene 3)-like 1 (yeast) [Mus
  misc_feature (115)..(187): Homolog of NCBI NO: 28574878 NR Description: CG6512-PA [Drosophila melanogaster]
  misc_feature (221)..(784): Homolog of NCBI NO: 28574878 NR Description: CG6512-PA [Drosophila melanogaster]
  misc_feature (210)..(785): Homolog of NCBI NO: 18999411 NR Description: Similar to AFG3 ATPase family gene 3-like 2
  misc_feature (100)..(809): Homolog of NCBI NO: 12082993 NR Description: matrix AAA protease MAP-1 [Neurospora crassa]
  misc_feature (115)..(187): Homolog of NCBI NO: 28574878 NR Description: CG6512-PA [Drosophila melanogaster]
  misc_feature (210)..(785): Homolog of NCBI NO: 18999411 NR Description: Similar to AFG3 ATPase family gene 3-like 2
  misc_feature (221)..(784): Homolog of NCBI NO: 28574878 NR Description: CG6512-PA [Drosophila melanogaster]
  misc_feature (115)..(187): Homolog of NCBI NO: 28574878 NR Description: CG6512-PA [Drosophila melanogaster]
  misc_feature (209)..(785): Homolog of NCBI NO: 16905099 NR Description: AFG3(ATPase family gene 3)-like 1 (yeast) [Mus
  misc_feature (100)..(809): Homolog of NCBI NO: 12082993 NR Description: matrix AAA protease MAP-1 [Neurospora crassa]
  misc_feature (7)..(783): Homolog of NCBI NO: 25406980 NR Description: protein F22G5.10 [imported] - Arabidopsis
  misc_feature (7)..(786): Homolog of NCBI NO: 34908198 NR Description: putative AAA-metalloprotease
  misc_feature (206)..(789): Homolog of NCBI NO: 6539504 NR Description: FtsH2 [Cyanidioschyzon merolae]
  misc_feature (152)..(192): Homolog of NCBI NO: 6539504 NR Description: FtsH2 [Cyanidioschyzon merolae]
  misc_feature (210)..(785): Homolog of NCBI NO: 5802970 NR Description: AFG3 ATPase family gene 3-like 2
  misc_feature (7)..(783): Homolog of NCBI NO: 25406980 NR Description: protein F22G5.10 [imported] - Arabidopsis
  misc_feature (7)..(786): Homolog of NCBI NO: 34908198 NR Description: putative AAA-metalloprotease
  misc_feature (206)..(789): Homolog of NCBI NO: 6539504 NR Description: FtsH2 [Cyanidioschyzon merolae]
  misc_feature (152)..(192): Homolog of NCBI NO: 6539504 NR Description: FtsH2 [Cyanidioschyzon merolae]
  misc_feature (210)..(785): Homolog of NCBI NO: 5802970 NR Description: AFG3 ATPase family gene 3-like 2
  misc_feature (210)..(785): Homolog of NCBI NO: 18999411 NR Description: Similar to AFG3 ATPase family gene 3-like 2
  misc_feature (221)..(784): Homolog of NCBI NO: 28574878 NR Description: CG6512-PA [Drosophila melanogaster]
  misc_feature (209)..(785): Homolog of NCBI NO: 16905099 NR Description: AFG3(ATPase family gene 3)-like 1 (yeast) [Mus
  misc_feature (210)..(785): Homolog of NCBI NO: 5802970 NR Description: AFG3 ATPase family gene 3-like 2
  misc_feature (152)..(192): Homolog of NCBI NO: 6539504 NR Description: FtsH2 [Cyanidioschyzon merolae]
  misc_feature (206)..(789): Homolog of NCBI NO: 6539504 NR Description: FtsH2 [Cyanidioschyzon merolae]
  misc_feature (7)..(786): Homolog of NCBI NO: 34908198 NR Description: putative AAA-metalloprotease
  misc_feature (7)..(783): Homolog of NCBI NO: 25406980 NR Description: protein F22G5.10 [imported] - Arabidopsis

SEQ ID NO: 45175 - protein, 807 aa, Arabidopsis thaliana; identical to SEQ ID NO: 38470
  peptide (1)..(807): Ceres Seq. ID no. 12560453
  misc_feature (550)..(754): Pfam Name: Peptidase family M41 Pfam Description: Peptidase family M41
  misc_feature (550)..(754): Pfam Name: Peptidase family M41 Pfam Description: Peptidase family M41
  misc_feature (550)..(754): Pfam Name: Peptidase family M41 Pfam Description: Peptidase family M41
  misc_feature (98)..(807): Homolog of NCBI NO: 12082993 NR Description: matrix AAA protease MAP-1 [Neurospora crassa]
  misc_feature (207)..(783): Homolog of NCBI NO: 16905099 NR Description: AFG3(ATPase family gene 3)-like 1 (yeast) [Mus
  misc_feature (113)..(185): Homolog of NCBI NO: 28574878 NR Description: CG6512-PA [Drosophila melanogaster]
  misc_feature (219)..(782): Homolog of NCBI NO: 28574878 NR Description: CG6512-PA [Drosophila melanogaster]
  misc_feature (208)..(783): Homolog of NCBI NO: 18999411 NR Description: Similar to AFG3 ATPase family gene 3-like 2
  misc_feature (98)..(807): Homolog of NCBI NO: 12082993 NR Description: matrix AAA protease MAP-1 [Neurospora crassa]
  misc_feature (113)..(185): Homolog of NCBI NO: 28574878 NR Description: CG6512-PA [Drosophila melanogaster]
  misc_feature (208)..(783): Homolog of NCBI NO: 18999411 NR Description: Similar to AFG3 ATPase family gene 3-like 2
  misc_feature (219)..(782): Homolog of NCBI NO: 28574878 NR Description: CG6512-PA [Drosophila melanogaster]
  misc_feature (113)..(185): Homolog of NCBI NO: 28574878 NR Description: CG6512-PA [Drosophila melanogaster]
  misc_feature (207)..(783): Homolog of NCBI NO: 16905099 NR Description: AFG3(ATPase family gene 3)-like 1 (yeast) [Mus
  misc_feature (98)..(807): Homolog of NCBI NO: 12082993 NR Description: matrix AAA protease MAP-1 [Neurospora crassa]
  misc_feature (5)..(781): Homolog of NCBI NO: 25406980 NR Description: protein F22G5.10 [imported] - Arabidopsis
  misc_feature (5)..(784): Homolog of NCBI NO: 34908198 NR Description: putative AAA-metalloprotease
  misc_feature (204)..(787): Homolog of NCBI NO: 6539504 NR Description: FtsH2 [Cyanidioschyzon merolae]
  misc_feature (150)..(190): Homolog of NCBI NO: 6539504 NR Description: FtsH2 [Cyanidioschyzon merolae]
  misc_feature (208)..(783): Homolog of NCBI NO: 5802970 NR Description: AFG3 ATPase family gene 3-like 2
  misc_feature (5)..(781): Homolog of NCBI NO: 25406980 NR Description: protein F22G5.10 [imported] - Arabidopsis
  misc_feature (5)..(784): Homolog of NCBI NO: 34908198 NR Description: putative AAA-metalloprotease
  misc_feature (204)..(787): Homolog of NCBI NO: 6539504 NR Description: FtsH2 [Cyanidioschyzon merolae]
  misc_feature (150)..(190): Homolog of NCBI NO: 6539504 NR Description: FtsH2 [Cyanidioschyzon merolae]
  misc_feature (208)..(783): Homolog of NCBI NO: 5802970 NR Description: AFG3 ATPase family gene 3-like 2
  misc_feature (208)..(783): Homolog of NCBI NO: 18999411 NR Description: Similar to AFG3 ATPase family gene 3-like 2
  misc_feature (219)..(782): Homolog of NCBI NO: 28574878 NR Description: CG6512-PA [Drosophila melanogaster]
  misc_feature (207)..(783): Homolog of NCBI NO: 16905099 NR Description: AFG3(ATPase family gene 3)-like 1 (yeast) [Mus
  misc_feature (208)..(783): Homolog of NCBI NO: 5802970 NR Description: AFG3 ATPase family gene 3-like 2
  misc_feature (150)..(190): Homolog of NCBI NO: 6539504 NR Description: FtsH2 [Cyanidioschyzon merolae]
  misc_feature (204)..(787): Homolog of NCBI NO: 6539504 NR Description: FtsH2 [Cyanidioschyzon merolae]
  misc_feature (5)..(784): Homolog of NCBI NO: 34908198 NR Description: putative AAA-metalloprotease
  misc_feature (5)..(781): Homolog of NCBI NO: 25406980 NR Description: protein F22G5.10 [imported] - Arabidopsis

SEQ ID NO: 45176 - protein, 683 aa, Arabidopsis thaliana; identical to SEQ ID NO: 38471
  peptide (1)..(683): Ceres Seq. ID no. 12560454
  misc_feature (426)..(630): Pfam Name: Peptidase family M41 Pfam Description: Peptidase family M41
  misc_feature (426)..(630): Pfam Name: Peptidase family M41 Pfam Description: Peptidase family M41
  misc_feature (426)..(630): Pfam Name: Peptidase family M41 Pfam Description: Peptidase family M41
  misc_feature (1)..(683): Homolog of NCBI NO: 12082993 NR Description: matrix AAA protease MAP-1 [Neurospora crassa]
  misc_feature (83)..(659): Homolog of NCBI NO: 16905099 NR Description: AFG3(ATPase family gene 3)-like 1 (yeast) [Mus
  misc_feature (1)..(61): Homolog of NCBI NO: 28574878 NR Description: CG6512-PA [Drosophila melanogaster]
  misc_feature (95)..(658): Homolog of NCBI NO: 28574878 NR Description: CG6512-PA [Drosophila melanogaster]
  misc_feature (84)..(659): Homolog of NCBI NO: 18999411 NR Description: Similar to AFG3 ATPase family gene 3-like 2
  misc_feature (1)..(683): Homolog of NCBI NO: 12082993 NR Description: matrix AAA protease MAP-1 [Neurospora crassa]
  misc_feature (1)..(61): Homolog of NCBI NO: 28574878 NR Description: CG6512-PA [Drosophila melanogaster]
  misc_feature (84)..(659): Homolog of NCBI NO: 18999411 NR Description: Similar to AFG3 ATPase family gene 3-like 2
  misc_feature (95)..(658): Homolog of NCBI NO: 28574878 NR Description: CG6512-PA [Drosophila melanogaster]
  misc_feature (1)..(61): Homolog of NCBI NO: 28574878 NR Description: CG6512-PA [Drosophila melanogaster]
  misc_feature (83)..(659): Homolog of NCBI NO: 16905099 NR Description: AFG3(ATPase family gene 3)-like 1 (yeast) [Mus
  misc_feature (1)..(683): Homolog of NCBI NO: 12082993 NR Description: matrix AAA protease MAP-1 [Neurospora crassa]
  misc_feature (1)..(657): Homolog of NCBI NO: 25406980 NR Description: protein F22G5.10 [imported] - Arabidopsis
  misc_feature (1)..(660): Homolog of NCBI NO: 34908198 NR Description: putative AAA-metalloprotease
  misc_feature (80)..(663): Homolog of NCBI NO: 6539504 NR Description: FtsH2 [Cyanidioschyzon merolae]
  misc_feature (26)..(66): Homolog of NCBI NO: 6539504 NR Description: FtsH2 [Cyanidioschyzon merolae]
  misc_feature (84)..(659): Homolog of NCBI NO: 5802970 NR Description: AFG3 ATPase family gene 3-like 2
  misc_feature (1)..(657): Homolog of NCBI NO: 25406980 NR Description: protein F22G5.10 [imported] - Arabidopsis
  misc_feature (1)..(660): Homolog of NCBI NO: 34908198 NR Description: putative AAA-metalloprotease
  misc_feature (80)..(663): Homolog of NCBI NO: 6539504 NR Description: FtsH2 [Cyanidioschyzon merolae]
  misc_feature (26)..(66): Homolog of NCBI NO: 6539504 NR Description: FtsH2 [Cyanidioschyzon merolae]
  misc_feature (84)..(659): Homolog of NCBI NO: 5802970 NR Description: AFG3 ATPase family gene 3-like 2
  misc_feature (84)..(659): Homolog of NCBI NO: 18999411 NR Description: Similar to AFG3 ATPase family gene 3-like 2
  misc_feature (95)..(658): Homolog of NCBI NO: 28574878 NR Description: CG6512-PA [Drosophila melanogaster]
  misc_feature (83)..(659): Homolog of NCBI NO: 16905099 NR Description: AFG3(ATPase family gene 3)-like 1 (yeast) [Mus
  misc_feature (84)..(659): Homolog of NCBI NO: 5802970 NR Description: AFG3 ATPase family gene 3-like 2
  misc_feature (26)..(66): Homolog of NCBI NO: 6539504 NR Description: FtsH2 [Cyanidioschyzon merolae]
  misc_feature (80)..(663): Homolog of NCBI NO: 6539504 NR Description: FtsH2 [Cyanidioschyzon merolae]
  misc_feature (1)..(660): Homolog of NCBI NO: 34908198 NR Description: putative AAA-metalloprotease
  misc_feature (1)..(657): Homolog of NCBI NO: 25406980 NR Description: protein F22G5.10 [imported] - Arabidopsis

SEQ ID NO: 45177 - DNA, 1563 bp, Arabidopsis thaliana
  misc_feature (1)..(1563): Ceres Seq. ID no. 13575945
  misc_feature: MA Experiment ID: 20000315 Result: Down-regulated in Transcription
  misc_feature: MA Experiment 20000315 PARAMETER Experiment Name: At_14day_Shoots-Roots_Sub_P Parameter: Age (day) Value: 14
  misc_feature: MA Experiment 20000315 PARAMETER Experiment Name: At_14day_Shoots-Roots_Sub_P Parameter: Organism Value: A. thaliana
  misc_feature: MA Experiment 20000315 PARAMETER Experiment Name: At_14day_Shoots-Roots_Sub_P Parameter: Plant Line Value: WS
  misc_feature: MA Experiment 20000315 PARAMETER Experiment Name: At_14day_Shoots-Roots_Sub_P Parameter: Tissue Value: Shoots vs. Whole Plant
  misc_feature: MA Experiment ID: 20000355 Result: Down-regulated in Transcription
  misc_feature: MA Experiment 20000355 PARAMETER Experiment Name: At_Siliques_Sub_P Parameter: Age (day) Value: 21
  misc_feature: MA Experiment 20000355 PARAMETER Experiment Name: At_Siliques_Sub_P Parameter: Organism Value: A. thaliana
  misc_feature: MA Experiment 20000355 PARAMETER Experiment Name: At_Siliques_Sub_P Parameter: Plant Line Value: WS
  misc_feature: MA Experiment 20000355 PARAMETER Experiment Name: At_Siliques_Sub_P Parameter: Tissue Value: Less Than 5mm Siliques vs. Whole Plant
gagaaaaatcagcaactctggagagagcgtgttcgtcattgaaatcgaagcttggagattcaatatttcttcgatctcgtgttcttcgtctcgtttcgtcggtccagtgttaataaaaaatgagttcaactgtttcaaatccccaaggaatcctgcaaccaggctcatttctgcttccagaatcagaatctatgaaaaaagaggaagcagagttagtttctgtgtgttggaatcaggattcaagttgttttgcagctggaacgagtcatggttttcgtatatataactgtgaacctttcaaagaaactttcaggcgtgagctaaaggacggtggttttaaaatcgtagagatgcttttccgtagcaatatactggcacttgttggtggtggacctaactctcagtatccttcaagcaaagtactaatttgggatgatcatcagagccgttgcattagtgaatttgcatttaggtctgagattcgtgcagtgaaattaagaagggatcggattgttgttgttcttgaacataagatttatgtttataactttatggatcttagacttcttcatcagattgaaactcaagctaatcctagaggattgtgttgcctttctcatcattctaatacgtctgtgttggcttgccctggtctcaatcgaggagagattcgtgttgaacatttcgggcttaacatggtacaaatcataaatgctcatgattcaagtattgcgtgtatgaccttgacattggatggtttgttgcttgcaactgctagtacaaagggaactctgattagaatcttcaacacaatggatggaactcgtttgcaagaggtacgaagaggagtcgacagagcagatatatatagcattgcactttcaccaaatgtgcagtggctggcggtatcaagtgacaaggggactgttcacattttctctcttagagttagggttgttggggaggattcttattccactgaaaatggagctctgttgacacaacaaaattattctaattctctgcaaggccttgtttctccaaccattggtaccaatcccggttcgtcattgtcgtttatgagaggtgttctaccaaagtatttcagctcggaatggtcatatgcacagtttcatgtatcagaagtcacacaattcttcgcagcatttggcagtaacaacacggttgctattatcggcatggatggaagtttctaccgatgcagctttgatcccgtgaacggaggagagatggggcaactggaatatatccactttatgaagatggacaaccgcccgtgataagtcagactcatgcttcactcactcctctaagcctctgtacataaccatgtctatgtaaatagatttggtgagactgcataagatttgattattgcatattgctacttcgagtgaaagggcctgcattactgattgagactatgtgtacatagctacgtagcaagattcatccacaacagtttgcttcgaacactgtattatgtaaattttcagataacactatagaaaagtaataacaatagaaaaaacagttcaatcg

SEQ ID NO: 45178 - protein, 393 aa, Arabidopsis thaliana
  peptide (1)..(393): Ceres Seq. ID no. 13575946
  misc_feature (313)..(389): Homolog of NCBI NO: 15238452 NR Description: WD-40 repeat protein family [Arabidopsis
  misc_feature (1)..(300): Homolog of NCBI NO: 15238452 NR Description: WD-40 repeat protein family [Arabidopsis
  misc_feature (31)..(388): Homolog of NCBI NO: 34907164 NR Description: P0423A12.19 [Oryza sativa (japonica
  misc_feature (32)..(388): Homolog of NCBI NO: 11288364 NR Description: hypothetical protein F26K9.200 - Arabidopsis
  misc_feature (15)..(322): Homolog of NCBI NO: 11288366 NR Description: hypothetical protein T5P19.90 - Arabidopsis
  misc_feature (32)..(388): Homolog of NCBI NO: 14517420 NR Description: AT3g62770/F26K9_200 [Arabidopsis thaliana]
  misc_feature (21)..(323): Homolog of NCBI NO: 34896164 NR Description: hypothetical protein~similar to Arabidopsis
  misc_feature (15)..(391): Homolog of NCBI NO: 30694449 NR Description: WD-40 repeat protein family [Arabidopsis thaliana]
  misc_feature (25)..(393): Homolog of NCBI NO: 7487233 NR Description: hypothetical protein At2g40810 [imported] -
  misc_feature (1)..(393): Homolog of NCBI NO: 30688413 NR Description: WD-40 repeat protein family [Arabidopsis
MSSTVSNPQGILQPGSFLLPESESMKKEEAELVSVCWNQDSSCFAAGTSHGFRIYNCEPFKETFRRELKDGGFKIVEMLFRSNILALVGGGPNSQYPSSKVLIWDDHQSRCISEFAFRSEIRAVKLRRDRIVVVLEHKIYVYNFMDLRLLHQIETQANPRGLCCLSHHSNTSVLACPGLNRGEIRVEHFGLNMVQIINAHDSSIACMTLTLDGLLLATASTKGTLIRIFNTMDGTRLQEVRRGVDRADIYSIALSPNVQWLAVSSDKGTVHIFSLRVRVVGEDSYSTENGALLTQQNYSNSLQGLVSPTIGTNPGSSLSFMRGVLPKYFSSEWSYAQFHVSEVTQFFAAFGSNNTVAIIGMDGSFYRCSFDPVNGGEMGQLEYIHFMKMDNRP

SEQ ID NO: 45179 - protein, 369 aa, Arabidopsis thaliana
  peptide (1)..(369): Ceres Seq. ID no. 13575947
  misc_feature (289)..(365): Homolog of NCBI NO: 15238452 NR Description: WD-40 repeat protein family [Arabidopsis
  misc_feature (1)..(276): Homolog of NCBI NO: 15238452 NR Description: WD-40 repeat protein family [Arabidopsis
  misc_feature (7)..(364): Homolog of NCBI NO: 34907164 NR Description: P0423A12.19 [Oryza sativa (japonica
  misc_feature (8)..(364): Homolog of NCBI NO: 11288364 NR Description: hypothetical protein F26K9.200 - Arabidopsis
  misc_feature (1)..(298): Homolog of NCBI NO: 11288366 NR Description: hypothetical protein T5P19.90 - Arabidopsis
  misc_feature (8)..(364): Homolog of NCBI NO: 14517420 NR Description: AT3g62770/F26K9_200 [Arabidopsis thaliana]
  misc_feature (1)..(299): Homolog of NCBI NO: 34896164 NR Description: hypothetical protein~similar to Arabidopsis
  misc_feature (1)..(367): Homolog of NCBI NO: 30694449 NR Description: WD-40 repeat protein family [Arabidopsis thaliana]
  misc_feature (1)..(369): Homolog of NCBI NO: 7487233 NR Description: hypothetical protein At2g40810 [imported] -
  misc_feature (1)..(369): Homolog of NCBI NO: 30688413 NR Description: WD-40 repeat protein family [Arabidopsis
MKKEEAELVSVCWNQDSSCFAAGTSHGFRIYNCEPFKETFRRELKDGGFKIVEMLFRSNILALVGGGPNSQYPSSKVLIWDDHQSRCISEFAFRSEIRAVKLRRDRIVVVLEHKIYVYNFMDLRLLHQIETQANPRGLCCLSHHSNTSVLACPGLNRGEIRVEHFGLNMVQIINAHDSSIACMTLTLDGLLLATASTKGTLIRIFNTMDGTRLQEVRRGVDRADIYSIALSPNVQWLAVSSDKGTVHIFSLRVRVVGEDSYSTENGALLTQQNYSNSLQGLVSPTIGTNPGSSLSFMRGVLPKYFSSEWSYAQFHVSEVTQFFAAFGSNNTVAIIGMDGSFYRCSFDPVNGGEMGQLEYIHFMKMDNRP

SEQ ID NO: 45180 - protein, 316 aa, Arabidopsis thaliana
  peptide (1)..(316): Ceres Seq. ID no. 13575948
  misc_feature (236)..(312): Homolog of NCBI NO: 15238452 NR Description: WD-40 repeat protein family [Arabidopsis
  misc_feature (1)..(223): Homolog of NCBI NO: 15238452 NR Description: WD-40 repeat protein family [Arabidopsis
  misc_feature (1)..(311): Homolog of NCBI NO: 34907164 NR Description: P0423A12.19 [Oryza sativa (japonica
  misc_feature (1)..(311): Homolog of NCBI NO: 11288364 NR Description: hypothetical protein F26K9.200 - Arabidopsis
  misc_feature (1)..(245): Homolog of NCBI NO: 11288366 NR Description: hypothetical protein T5P19.90 - Arabidopsis
  misc_feature (1)..(311): Homolog of NCBI NO: 14517420 NR Description: AT3g62770/F26K9_200 [Arabidopsis thaliana]
  misc_feature (1)..(246): Homolog of NCBI NO: 34896164 NR Description: hypothetical protein~similar to Arabidopsis
  misc_feature (1)..(314): Homolog of NCBI NO: 30694449 NR Description: WD-40 repeat protein family [Arabidopsis thaliana]
  misc_feature (1)..(316): Homolog of NCBI NO: 7487233 NR Description: hypothetical protein At2g40810 [imported] -
  misc_feature (1)..(316): Homolog of NCBI NO: 30688413 NR Description: WD-40 repeat protein family [Arabidopsis
MLFRSNILALVGGGPNSQYPSSKVLIWDDHQSRCISEFAFRSEIRAVKLRRDRIVVVLEHKIYVYNFMDLRLLHQIETQANPRGLCCLSHHSNTSVLACPGLNRGEIRVEHFGLNMVQIINAHDSSIACMTLTLDGLLLATASTKGTLIRIFNTMDGTRLQEVRRGVDRADIYSIALSPNVQWLAVSSDKGTVHIFSLRVRVVGEDSYSTENGALLTQQNYSNSLQGLVSPTIGTNPGSSLSFMRGVLPKYFSSEWSYAQFHVSEVTQFFAAFGSNNTVAIIGMDGSFYRCSFDPVNGGEMGQLEYIHFMKMDNRP

SEQ ID NO: 45181 - DNA, 846 bp, Arabidopsis thaliana
  misc_feature (1)..(846): Ceres Seq. ID no. 12560467
  misc_feature: MA Experiment ID: 20000496 Result: Down-regulated in Transcription
  misc_feature: MA Experiment 20000496 PARAMETER Experiment Name: At_Guard_Cells_P Parameter: Harvest Date Value: 7/19/2002
  misc_feature: MA Experiment 20000496 PARAMETER Experiment Name: At_Guard_Cells_P Parameter: Organism Value: Canola
  misc_feature: MA Experiment 20000496 PARAMETER Experiment Name: At_Guard_Cells_P Parameter: Tissue Value: Guard Cells vs. Leaves
gagatagagagaaagacgcttctggtcagttttcgttaaacccgccggagaaactagcgactacggtggtcgaacccgtctgacgtcgtagaattcatcgtaatcttcacttcctttcttccccgacaaaatcatcgatctgtgtttgccaatcagattcaccggaacttctagttaggacgattgtgaaaaatgtcgtcatcgttagaacaagaaatcttcttacagtggggaaacaagaagagattgagatgtcttagagccaaagccaaaaagatctctcgttctaaaaactcttctcgctttctaggtcaagataccgtcctccttcaatcctctagattctccagaggatcagaaggagcaatcctcagatctggactaccagatcgccggagaccgtctccggagaaagaggagaggtattatactacgagaggtgtagtggataacattgggaaagattgtttagatggaaacatcaatggagaagatagcaacaacaaggaagagagtatgtggcctaagctctttataacattatcaaacaaagagaaagaagaagatttcatggctatgaaaggttgcaaaccttctcataggcctaagaagagagctaaactcatccaaagaagcttacttaaaagtgttctgaagattcttcagttgtctgtttatagttttgagaataatgtgttgtctgattttaaacagttggtgagtcctggaacatggttggctgatttgtgccctgatagatacgatgttagggtgaagaagagctctaagaagaggcgagcaagagggctaaaagccatgggaaacatggagactgattcagattga

SEQ ID NO: 45182 - protein, 217 aa, Arabidopsis thaliana
  peptide (1)..(217): Ceres Seq. ID no. 12560468
  misc_feature (61)..(149): Homolog of NCBI NO: 21553974 NR Description: unknown [Arabidopsis thaliana]
  misc_feature (175)..(217): Homolog of NCBI NO: 30103017 NR Description: unknown protein [Oryza sativa (japonica
  misc_feature (6)..(150): Homolog of NCBI NO: 30103017 NR Description: unknown protein [Oryza sativa (japonica
  misc_feature (175)..(205): Homolog of NCBI NO: 25405821 NR Description: unknown protein, 25817-24837 [imported] -
  misc_feature (2)..(150): Homolog of NCBI NO: 25405821 NR Description: unknown protein, 25817-24837 [imported] -
  misc_feature (175)..(217): Homolog of NCBI NO: 30695924 NR Description: expressed protein [Arabidopsis thaliana]
  misc_feature (2)..(150): Homolog of NCBI NO: 30695924 NR Description: expressed protein [Arabidopsis thaliana]
  misc_feature (175)..(217): Homolog of NCBI NO: 30678969 NR Description: expressed protein [Arabidopsis thaliana]
  misc_feature (1)..(150): Homolog of NCBI NO: 30678969 NR Description: expressed protein [Arabidopsis thaliana]
  misc_feature (1)..(217): Homolog of NCBI NO: 6006854 NR Description: hypothetical protein [Arabidopsis thaliana]
MSSSLEQEIFLQWGNKKRLRCLRAKAKKISRSKNSSRFLGQDTVLLQSSRFSRGSEGAILRSGLPDRRRPSPEKEERYYTTRGVVDNIGKDCLDGNINGEDSNNKEESMWPKLFITLSNKEKEEDFMAMKGCKPSHRPKKRAKLIQRSLLKSVLKILQLSVYSFENNVLSDFKQLVSPGTWLADLCPDRYDVRVKKSSKKRRARGLKAMGNMETDSD

SEQ ID NO: 45183 - protein, 109 aa, Arabidopsis thaliana
  peptide (1)..(109): Ceres Seq. ID no. 12560469
  misc_feature (1)..(41): Homolog of NCBI NO: 21553974 NR Description: unknown [Arabidopsis thaliana]
  misc_feature (67)..(109): Homolog of NCBI NO: 30103017 NR Description: unknown protein [Oryza sativa (japonica
  misc_feature (1)..(42): Homolog of NCBI NO: 30103017 NR Description: unknown protein [Oryza sativa (japonica
  misc_feature (67)..(97): Homolog of NCBI NO: 25405821 NR Description: unknown protein, 25817-24837 [imported] -
  misc_feature (1)..(42): Homolog of NCBI NO: 25405821 NR Description: unknown protein, 25817-24837 [imported] -
  misc_feature (67)..(109): Homolog of NCBI NO: 30695924 NR Description: expressed protein [Arabidopsis thaliana]
  misc_feature (1)..(42): Homolog of NCBI NO: 30695924 NR Description: expressed protein [Arabidopsis thaliana]
  misc_feature (67)..(109): Homolog of NCBI NO: 30678969 NR Description: expressed protein [Arabidopsis thaliana]
  misc_feature (1)..(42): Homolog of NCBI NO: 30678969 NR Description: expressed protein [Arabidopsis thaliana]
  misc_feature (1)..(109): Homolog of NCBI NO: 6006854 NR Description: hypothetical protein [Arabidopsis thaliana]
MWPKLFITLSNKEKEEDFMAMKGCKPSHRPKKRAKLIQRSLLKSVLKILQLSVYSFENNVLSDFKQLVSPGTWLADLCPDRYDVRVKKSSKKRRARGLKAMGNMETDSD

SEQ ID NO: 45184 - DNA, 1876 bp, Arabidopsis thaliana; identical to SEQ ID NO: 35125
  misc_feature (1)..(1876): Ceres Seq. ID no. 12600465
  misc_feature: MA Experiment ID: 108434 Result: Down-regulated in Transcription
  misc_feature: MA Experiment 108434 PARAMETER Experiment Name: At_Root_Tips_cDNA_P Parameter: Tissue Value: Root Tips
  misc_feature: MA Experiment ID: 108573 Result: Up-regulated in Transcription
  misc_feature: MA Experiment 108573 PARAMETER Experiment Name: At_Drought_cDNA_P Parameter: Timepoint (hr) Value: 6
  misc_feature: MA Experiment 108573 PARAMETER Experiment Name: At_Drought_cDNA_P Parameter: Tissue Value: Aerial
  misc_feature: MA Experiment 108573 PARAMETER Experiment Name: At_Drought_cDNA_P Parameter: Treatment Value: Drought vs. No Drought
  misc_feature: MA Experiment ID: 108585 Result: Up-regulated in Transcription
  misc_feature: MA Experiment 108585 PARAMETER Experiment Name: At_5mM_NaNP_cDNA_P Parameter: Timepoint (hr) Value: 6
  misc_feature: MA Experiment 108585 PARAMETER Experiment Name: At_5mM_NaNP_cDNA_P Parameter: Tissue Value: Aerial
  misc_feature: MA Experiment 108585 PARAMETER Experiment Name: At_5mM_NaNP_cDNA_P Parameter: Treatment Value: null
  misc_feature: MA Experiment ID: 20000087 Result: Down-regulated in Transcription
  misc_feature: MA Experiment 20000087 PARAMETER Experiment Name: At_100uM_ABA_Mutants_cDNA_P Parameter: Plant Line Value: WS
  misc_feature: MA Experiment 20000087 PARAMETER Experiment Name: At_100uM_ABA_Mutants_cDNA_P Parameter: Timepoint (hr) Value: 6
  misc_feature: MA Experiment 20000087 PARAMETER Experiment Name: At_100uM_ABA_Mutants_cDNA_P Parameter: Tissue Value: Aerial
  misc_feature: MA Experiment 20000087 PARAMETER Experiment Name: At_100uM_ABA_Mutants_cDNA_P Parameter: Treatment Value: 100uM ABA vs. No Treatment
  misc_feature: MA Experiment ID: 20000089 Result: Down-regulated in Transcription
  misc_feature: MA Experiment ID: 20000171 Result: Down-regulated in Transcription
  misc_feature: MA Experiment 20000171 PARAMETER Experiment Name: At_42deg_Heat_P Parameter: Age (day) Value: 14
  misc_feature: MA Experiment 20000171 PARAMETER Experiment Name: At_42deg_Heat_P Parameter: Organism Value: A. thaliana
  misc_feature: MA Experiment 20000171 PARAMETER Experiment Name: At_42deg_Heat_P Parameter: Plant Line Value: WS
  misc_feature: MA Experiment 20000171 PARAMETER Experiment Name: At_42deg_Heat_P Parameter: Temperature (deg C) Value: 42 vs. 22
  misc_feature: MA Experiment 20000171 PARAMETER Experiment Name: At_42deg_Heat_P Parameter: Timepoint (hr) Value: 1
  misc_feature: MA Experiment 20000171 PARAMETER Experiment Name: At_42deg_Heat_P Parameter: Tissue Value: Aerial
  misc_feature: MA Experiment ID: 20000184 Result: Up-regulated in Transcription
  misc_feature: MA Experiment 20000184 PARAMETER Experiment Name: At_Shoots__P Parameter: Age (day) Value: 7
  misc_feature: MA Experiment 20000184 PARAMETER Experiment Name: At_Shoots__P Parameter: Tissue Value: Shoots vs. Whole Plant
  misc_feature: MA Experiment ID: 20000227 Result: Down-regulated in Transcription
  misc_feature: MA Experiment 20000227 PARAMETER Experiment Name: At_Root-Tips-vs-Tops_P Parameter: Tissue Value: Root Tips vs. Root Tops
  misc_feature: MA Experiment ID: 20000794 Result: Up-regulated in Transcription
  misc_feature: MA Experiment 20000794 PARAMETER Experiment Name: At_Petals_P Parameter: Age (day) Value: 23-25 days
  misc_feature: MA Experiment 20000794 PARAMETER Experiment Name: At_Petals_P Parameter: Plant Line Value: WS
  misc_feature: MA Experiment 20000794 PARAMETER Experiment Name: At_Petals_P Parameter: Tissue Value: Petals vs. Whole plant
  misc_feature: MA Experiment ID: 20001557 Result: Up-regulated in Transcription
  misc_feature: MA Experiment 20001557 PARAMETER Experiment Name: At_Drought_Soil_Dry_P Parameter: Age (day) Value: 27
  misc_feature: MA Experiment 20001557 PARAMETER Experiment Name: At_Drought_Soil_Dry_P Parameter: Organism Value: A. thaliana
  misc_feature: MA Experiment 20001557 PARAMETER Experiment Name: At_Drought_Soil_Dry_P Parameter: Plant Line Value: WS
  misc_feature: MA Experiment 20001557 PARAMETER Experiment Name: At_Drought_Soil_Dry_P Parameter: Post Timepoint (hr) Value: 3
  misc_feature: MA Experiment 20001557 PARAMETER Experiment Name: At_Drought_Soil_Dry_P Parameter: Post-Treatment Value: Re-Water vs. No Drought
  misc_feature: MA Experiment 20001557 PARAMETER Experiment Name: At_Drought_Soil_Dry_P Parameter: Timepoint (day) Value: 13
  misc_feature: MA Experiment 20001557 PARAMETER Experiment Name: At_Drought_Soil_Dry_P Parameter: Treatment Value: Drought vs. No Drought
  misc_feature: MA Experiment ID: 20001911 Result: Up-regulated in Transcription
  misc_feature: MA Experiment 20001911 PARAMETER Experiment Name: At_Drought_Reproduction_P Parameter: Age (day) Value: 40
  misc_feature: MA Experiment 20001911 PARAMETER Experiment Name: At_Drought_Reproduction_P Parameter: Organism Value: A. thaliana
  misc_feature: MA Experiment 20001911 PARAMETER Experiment Name: At_Drought_Reproduction_P Parameter: Plant Line Value: WS
  misc_feature: MA Experiment 20001911 PARAMETER Experiment Name: At_Drought_Reproduction_P Parameter: Timepoint (day) Value: 10
  misc_feature: MA Experiment 20001911 PARAMETER Experiment Name: At_Drought_Reproduction_P Parameter: Tissue Value: Flowers
  misc_feature: MA Experiment 20001911 PARAMETER Experiment Name: At_Drought_Reproduction_P Parameter: Treatment Value: Drought vs. No Drought

SEQ ID NO: 45185 - protein, 366 aa, Arabidopsis thaliana; identical to SEQ ID NO: 35126
  peptide (1)..(366): Ceres Seq. ID no. 12600466
  misc_feature (3)..(336): Pfam Name: Adenosylmethionine decarboxylase Pfam Description: Adenosylmethionine decarboxylase
  misc_feature (3)..(336): Pfam Name: Adenosylmethionine decarboxylase Pfam Description: Adenosylmethionine decarboxylase
  misc_feature (1)..(366): Homolog of NCBI NO: 21239731 NR Description: S-adenosylmethionine decarboxylase [x
  misc_feature (1)..(366): Homolog of NCBI NO: 3913415 NR Description: S-adenosylmethionine decarboxylase proenzyme 1
  misc_feature (1)..(366): Homolog of NCBI NO: 3913410 NR Description: S-adenosylmethionine decarboxylase proenzyme 2
  misc_feature (1)..(363): Homolog of NCBI NO: 15237226 NR Description: S-adenosylmethionine decarboxylase (adoMetDC2)
  misc_feature (1)..(366): Homolog of NCBI NO: 38261497 NR Description: S-adenosyl-L-methionine decarboxylase [Brassica
  misc_feature (1)..(366): Homolog of NCBI NO: 21239731 NR Description: S-adenosylmethionine decarboxylase [x
  misc_feature (1)..(366): Homolog of NCBI NO: 3913410 NR Description: S-adenosylmethionine decarboxylase proenzyme 2
  misc_feature (1)..(366): Homolog of NCBI NO: 38261497 NR Description: S-adenosyl-L-methionine decarboxylase [Brassica
  misc_feature (1)..(366): Homolog of NCBI NO: 15232910 NR Description: S-adenosylmethionine decarboxylase
  misc_feature (1)..(366): Homolog of NCBI NO: 15809836 NR Description: AT3g02470/F16B3_10 [Arabidopsis thaliana]
  misc_feature (1)..(366): Homolog of NCBI NO: 1531763 NR Description: S-adenosylmethionine decarboxylase [Arabidopsis
  misc_feature (1)..(366): Homolog of NCBI NO: 1490554 NR Description: S-adenosylmethionine decarboxylase [Arabidopsis
  misc_feature (1)..(366): Homolog of NCBI NO: 15213968 NR Description: S-adenosylmethionine decarboxylase proenzyme 3
  misc_feature (1)..(363): Homolog of NCBI NO: 15237226 NR Description: S-adenosylmethionine decarboxylase (adoMetDC2)
  misc_feature (1)..(366): Homolog of NCBI NO: 3913415 NR Description: S-adenosylmethionine decarboxylase proenzyme 1
  misc_feature (1)..(366): Homolog of NCBI NO: 15213968 NR Description: S-adenosylmethionine decarboxylase proenzyme 3
  misc_feature (1)..(366): Homolog of NCBI NO: 1490554 NR Description: S-adenosylmethionine decarboxylase [Arabidopsis
  misc_feature (1)..(366): Homolog of NCBI NO: 1531763 NR Description: S-adenosylmethionine decarboxylase [Arabidopsis
  misc_feature (1)..(366): Homolog of NCBI NO: 15809836 NR Description: AT3g02470/F16B3_10 [Arabidopsis thaliana]
  misc_feature (1)..(366): Homolog of NCBI NO: 15232910 NR Description: S-adenosylmethionine decarboxylase

SEQ ID NO: 45186 - protein, 215 aa, Arabidopsis thaliana; identical to SEQ ID NO: 35127
  peptide (1)..(215): Ceres Seq. ID no. 12600467
  misc_feature (1)..(185): Pfam Name: Adenosylmethionine decarboxylase Pfam Description: Adenosylmethionine decarboxylase
  misc_feature (1)..(185): Pfam Name: Adenosylmethionine decarboxylase Pfam Description: Adenosylmethionine decarboxylase
  misc_feature (1)..(215): Homolog of NCBI NO: 21239731 NR Description: S-adenosylmethionine decarboxylase [x
  misc_feature (1)..(215): Homolog of NCBI NO: 3913415 NR Description: S-adenosylmethionine decarboxylase proenzyme 1
  misc_feature (1)..(215): Homolog of NCBI NO: 3913410 NR Description: S-adenosylmethionine decarboxylase proenzyme 2
  misc_feature (1)..(212): Homolog of NCBI NO: 15237226 NR Description: S-adenosylmethionine decarboxylase (adoMetDC2)
  misc_feature (1)..(215): Homolog of NCBI NO: 38261497 NR Description: S-adenosyl-L-methionine decarboxylase [Brassica
  misc_feature (1)..(215): Homolog of NCBI NO: 21239731 NR Description: S-adenosylmethionine decarboxylase [x
  misc_feature (1)..(215): Homolog of NCBI NO: 3913410 NR Description: S-adenosylmethionine decarboxylase proenzyme 2
  misc_feature (1)..(215): Homolog of NCBI NO: 38261497 NR Description: S-adenosyl-L-methionine decarboxylase [Brassica
  misc_feature (1)..(215): Homolog of NCBI NO: 15232910 NR Description: S-adenosylmethionine decarboxylase
  misc_feature (1)..(215): Homolog of NCBI NO: 15809836 NR Description: AT3g02470/F16B3_10 [Arabidopsis thaliana]
  misc_feature (1)..(215): Homolog of NCBI NO: 1531763 NR Description: S-adenosylmethionine decarboxylase [Arabidopsis
  misc_feature (1)..(215): Homolog of NCBI NO: 1490554 NR Description: S-adenosylmethionine decarboxylase [Arabidopsis
  misc_feature (1)..(215): Homolog of NCBI NO: 15213968 NR Description: S-adenosylmethionine decarboxylase proenzyme 3
  misc_feature (1)..(212): Homolog of NCBI NO: 15237226 NR Description: S-adenosylmethionine decarboxylase (adoMetDC2)
  misc_feature (1)..(215): Homolog of NCBI NO: 3913415 NR Description: S-adenosylmethionine decarboxylase proenzyme 1
  misc_feature (1)..(215): Homolog of NCBI NO: 15213968 NR Description: S-adenosylmethionine decarboxylase proenzyme 3
  misc_feature (1)..(215): Homolog of NCBI NO: 1490554 NR Description: S-adenosylmethionine decarboxylase [Arabidopsis
  misc_feature (1)..(215): Homolog of NCBI NO: 1531763 NR Description: S-adenosylmethionine decarboxylase [Arabidopsis
  misc_feature (1)..(215): Homolog of NCBI NO: 15809836 NR Description: AT3g02470/F16B3_10 [Arabidopsis thaliana]
  misc_feature (1)..(215): Homolog of NCBI NO: 15232910 NR Description: S-adenosylmethionine decarboxylase

SEQ ID NO: 45187 - protein, 184 aa, Arabidopsis thaliana; identical to SEQ ID NO: 35128
  peptide (1)..(184): Ceres Seq. ID no. 12600468
  misc_feature (1)..(154): Pfam Name: Adenosylmethionine decarboxylase Pfam Description: Adenosylmethionine decarboxylase
  misc_feature (1)..(154): Pfam Name: Adenosylmethionine decarboxylase Pfam Description: Adenosylmethionine decarboxylase
  misc_feature (1)..(184): Homolog of NCBI NO: 21239731 NR Description: S-adenosylmethionine decarboxylase [x
  misc_feature (1)..(184): Homolog of NCBI NO: 3913415 NR Description: S-adenosylmethionine decarboxylase proenzyme 1
  misc_feature (1)..(184): Homolog of NCBI NO: 3913410 NR Description: S-adenosylmethionine decarboxylase proenzyme 2
  misc_feature (1)..(181): Homolog of NCBI NO: 15237226 NR Description: S-adenosylmethionine decarboxylase (adoMetDC2)
  misc_feature (1)..(184): Homolog of NCBI NO: 38261497 NR Description: S-adenosyl-L-methionine decarboxylase [Brassica
  misc_feature (1)..(184): Homolog of NCBI NO: 21239731 NR Description: S-adenosylmethionine decarboxylase [x
  misc_feature (1)..(184): Homolog of NCBI NO: 3913410 NR Description: S-adenosylmethionine decarboxylase proenzyme 2
  misc_feature (1)..(184): Homolog of NCBI NO: 38261497 NR Description: S-adenosyl-L-methionine decarboxylase [Brassica
  misc_feature (1)..(184): Homolog of NCBI NO: 15232910 NR Description: S-adenosylmethionine decarboxylase
  misc_feature (1)..(184): Homolog of NCBI NO: 15809836 NR Description: AT3g02470/F16B3_10 [Arabidopsis thaliana]
  misc_feature (1)..(184): Homolog of NCBI NO: 1531763 NR Description: S-adenosylmethionine decarboxylase [Arabidopsis
  misc_feature (1)..(184): Homolog of NCBI NO: 1490554 NR Description: S-adenosylmethionine decarboxylase [Arabidopsis
  misc_feature (1)..(184): Homolog of NCBI NO: 15213968 NR Description: S-adenosylmethionine decarboxylase proenzyme 3
  misc_feature (1)..(181): Homolog of NCBI NO: 15237226 NR Description: S-adenosylmethionine decarboxylase (adoMetDC2)
  misc_feature (1)..(184): Homolog of NCBI NO: 3913415 NR Description: S-adenosylmethionine decarboxylase proenzyme 1
  misc_feature (1)..(184): Homolog of NCBI NO: 15213968 NR Description: S-adenosylmethionine decarboxylase proenzyme 3
  misc_feature (1)..(184): Homolog of NCBI NO: 1490554 NR Description: S-adenosylmethionine decarboxylase [Arabidopsis
  misc_feature (1)..(184): Homolog of NCBI NO: 1531763 NR Description: S-adenosylmethionine decarboxylase [Arabidopsis
  misc_feature (1)..(184): Homolog of NCBI NO: 15809836 NR Description: AT3g02470/F16B3_10 [Arabidopsis thaliana]
  misc_feature (1)..(184): Homolog of NCBI NO: 15232910 NR Description: S-adenosylmethionine decarboxylase

SEQ ID NO: 45188 - DNA, 1557 bp, Arabidopsis thaliana
  misc_feature (1)..(1557): Ceres Seq. ID no. 12560470
  misc_feature: MA Experiment ID: 20000352 Result: Down-regulated in Transcription
  misc_feature: MA Experiment 20000352 PARAMETER Experiment Name: At_Drought_Sub_P Parameter: Age (day) Value: 7
  misc_feature: MA Experiment 20000352 PARAMETER Experiment Name: At_Drought_Sub_P Parameter: Organism Value: A. thaliana
  misc_feature: MA Experiment 20000352 PARAMETER Experiment Name: At_Drought_Sub_P Parameter: Plant Line Value: WS
  misc_feature: MA Experiment 20000352 PARAMETER Experiment Name: At_Drought_Sub_P Parameter: Timepoint (hr) Value: 6
  misc_feature: MA Experiment 20000352 PARAMETER Experiment Name: At_Drought_Sub_P Parameter: Tissue Value: Whole Plant
  misc_feature: MA Experiment 20000352 PARAMETER Experiment Name: At_Drought_Sub_P Parameter: Treatment Value: Drought vs. No Drought
  misc_feature: MA Experiment ID: 20000355 Result: Down-regulated in Transcription
  misc_feature: MA Experiment 20000355 PARAMETER Experiment Name: At_Siliques_Sub_P Parameter: Age (day) Value: 21
  misc_feature: MA Experiment 20000355 PARAMETER Experiment Name: At_Siliques_Sub_P Parameter: Organism Value: A. thaliana
  misc_feature: MA Experiment 20000355 PARAMETER Experiment Name: At_Siliques_Sub_P Parameter: Plant Line Value: WS
  misc_feature: MA Experiment 20000355 PARAMETER Experiment Name: At_Siliques_Sub_P Parameter: Tissue Value: Less Than 5mm Siliques vs. Whole Plant
  misc_feature: MA Experiment ID: 20000440 Result: Down-regulated in Transcription
  misc_feature: MA Experiment 20000440 PARAMETER Experiment Name: At_Closed-Flower__Sub_P Parameter: Tissue Value: Closed Flower vs. Whole Plant
  misc_feature: MA Experiment ID: 20000634 Result: Down-regulated in Transcription
  misc_feature: MA Experiment 20000634 PARAMETER Experiment Name: At_10percent_PEG_Sub_P Parameter: Age (day) Value: 12
  misc_feature: MA Experiment 20000634 PARAMETER Experiment Name: At_10percent_PEG_Sub_P Parameter: Organism Value: A. thaliana
  misc_feature: MA Experiment 20000634 PARAMETER Experiment Name: At_10percent_PEG_Sub_P Parameter: Plant Line Value: WS
  misc_feature: MA Experiment 20000634 PARAMETER Experiment Name: At_10percent_PEG_Sub_P Parameter: Timepoint (day) Value: 12
  misc_feature: MA Experiment 20000634 PARAMETER Experiment Name: At_10percent_PEG_Sub_P Parameter: Tissue Value: Whole Plant
  misc_feature: MA Experiment 20000634 PARAMETER Experiment Name: At_10percent_PEG_Sub_P Parameter: Treatment Value: 10% PEG vs. No Treatment
atggcttcatcatcatcaatatcaaatcacaagattccaaacacactaatgtttttggtgatcgtaaactttttgtacctaattcaaactaattcagctgtcagtatcagttccaattccaactcccacttctcaagattctcgagacatcgaagctcaccatcatcaaaaaccaaacaagggtttcttgcaacggtccaagagagtatgaaccatgctctcttggctcgttctcttgctttcaacctcactctttctcatcgaaccgtacaaacccacacgttcgatcccatccacgactgcctcgagctgctcgacgacacacttgacatgttatctcgcatccatgcggataatgatgaagaagatgtccatacatggctaagcgcagcactcacgaaccaagacacttgtgagcagagccttcaagaaaaatccgagtcatacaaacacggacttgcgatggatttcgtcgcaagaaacctaaccggtttgttgactagctcgcttgacttgttcgtatccgtcaagtcaaaacaccggaaactcttatcgaaacaagagtattttccgacgttcgttccttcgtcggagcaacggaggcttctagaagctccggtggaggagctgaatgttgatgcggtggtggctcctgacggaagtgggacacacaaaaccataggagaagccttgttgtctacgtcattagcgagtagtgggggcaggaccaaaatatacctaaaagccgggacatatcatgagaacatcaacattccgacgaagcagaagaacgttatgttagttggtgacgggaagggtaaaacagtcattgtaggtagcagaagtaacagaggcggctggactacttacaaaactgcaaccgtcgccgctatgggggaagggttcatagcgcgggacatgacattcgtgaacaacgccggacccaaatcggagcaagcggtggcgctccgtgtcggagcagataaatccgtcgtgcatcgatgctcagtggaaggataccaagattcactctacacacactccaaacgacaattctatagagagacggatatcaccggcaccgtcgatttcatattcggaaactccgccgtcgtatttcaatcctgcaacatcgccgcacggaaacctttaccgggtcagagaaacttcgtgacggcgcaaggacggagcaatccgggtcaaaacaccggaatcgcgattcaaaactgcaggatcacggcggaatcgatgacttatcttggtcggccgtggaaggagtattcgaggacggtggtgatgcaatcatttatcggcgggtcgattcatccgtcgggttggtctccttggtcgggtggtttcggtctcaaatctctgttttacggagaatatgggaattcgggtcctggatcatcggtttcgggtcgggttaaatggagtgggtgtcatccgtctttgacggtgacggaagcggaaaaattcactgtggcgagttttattgacgggaatatatggttgccgtcaacgggcgttagtttcgacccaggacttgtgaattga

SEQ ID NO: 45189 - protein, 518 aa, Arabidopsis thaliana
  peptide (1)..(518): Ceres Seq. ID no. 12560471
  misc_feature (213)..(502): Pfam Name: Pectinesterase Pfam Description: Pectinesterase
  misc_feature (98)..(512): Homolog of NCBI NO: 6093744 NR Description: Pectinesterase PPE8B precursor (Pectin
  misc_feature (62)..(516): Homolog of NCBI NO: 15238729 NR Description: pectinesterase
  misc_feature (98)..(516): Homolog of NCBI NO: 20269071 NR Description: pectin methylesterase [Sesbania rostrata]
  misc_feature (65)..(516): Homolog of NCBI NO: 7447381 NR Description: pectinesterase (EC 3.1.1.11) PECS-c2 - sweet
  misc_feature (65)..(516): Homolog of NCBI NO: 6174914 NR Description: Pectinesterase 2.1 precursor (Pectin
  misc_feature (52)..(516): Homolog of NCBI NO: 15229105 NR Description: pectinesterase - like protein
  misc_feature (24)..(175): Homolog of NCBI NO: 14582864 NR Description: putative pectin methylesterase LuPME1 [Linum
  misc_feature (181)..(517): Homolog of NCBI NO: 14582864 NR Description: putative pectin methylesterase LuPME1 [Linum
  misc_feature (1)..(517): Homolog of NCBI NO: 15231618 NR Description: pectinesterase family
  misc_feature (1)..(518): Homolog of NCBI NO: 15224207 NR Description: pectinesterase family; protein id: At2g43050.1
MASSSSISNHKIPNTLMFLVIVNFLYLIQTNSAVSISSNSNSHFSRFSRHRSSPSSKTKQGFLATVQESMNHALLARSLAFNLTLSHRTVQTHTFDPIHDCLELLDDTLDMLSRIHADNDEEDVHTWLSAALTNQDTCEQSLQEKSESYKHGLAMDFVARNLTGLLTSSLDLFVSVKSKHRKLLSKQEYFPTFVPSSEQRRLLEAPVEELNVDAVVAPDGSGTHKTIGEALLSTSLASSGGRTKIYLKAGTYHENINIPTKQKNVMLVGDGKGKTVIVGSRSNRGGWTTYKTATVAAMGEGFIARDMTFVNNAGPKSEQAVALRVGADKSVVHRCSVEGYQDSLYTHSKRQFYRETDITGTVDFIFGNSAVVFQSCNIAARKPLPGQRNFVTAQGRSNPGQNTGIAIQNCRITAESMTYLGRPWKEYSRTVVMQSFIGGSIHPSGWSPWSGGFGLKSLFYGEYGNSGPGSSVSGRVKWSGCHPSLTVTEAEKFTVASFIDGNIWLPSTGVSFDPGLVN

SEQ ID NO: 45190 - protein, 502 aa, Arabidopsis thaliana
  peptide (1)..(502): Ceres Seq. ID no. 12560472
  misc_feature (197)..(486): Pfam Name: Pectinesterase Pfam Description: Pectinesterase
  misc_feature (82)..(496): Homolog of NCBI NO: 6093744 NR Description: Pectinesterase PPE8B precursor (Pectin
  misc_feature (46)..(500): Homolog of NCBI NO: 15238729 NR Description: pectinesterase
  misc_feature (82)..(500): Homolog of NCBI NO: 20269071 NR Description: pectin methylesterase [Sesbania rostrata]
  misc_feature (49)..(500): Homolog of NCBI NO: 7447381 NR Description: pectinesterase (EC 3.1.1.11) PECS-c2 - sweet
  misc_feature (49)..(500): Homolog of NCBI NO: 6174914 NR Description: Pectinesterase 2.1 precursor (Pectin
  misc_feature (36)..(500): Homolog of NCBI NO: 15229105 NR Description: pectinesterase - like protein
  misc_feature (8)..(159): Homolog of NCBI NO: 14582864 NR Description: putative pectin methylesterase LuPME1 [Linum
  misc_feature (165)..(501): Homolog of NCBI NO: 14582864 NR Description: putative pectin methylesterase LuPME1 [Linum
  misc_feature (1)..(501): Homolog of NCBI NO: 15231618 NR Description: pectinesterase family
  misc_feature (1)..(502): Homolog of NCBI NO: 15224207 NR Description: pectinesterase family; protein id: At2g43050.1
MFLVIVNFLYLIQTNSAVSISSNSNSHFSRFSRHRSSPSSKTKQGFLATVQESMNHALLARSLAFNLTLSHRTVQTHTFDPIHDCLELLDDTLDMLSRIHADNDEEDVHTWLSAALTNQDTCEQSLQEKSESYKHGLAMDFVARNLTGLLTSSLDLFVSVKSKHRKLLSKQEYFPTFVPSSEQRRLLEAPVEELNVDAVVAPDGSGTHKTIGEALLSTSLASSGGRTKIYLKAGTYHENINIPTKQKNVMLVGDGKGKTVIVGSRSNRGGWTTYKTATVAAMGEGFIARDMTFVNNAGPKSEQAVALRVGADKSVVHRCSVEGYQDSLYTHSKRQFYRETDITGTVDFIFGNSAVVFQSCNIAARKPLPGQRNFVTAQGRSNPGQNTGIAIQNCRITAESMTYLGRPWKEYSRTVVMQSFIGGSIHPSGWSPWSGGFGLKSLFYGEYGNSGPGSSVSGRVKWSGCHPSLTVTEAEKFTVASFIDGNIWLPSTGVSFDPGLVN

SEQ ID NO: 45191 - protein, 449 aa, Arabidopsis thaliana
  peptide (1)..(449): Ceres Seq. ID no. 12560473
  misc_feature (144)..(433): Pfam Name: Pectinesterase Pfam Description: Pectinesterase
  misc_feature (29)..(443): Homolog of NCBI NO: 6093744 NR Description: Pectinesterase PPE8B precursor (Pectin
  misc_feature (1)..(447): Homolog of NCBI NO: 15238729 NR Description: pectinesterase
  misc_feature (29)..(447): Homolog of NCBI NO: 20269071 NR Description: pectin methylesterase [Sesbania rostrata]
  misc_feature (1)..(447): Homolog of NCBI NO: 7447381 NR Description: pectinesterase (EC 3.1.1.11) PECS-c2 - sweet
  misc_feature (1)..(447): Homolog of NCBI NO: 6174914 NR Description: Pectinesterase 2.1 precursor (Pectin
  misc_feature (1)..(447): Homolog of NCBI NO: 15229105 NR Description: pectinesterase - like protein
  misc_feature (1)..(106): Homolog of NCBI NO: 14582864 NR Description: putative pectin methylesterase LuPME1 [Linum
  misc_feature (112)..(448): Homolog of NCBI NO: 14582864 NR Description: putative pectin methylesterase LuPME1 [Linum
  misc_feature (1)..(448): Homolog of NCBI NO: 15231618 NR Description: pectinesterase family
  misc_feature (1)..(449): Homolog of NCBI NO: 15224207 NR Description: pectinesterase family; protein id: At2g43050.1
MNHALLARSLAFNLTLSHRTVQTHTFDPIHDCLELLDDTLDMLSRIHADNDEEDVHTWLSAALTNQDTCEQSLQEKSESYKHGLAMDFVARNLTGLLTSSLDLFVSVKSKHRKLLSKQEYFPTFVPSSEQRRLLEAPVEELNVDAVVAPDGSGTHKTIGEALLSTSLASSGGRTKIYLKAGTYHENINIPTKQKNVMLVGDGKGKTVIVGSRSNRGGWTTYKTATVAAMGEGFIARDMTFVNNAGPKSEQAVALRVGADKSVVHRCSVEGYQDSLYTHSKRQFYRETDITGTVDFIFGNSAVVFQSCNIAARKPLPGQRNFVTAQGRSNPGQNTGIAIQNCRITAESMTYLGRPWKEYSRTVVMQSFIGGSIHPSGWSPWSGGFGLKSLFYGEYGNSGPGSSVSGRVKWSGCHPSLTVTEAEKFTVASFIDGNIWLPSTGVSFDPGLVN

SEQ ID NO: 45192 - DNA, 771 bp, Arabidopsis thaliana
  misc_feature (1)..(771): Ceres Seq. ID no. 12560474
  misc_feature: MA Experiment ID: 20000173 Result: Down-regulated in Transcription
  misc_feature: MA Experiment 20000173 PARAMETER Experiment Name: At_42deg_Heat_P Parameter: Age (day) Value: 14
  misc_feature: MA Experiment 20000173 PARAMETER Experiment Name: At_42deg_Heat_P Parameter: Organism Value: A. thaliana
  misc_feature: MA Experiment 20000173 PARAMETER Experiment Name: At_42deg_Heat_P Parameter: Plant Line Value: WS
  misc_feature: MA Experiment 20000173 PARAMETER Experiment Name: At_42deg_Heat_P Parameter: Temperature (deg C) Value: 42 vs. 22
  misc_feature: MA Experiment 20000173 PARAMETER Experiment Name: At_42deg_Heat_P Parameter: Timepoint (hr) Value: 6
  misc_feature: MA Experiment 20000173 PARAMETER Experiment Name: At_42deg_Heat_P Parameter: Tissue Value: Aerial
  misc_feature: MA Experiment ID: 20000179 Result: Up-regulated in Transcription
  misc_feature: MA Experiment 20000179 PARAMETER Experiment Name: At_Germinating_Seeds_P Parameter: Age (hr) Value: 6 vs. 0
  misc_feature: MA Experiment 20000179 PARAMETER Experiment Name: At_Germinating_Seeds_P Parameter: Tissue Value: Germinating Seeds
  misc_feature: MA Experiment ID: 20000439 Result: Down-regulated in Transcription
  misc_feature: MA Experiment 20000439 PARAMETER Experiment Name: At_Roots__P Parameter: Age (day) Value: 14 vs. 21
  misc_feature: MA Experiment 20000439 PARAMETER Experiment Name: At_Roots__P Parameter: Organism Value: A. thaliana
  misc_feature: MA Experiment 20000439 PARAMETER Experiment Name: At_Roots__P Parameter: Tissue Value: Roots vs. Whole Plant
  misc_feature: MA Experiment ID: 20000451 Result: Up-regulated in Transcription
  misc_feature: MA Experiment 20000451 PARAMETER Experiment Name: At_CS6879_Shoots-Roots_P Parameter: Age (day) Value: 14
  misc_feature: MA Experiment 20000451 PARAMETER Experiment Name: At_CS6879_Shoots-Roots_P Parameter: Organism Value: A. thaliana
  misc_feature: MA Experiment 20000451 PARAMETER Experiment Name: At_CS6879_Shoots-Roots_P Parameter: Plant Line Value: CS6879 vs. WS
  misc_feature: MA Experiment 20000451 PARAMETER Experiment Name: At_CS6879_Shoots-Roots_P Parameter: Tissue Value: Roots
  misc_feature: MA Experiment ID: 20001905 Result: Down-regulated in Transcription
  misc_feature: MA Experiment 20001905 PARAMETER Experiment Name: At_Drought_Reproduction_P Parameter: Age (day) Value: 40
  misc_feature: MA Experiment 20001905 PARAMETER Experiment Name: At_Drought_Reproduction_P Parameter: Organism Value: A. thaliana
  misc_feature: MA Experiment 20001905 PARAMETER Experiment Name: At_Drought_Reproduction_P Parameter: Plant Line Value: WS
  misc_feature: MA Experiment 20001905 PARAMETER Experiment Name: At_Drought_Reproduction_P Parameter: Timepoint (day) Value: 10
  misc_feature: MA Experiment 20001905 PARAMETER Experiment Name: At_Drought_Reproduction_P Parameter: Tissue Value: Rosettes
  misc_feature: MA Experiment 20001905 PARAMETER Experiment Name: At_Drought_Reproduction_P Parameter: Treatment Value: Drought vs. No Drought
atgctagttaagaaattcgttttggtgcatggtgaagggtttggggcatggtgttggtacaaaactattgcgtcattggaggagtctggactgtctcctgttacggttgacctcgctggatctggatttaatatgacagacgcaaatagtgtttccaccttagaagaatattcaaaaccgttgatcgagctcattcaaaatcttcctgctgaagaaaaggtgattctggtaggtcacagtactggaggggcatgtgtttcatatgcgttagagcggtttccagagaaaatctcaaaagctatattcatttgtgcaactatggttactgatggacaaagacccttcgatgtcttcgctgatgagcttggttctgcagaacggttcatgaaagagtcacagttcttgatctatggaaacggcaaggacaaccccgcgacagggttcatgttcgagaaacaacacatgaaaggcttgtacttcaatcagtcaccaaataaggacattgcattgtcaatgatctcgatgcggcctgtaccattaggtcccatgatggagaagttgtcacttagtgcagaaagatatgggaaaggtcggagattctatgtccagacgctcgatgacttggctctttcaccggacgttcaagagaaactggttcgagagaatagtcccgaagcagtttttaagatcaaaggaagtgatcattgcccattcttctctaaacctcagtctcttcacaagatccttcttgaaatagcacagattccttaa

SEQ ID NO: 45193 - protein, 256 aa, Arabidopsis thaliana
  peptide (1)..(256): Ceres Seq. ID no. 12560475
  misc_feature (47)..(237): Homolog of NCBI NO: 25518436 NR Description: hypothetical protein T1K7.26 - Arabidopsis
  misc_feature (4)..(256): Homolog of NCBI NO: 25404802 NR Description: probable alpha/beta hydrolase F23O10.18
  misc_feature (4)..(256): Homolog of NCBI NO: 15222256 NR Description: polyneuridine aldehyde esterase, putative
  misc_feature (4)..(256): Homolog of NCBI NO: 15222699 NR Description: hypothetical protein; protein id: At1g26360.1
  misc_feature (6)..(255): Homolog of NCBI NO: 15230077 NR Description: alpha/beta hydrolase, putative; protein id:
  misc_feature (1)..(256): Homolog of NCBI NO: 21595837 NR Description: polyneuridine aldehyde esterase, putative
  misc_feature (1)..(256): Homolog of NCBI NO: 15218463 NR Description: polyneuridine aldehyde esterase, putative
  misc_feature (1)..(256): Homolog of NCBI NO: 25518661 NR Description: hypothetical protein F12G12.19 - Arabidopsis
  misc_feature (3)..(256): Homolog of NCBI NO: 30681236 NR Description: hydrolase family [Arabidopsis thaliana]
  misc_feature (1)..(256): Homolog of NCBI NO: 7485010 NR Description: host response protein homolog T5L19.30 -
MLVKKFVLVHGEGFGAWCWYKTIASLEESGLSPVTVDLAGSGFNMTDANSVSTLEEYSKPLIELIQNLPAEEKVILVGHSTGGACVSYALERFPEKISKAIFICATMVTDGQRPFDVFADELGSAERFMKESQFLIYGNGKDNPATGFMFEKQHMKGLYFNQSPNKDIALSMISMRPVPLGPMMEKLSLSAERYGKGRRFYVQTLDDLALSPDVQEKLVRENSPEAVFKIKGSDHCPFFSKPQSLHKILLEIAQIP

SEQ ID NO: 45194 - protein, 212 aa, Arabidopsis thaliana
  peptide (1)..(212): Ceres Seq. ID no. 12560476
  misc_feature (3)..(193): Homolog of NCBI NO: 25518436 NR Description: hypothetical protein T1K7.26 - Arabidopsis
  misc_feature (1)..(212): Homolog of NCBI NO: 25404802 NR Description: probable alpha/beta hydrolase F23O10.18
  misc_feature (1)..(212): Homolog of NCBI NO: 15222256 NR Description: polyneuridine aldehyde esterase, putative
  misc_feature (1)..(212): Homolog of NCBI NO: 15222699 NR Description: hypothetical protein; protein id: At1g26360.1
  misc_feature (1)..(211): Homolog of NCBI NO: 15230077 NR Description: alpha/beta hydrolase, putative; protein id:
  misc_feature (1)..(212): Homolog of NCBI NO: 21595837 NR Description: polyneuridine aldehyde esterase, putative
  misc_feature (1)..(212): Homolog of NCBI NO: 15218463 NR Description: polyneuridine aldehyde esterase, putative
  misc_feature (1)..(212): Homolog of NCBI NO: 25518661 NR Description: hypothetical protein F12G12.19 - Arabidopsis
  misc_feature (1)..(212): Homolog of NCBI NO: 30681236 NR Description: hydrolase family [Arabidopsis thaliana]
  misc_feature (1)..(212): Homolog of NCBI NO: 7485010 NR Description: host response protein homolog T5L19.30 -
MTDANSVSTLEEYSKPLIELIQNLPAEEKVILVGHSTGGACVSYALERFPEKISKAIFICATMVTDGQRPFDVFADELGSAERFMKESQFLIYGNGKDNPATGFMFEKQHMKGLYFNQSPNKDIALSMISMRPVPLGPMMEKLSLSAERYGKGRRFYVQTLDDLALSPDVQEKLVRENSPEAVFKIKGSDHCPFFSKPQSLHKILLEIAQIP

SEQ ID NO: 45195 - protein, 150 aa, Arabidopsis thaliana
  peptide (1)..(150): Ceres Seq. ID no. 12560477
  misc_feature (1)..(131): Homolog of NCBI NO: 25518436 NR Description: hypothetical protein T1K7.26 - Arabidopsis
  misc_feature (1)..(150): Homolog of NCBI NO: 25404802 NR Description: probable alpha/beta hydrolase F23O10.18
  misc_feature (1)..(150): Homolog of NCBI NO: 15222256 NR Description: polyneuridine aldehyde esterase, putative
  misc_feature (1)..(150): Homolog of NCBI NO: 15222699 NR Description: hypothetical protein; protein id: At1g26360.1
  misc_feature (1)..(149): Homolog of NCBI NO: 15230077 NR Description: alpha/beta hydrolase, putative; protein id:
  misc_feature (1)..(150): Homolog of NCBI NO: 21595837 NR Description: polyneuridine aldehyde esterase, putative
  misc_feature (1)..(150): Homolog of NCBI NO: 15218463 NR Description: polyneuridine aldehyde esterase, putative
  misc_feature (1)..(150): Homolog of NCBI NO: 25518661 NR Description: hypothetical protein F12G12.19 - Arabidopsis
  misc_feature (1)..(150): Homolog of NCBI NO: 30681236 NR Description: hydrolase family [Arabidopsis thaliana]
  misc_feature (1)..(150): Homolog of NCBI NO: 7485010 NR Description: host response protein homolog T5L19.30 -
MVTDGQRPFDVFADELGSAERFMKESQFLIYGNGKDNPATGFMFEKQHMKGLYFNQSPNKDIALSMISMRPVPLGPMMEKLSLSAERYGKGRRFYVQTLDDLALSPDVQEKLVRENSPEAVFKIKGSDHCPFFSKPQSLHKILLEIAQIP

SEQ ID NO: 45196 - DNA, 1273 bp, Arabidopsis thaliana
  misc_feature (1)..(1273): Ceres Seq. ID no. 12560478
  misc_feature: MA Experiment ID: 20000213 Result: Down-regulated in Transcription
  misc_feature: MA Experiment 20000213 PARAMETER Experiment Name: At_4deg_Cold_P Parameter: Timepoint (hr) Value: 2
  misc_feature: MA Experiment ID: 20000264 Result: Down-regulated in Transcription
  misc_feature: MA Experiment 20000264 PARAMETER Experiment Name: At_Open_Flower_P Parameter: Age (day) Value: 21
  misc_feature: MA Experiment 20000264 PARAMETER Experiment Name: At_Open_Flower_P Parameter: Plant Line Value: WS
  misc_feature: MA Experiment 20000264 PARAMETER Experiment Name: At_Open_Flower_P Parameter: Tissue Value: Open Flower vs. Whole Plant
gaacggataatcgccgttgggaccaaaacgctccaatacggtcagtgacgtcaccgccggtcatcaatgtcaggccacacttatcctcttctctcccattccggtttcctcccaccaaaaaaaaaaaaacttctttttatgttttgtttgtttctattccgatcttatcctacgccgtcactctcctcccggtgcgcacattagcaacactactcccgacgaatggagacgacgacgccgcagtcaaaatcaagtgtgtcccaccgaccgccgttgggaagagaagactggtggagtgaggaagcgacggcgacgctggtagaagcctggggcaatcgttacgtcaagctgaaccacggaaatctccggcagaatgactggaaagacgtcgccgacgccgttaactctagacacggtgataacagccgtaagaagaccgacttacagtgtaagaaccgggtcgatactttgaagaagaagtacaaaacagagaaagctaaactctcgccgtcgacttggcgtttctataaccgcctcgatgttctaatcggtcccgttgtgaagaaatcggctggcggagttgtcaaatcagcgccttttaagaatcatctgaatccaactggatcgaactctactggaagctctcttgaagatgatgatgaggatgatgatgaggttggtgattgggaattcgttgctaggaagcatcctcgtgtggaagaggtagatctgagtgaaggatcaacgtgtagggaactagctacggcgattctcaagtttggagaagtttacgagagaattgaagggaagaagcaacagatgatgattgagttggagaagcagagaatggaagtgacaaaggaggtagagttaaaacgaatgaacatgttgatggagatgcagttagagattgagaaatcaaagcaccggaaacgcgcaagtgcttcaggtaagcaattgtagaattagattggtggaggaaataccatggtgaagcaaagaggagttacttgaatctgaagctcattgaaattggaggatcctgttacttgttttaatctgtaggatggaagttagagaactctttaggatgtctttgtttgttttcttctactttctagcgtgttagtgtacattggtgtactggagcaaatcttccttaactctttagtagctgacaagtatgatctacatttgtgttagtgtccacgtataatgatggcttgtgtatccaaactacagcttctgatgcttaacagttacatgtttatgc

SEQ ID NO: 45197 - protein, 246 aa, Arabidopsis thaliana
  peptide (1)..(246): Ceres Seq. ID no. 12560479
  misc_feature (20)..(119): Homolog of NCBI NO: 34911060 NR Description: putative 6b-interacting protein 1
  misc_feature (6)..(120): Homolog of NCBI NO: 18149189 NR Description: 6b-interacting protein 1 [Nicotiana tabacum]
  misc_feature (107)..(244): Homolog of NCBI NO: 18149189 NR Description: 6b-interacting protein 1 [Nicotiana tabacum]
  misc_feature (1)..(242): Homolog of NCBI NO: 12321891 NR Description: hypothetical protein; 14486-13072 [Arabidopsis
  misc_feature (1)..(245): Homolog of NCBI NO: 21537288 NR Description: unknown [Arabidopsis thaliana]
  misc_feature (1)..(244): Homolog of NCBI NO: 6016685 NR Description: hypothetical protein [Arabidopsis thaliana]
  misc_feature (1)..(246): Homolog of NCBI NO: 18399118 NR Description: expressed protein
  misc_feature (1)..(242): Homolog of NCBI NO: 30680994 NR Description: expressed protein [Arabidopsis thaliana]
  misc_feature (1)..(245): Homolog of NCBI NO: 10178132 NR Description: gb|AAF01512.1~gene_id:MOP10.9~similar to unknown
  misc_feature (1)..(246): Homolog of NCBI NO: 18414919 NR Description: putative protein
METTTPQSKSSVSHRPPLGREDWWSEEATATLVEAWGNRYVKLNHGNLRQNDWKDVADAVNSRHGDNSRKKTDLQCKNRVDTLKKKYKTEKAKLSPSTWRFYNRLDVLIGPVVKKSAGGVVKSAPFKNHLNPTGSNSTGSSLEDDDEDDDEVGDWEFVARKHPRVEEVDLSEGSTCRELATAILKFGEVYERIEGKKQQMMIELEKQRMEVTKEVELKRMNMLMEMQLEIEKSKHRKRASASGKQL

SEQ ID NO: 45198 - DNA, 2611 bp, Arabidopsis thaliana; identical to SEQ ID NO: 44956
  misc_feature (1)..(2611): Ceres Seq. ID no. 13591498
  misc_feature: MA Experiment ID: 20000179 Result: Down-regulated in Transcription
  misc_feature: MA Experiment 20000179 PARAMETER Experiment Name: At_Germinating_Seeds_P Parameter: Age (hr) Value: 6 vs. 0
  misc_feature: MA Experiment 20000179 PARAMETER Experiment Name: At_Germinating_Seeds_P Parameter: Tissue Value: Germinating Seeds
  misc_feature: MA Experiment ID: 20000180 Result: Down-regulated in Transcription
  misc_feature: MA Experiment 20000180 PARAMETER Experiment Name: At_Germinating_Seeds_P Parameter: Age (hr) Value: 24 vs. 0
  misc_feature: MA Experiment 20000180 PARAMETER Experiment Name: At_Germinating_Seeds_P Parameter: Tissue Value: Germinating Seeds
  misc_feature: MA Experiment ID: 20000184 Result: Up-regulated in Transcription
  misc_feature: MA Experiment 20000184 PARAMETER Experiment Name: At_Shoots__P Parameter: Age (day) Value: 7
  misc_feature: MA Experiment 20000184 PARAMETER Experiment Name: At_Shoots__P Parameter: Tissue Value: Shoots vs. Whole Plant
  misc_feature: MA Experiment ID: 20000234 Result: Up-regulated in Transcription
  misc_feature: MA Experiment 20000234 PARAMETER Experiment Name: At_Siliques_P Parameter: Age (day) Value: 21
  misc_feature: MA Experiment 20000234 PARAMETER Experiment Name: At_Siliques_P Parameter: Organism Value: A. thaliana
  misc_feature: MA Experiment 20000234 PARAMETER Experiment Name: At_Siliques_P Parameter: Plant Line Value: WS
  misc_feature: MA Experiment 20000234 PARAMETER Experiment Name: At_Siliques_P Parameter: Tissue Value: Less Than 5mm Siliques vs. Whole Plant
  misc_feature: MA Experiment ID: 20000235 Result: Up-regulated in Transcription
  misc_feature: MA Experiment 20000235 PARAMETER Experiment Name: At_Siliques_P Parameter: Age (day) Value: 21
  misc_feature: MA Experiment 20000235 PARAMETER Experiment Name: At_Siliques_P Parameter: Organism Value: A. thaliana
  misc_feature: MA Experiment 20000235 PARAMETER Experiment Name: At_Siliques_P Parameter: Plant Line Value: WS
  misc_feature: MA Experiment 20000235 PARAMETER Experiment Name: At_Siliques_P Parameter: Tissue Value: 5-10mm Siliques vs. Whole Plant
  misc_feature: MA Experiment ID: 20000794 Result: Up-regulated in Transcription
  misc_feature: MA Experiment 20000794 PARAMETER Experiment Name: At_Petals_P Parameter: Age (day) Value: 23-25 days
  misc_feature: MA Experiment 20000794 PARAMETER Experiment Name: At_Petals_P Parameter: Plant Line Value: WS
  misc_feature: MA Experiment 20000794 PARAMETER Experiment Name: At_Petals_P Parameter: Tissue Value: Petals vs. Whole plant
  misc_feature: MA Experiment ID: 20001757 Result: Down-regulated in Transcription
  misc_feature: MA Experiment 20001757 PARAMETER Experiment Name: At_50mM_NH4NO3_L-to-H_P Parameter: Timepoint (hr) Value: 6
  misc_feature: MA Experiment 20001757 PARAMETER Experiment Name: At_50mM_NH4NO3_L-to-H_P Parameter: Tissue Value: Leaf
  misc_feature: MA Experiment 20001757 PARAMETER Experiment Name: At_50mM_NH4NO3_L-to-H_P Parameter: Treatment Value: 50mM NH4NO3 vs 100mM Mannitol

SEQ ID NO: 45199 - protein, 798 aa, Arabidopsis thaliana; identical to SEQ ID NO: 44957
  peptide (1)..(798): Ceres Seq. ID no. 13591499
  misc_feature (403)..(502): Pfam Name: PA domain Pfam Description: PA domain
  misc_feature (403)..(502): Pfam Name: PA domain Pfam Description: PA domain
  misc_feature (403)..(502): Pfam Name: PA domain Pfam Description: PA domain
  misc_feature (403)..(502): Pfam Name: PA domain Pfam Description: PA domain
  misc_feature (403)..(502): Pfam Name: PA domain Pfam Description: PA domain
  misc_feature (106)..(796): Homolog of NCBI NO: 24414066 NR Description: OJ1136_A10.14 [Oryza sativa (japonica
  misc_feature (35)..(795): Homolog of NCBI NO: 30697281 NR Description: subtilisin-like serine protease [Arabidopsis
  misc_feature (46)..(797): Homolog of NCBI NO: 30678198 NR Description: subtilisin-like serine protease, putative
  misc_feature (243)..(798): Homolog of NCBI NO: 29786399 NR Description: putative serine protease [Populus euramericana]
  misc_feature (42)..(797): Homolog of NCBI NO: 7435656 NR Description: subtilisin-like proteinase (EC 3.4.21.-) 2 -
  misc_feature (106)..(796): Homolog of NCBI NO: 24414066 NR Description: OJ1136_A10.14 [Oryza sativa (japonica
  misc_feature (46)..(797): Homolog of NCBI NO: 30678198 NR Description: subtilisin-like serine protease, putative
  misc_feature (42)..(797): Homolog of NCBI NO: 7435656 NR Description: subtilisin-like proteinase (EC 3.4.21.-) 2 -
  misc_feature (243)..(798): Homolog of NCBI NO: 29786399 NR Description: putative serine protease [Populus euramericana]
  misc_feature (46)..(797): Homolog of NCBI NO: 30678198 NR Description: subtilisin-like serine protease, putative
  misc_feature (35)..(795): Homolog of NCBI NO: 30697281 NR Description: subtilisin-like serine protease [Arabidopsis
  misc_feature (106)..(796): Homolog of NCBI NO: 24414066 NR Description: OJ1136_A10.14 [Oryza sativa (japonica
  misc_feature (52)..(798): Homolog of NCBI NO: 7435657 NR Description: subtilisin-like proteinase (EC 3.4.21.-) 1 -
  misc_feature (69)..(798): Homolog of NCBI NO: 14488360 NR Description: putative serine protease [Oryza sativa (japonica
  misc_feature (42)..(797): Homolog of NCBI NO: 18396193 NR Description: subtilisin-like serine protease, putative
  misc_feature (42)..(797): Homolog of NCBI NO: 22331076 NR Description: subtilisin-like serine protease, putative
  misc_feature (68)..(797): Homolog of NCBI NO: 18423316 NR Description: subtilisin-like serine protease [Arabidopsis
  misc_feature (106)..(796): Homolog of NCBI NO: 24414066 NR Description: OJ1136_A10.14 [Oryza sativa (japonica
  misc_feature (52)..(798): Homolog of NCBI NO: 7435657 NR Description: subtilisin-like proteinase (EC 3.4.21.-) 1 -
  misc_feature (69)..(798): Homolog of NCBI NO: 14488360 NR Description: putative serine protease [Oryza sativa (japonica
  misc_feature (42)..(797): Homolog of NCBI NO: 18396193 NR Description: subtilisin-like serine protease, putative
  misc_feature (42)..(797): Homolog of NCBI NO: 22331076 NR Description: subtilisin-like serine protease, putative
  misc_feature (68)..(797): Homolog of NCBI NO: 18423316 NR Description: subtilisin-like serine protease [Arabidopsis
  misc_feature (42)..(797): Homolog of NCBI NO: 7435656 NR Description: subtilisin-like proteinase (EC 3.4.21.-) 2 -
  misc_feature (243)..(798): Homolog of NCBI NO: 29786399 NR Description: putative serine protease [Populus euramericana]
  misc_feature (46)..(797): Homolog of NCBI NO: 30678198 NR Description: subtilisin-like serine protease, putative
  misc_feature (52)..(798): Homolog of NCBI NO: 7435657 NR Description: subtilisin-like proteinase (EC 3.4.21.-) 1 -
  misc_feature (69)..(798): Homolog of NCBI NO: 14488360 NR Description: putative serine protease [Oryza sativa (japonica
  misc_feature (42)..(797): Homolog of NCBI NO: 18396193 NR Description: subtilisin-like serine protease, putative
  misc_feature (42)..(797): Homolog of NCBI NO: 22331076 NR Description: subtilisin-like serine protease, putative
  misc_feature (68)..(797): Homolog of NCBI NO: 18423316 NR Description: subtilisin-like serine protease [Arabidopsis
  misc_feature (42)..(797): Homolog of NCBI NO: 7435656 NR Description: subtilisin-like proteinase (EC 3.4.21.-) 2 -
  misc_feature (243)..(798): Homolog of NCBI NO: 29786399 NR Description: putative serine protease [Populus euramericana]
  misc_feature (46)..(797): Homolog of NCBI NO: 30678198 NR Description: subtilisin-like serine protease, putative
  misc_feature (35)..(795): Homolog of NCBI NO: 30697281 NR Description: subtilisin-like serine protease [Arabidopsis
  misc_feature (35)..(795): Homolog of NCBI NO: 30697281 NR Description: subtilisin-like serine protease [Arabidopsis
  misc_feature (106)..(796): Homolog of NCBI NO: 24414066 NR Description: OJ1136_A10.14 [Oryza sativa (japonica
  misc_feature (52)..(798): Homolog of NCBI NO: 7435657 NR Description: subtilisin-like proteinase (EC 3.4.21.-) 1 -
  misc_feature (69)..(798): Homolog of NCBI NO: 14488360 NR Description: putative serine protease [Oryza sativa (japonica
  misc_feature (42)..(797): Homolog of NCBI NO: 18396193 NR Description: subtilisin-like serine protease, putative
  misc_feature (42)..(797): Homolog of NCBI NO: 22331076 NR Description: subtilisin-like serine protease, putative
  misc_feature (68)..(797): Homolog of NCBI NO: 18423316 NR Description: subtilisin-like serine protease [Arabidopsis
  misc_feature (42)..(797): Homolog of NCBI NO: 7435656 NR Description: subtilisin-like proteinase (EC 3.4.21.-) 2 -
  misc_feature (243)..(798): Homolog of NCBI NO: 29786399 NR Description: putative serine protease [Populus euramericana]
  misc_feature (35)..(795): Homolog of NCBI NO: 30697281 NR Description: subtilisin-like serine protease [Arabidopsis
  misc_feature (68)..(797): Homolog of NCBI NO: 18423316 NR Description: subtilisin-like serine protease [Arabidopsis
  misc_feature (42)..(797): Homolog of NCBI NO: 22331076 NR Description: subtilisin-like serine protease, putative
  misc_feature (42)..(797): Homolog of NCBI NO: 18396193 NR Description: subtilisin-like serine protease, putative
  misc_feature (69)..(798): Homolog of NCBI NO: 14488360 NR Description: putative serine protease [Oryza sativa (japonica
  misc_feature (52)..(798): Homolog of NCBI NO: 7435657 NR Description: subtilisin-like proteinase (EC 3.4.21.-) 1 -

SEQ ID NO: 45200 - protein, 757 aa, Arabidopsis thaliana; identical to SEQ ID NO: 44958
  peptide (1)..(757): Ceres Seq. ID no. 13591500
  misc_feature (362)..(461): Pfam Name: PA domain Pfam Description: PA domain
  misc_feature (362)..(461): Pfam Name: PA domain Pfam Description: PA domain
  misc_feature (362)..(461): Pfam Name: PA domain Pfam Description: PA domain
  misc_feature (362)..(461): Pfam Name: PA domain Pfam Description: PA domain
  misc_feature (362)..(461): Pfam Name: PA domain Pfam Description: PA domain
  misc_feature (65)..(755): Homolog of NCBI NO: 24414066 NR Description: OJ1136_A10.14 [Oryza sativa (japonica
  misc_feature (1)..(754): Homolog of NCBI NO: 30697281 NR Description: subtilisin-like serine protease [Arabidopsis
  misc_feature (5)..(756): Homolog of NCBI NO: 30678198 NR Description: subtilisin-like serine protease, putative
  misc_feature (202)..(757): Homolog of NCBI NO: 29786399 NR Description: putative serine protease [Populus euramericana]
  misc_feature (1)..(756): Homolog of NCBI NO: 7435656 NR Description: subtilisin-like proteinase (EC 3.4.21.-) 2 -
  misc_feature (65)..(755): Homolog of NCBI NO: 24414066 NR Description: OJ1136_A10.14 [Oryza sativa (japonica
  misc_feature (5)..(756): Homolog of NCBI NO: 30678198 NR Description: subtilisin-like serine protease, putative
  misc_feature (1)..(756): Homolog of NCBI NO: 7435656 NR Description: subtilisin-like proteinase (EC 3.4.21.-) 2 -
  misc_feature (202)..(757): Homolog of NCBI NO: 29786399 NR Description: putative serine protease [Populus euramericana]
  misc_feature (5)..(756): Homolog of NCBI NO: 30678198 NR Description: subtilisin-like serine protease, putative
  misc_feature (1)..(754): Homolog of NCBI NO: 30697281 NR Description: subtilisin-like serine protease [Arabidopsis
  misc_feature (65)..(755): Homolog of NCBI NO: 24414066 NR Description: OJ1136_A10.14 [Oryza sativa (japonica
  misc_feature (11)..(757): Homolog of NCBI NO: 7435657 NR Description: subtilisin-like proteinase (EC 3.4.21.-) 1 -
  misc_feature (28)..(757): Homolog of NCBI NO: 14488360 NR Description: putative serine protease [Oryza sativa (japonica
  misc_feature (1)..(756): Homolog of NCBI NO: 18396193 NR Description: subtilisin-like serine protease, putative
  misc_feature (1)..(756): Homolog of NCBI NO: 22331076 NR Description: subtilisin-like serine protease, putative
  misc_feature (27)..(756): Homolog of NCBI NO: 18423316 NR Description: subtilisin-like serine protease [Arabidopsis
  misc_feature (65)..(755): Homolog of NCBI NO: 24414066 NR Description: OJ1136_A10.14 [Oryza sativa (japonica
  misc_feature (11)..(757): Homolog of NCBI NO: 7435657 NR Description: subtilisin-like proteinase (EC 3.4.21.-) 1 -
  misc_feature (28)..(757): Homolog of NCBI NO: 14488360 NR Description: putative serine protease [Oryza sativa (japonica
  misc_feature (1)..(756): Homolog of NCBI NO: 18396193 NR Description: subtilisin-like serine protease, putative
  misc_feature (1)..(756): Homolog of NCBI NO: 22331076 NR Description: subtilisin-like serine protease, putative
  misc_feature (27)..(756): Homolog of NCBI NO: 18423316 NR Description: subtilisin-like serine protease [Arabidopsis
  misc_feature (1)..(756): Homolog of NCBI NO: 7435656 NR Description: subtilisin-like proteinase (EC 3.4.21.-) 2 -
  misc_feature (202)..(757): Homolog of NCBI NO: 29786399 NR Description: putative serine protease [Populus euramericana]
  misc_feature (5)..(756): Homolog of NCBI NO: 30678198 NR Description: subtilisin-like serine protease, putative
  misc_feature (11)..(757): Homolog of NCBI NO: 7435657 NR Description: subtilisin-like proteinase (EC 3.4.21.-) 1 -
  misc_feature (28)..(757): Homolog of NCBI NO: 14488360 NR Description: putative serine protease [Oryza sativa (japonica
  misc_feature (1)..(756): Homolog of NCBI NO: 18396193 NR Description: subtilisin-like serine protease, putative
  misc_feature (1)..(756): Homolog of NCBI NO: 22331076 NR Description: subtilisin-like serine protease, putative
  misc_feature (27)..(756): Homolog of NCBI NO: 18423316 NR Description: subtilisin-like serine protease [Arabidopsis
  misc_feature (1)..(756): Homolog of NCBI NO: 7435656 NR Description: subtilisin-like proteinase (EC 3.4.21.-) 2 -
  misc_feature (202)..(757): Homolog of NCBI NO: 29786399 NR Description: putative serine protease [Populus euramericana]
  misc_feature (5)..(756): Homolog of NCBI NO: 30678198 NR Description: subtilisin-like serine protease, putative
  misc_feature (1)..(754): Homolog of NCBI NO: 30697281 NR Description: subtilisin-like serine protease [Arabidopsis
  misc_feature (1)..(754): Homolog of NCBI NO: 30697281 NR Description: subtilisin-like serine protease [Arabidopsis
  misc_feature (65)..(755): Homolog of NCBI NO: 24414066 NR Description: OJ1136_A10.14 [Oryza sativa (japonica
  misc_feature (11)..(757): Homolog of NCBI NO: 7435657 NR Description: subtilisin-like proteinase (EC 3.4.21.-) 1 -
  misc_feature (28)..(757): Homolog of NCBI NO: 14488360 NR Description: putative serine protease [Oryza sativa (japonica
  misc_feature (1)..(756): Homolog of NCBI NO: 18396193 NR Description: subtilisin-like serine protease, putative
  misc_feature (1)..(756): Homolog of NCBI NO: 22331076 NR Description: subtilisin-like serine protease, putative
  misc_feature (27)..(756): Homolog of NCBI NO: 18423316 NR Description: subtilisin-like serine protease [Arabidopsis
  misc_feature (1)..(756): Homolog of NCBI NO: 7435656 NR Description: subtilisin-like proteinase (EC 3.4.21.-) 2 -
  misc_feature (202)..(757): Homolog of NCBI NO: 29786399 NR Description: putative serine protease [Populus euramericana]
  misc_feature (1)..(754): Homolog of NCBI NO: 30697281 NR Description: subtilisin-like serine protease [Arabidopsis
  misc_feature (27)..(756): Homolog of NCBI NO: 18423316 NR Description: subtilisin-like serine protease [Arabidopsis
  misc_feature (1)..(756): Homolog of NCBI NO: 22331076 NR Description: subtilisin-like serine protease, putative
  misc_feature (1)..(756): Homolog of NCBI NO: 18396193 NR Description: subtilisin-like serine protease, putative
  misc_feature (28)..(757): Homolog of NCBI NO: 14488360 NR Description: putative serine protease [Oryza sativa (japonica
  misc_feature (11)..(757): Homolog of NCBI NO: 7435657 NR Description: subtilisin-like proteinase (EC 3.4.21.-) 1 -

SEQ ID NO: 45201 - protein, 722 aa, Arabidopsis thaliana; identical to SEQ ID NO: 44959
  peptide (1)..(722): Ceres Seq. ID no. 13591501
  misc_feature (327)..(426): Pfam Name: PA domain Pfam Description: PA domain
  misc_feature (327)..(426): Pfam Name: PA domain Pfam Description: PA domain
  misc_feature (327)..(426): Pfam Name: PA domain Pfam Description: PA domain
  misc_feature (327)..(426): Pfam Name: PA domain Pfam Description: PA domain
  misc_feature (327)..(426): Pfam Name: PA domain Pfam Description: PA domain
  misc_feature (30)..(720): Homolog of NCBI NO: 24414066 NR Description: OJ1136_A10.14 [Oryza sativa (japonica
  misc_feature (1)..(719): Homolog of NCBI NO: 30697281 NR Description: subtilisin-like serine protease [Arabidopsis
  misc_feature (1)..(721): Homolog of NCBI NO: 30678198 NR Description: subtilisin-like serine protease, putative
  misc_feature (167)..(722): Homolog of NCBI NO: 29786399 NR Description: putative serine protease [Populus euramericana]
  misc_feature (1)..(721): Homolog of NCBI NO: 7435656 NR Description: subtilisin-like proteinase (EC 3.4.21.-) 2 -
  misc_feature (30)..(720): Homolog of NCBI NO: 24414066 NR Description: OJ1136_A10.14 [Oryza sativa (japonica
  misc_feature (1)..(721): Homolog of NCBI NO: 30678198 NR Description: subtilisin-like serine protease, putative
  misc_feature (1)..(721): Homolog of NCBI NO: 7435656 NR Description: subtilisin-like proteinase (EC 3.4.21.-) 2 -
  misc_feature (167)..(722): Homolog of NCBI NO: 29786399 NR Description: putative serine protease [Populus euramericana]
  misc_feature (1)..(721): Homolog of NCBI NO: 30678198 NR Description: subtilisin-like serine protease, putative
  misc_feature (1)..(719): Homolog of NCBI NO: 30697281 NR Description: subtilisin-like serine protease [Arabidopsis
  misc_feature (30)..(720): Homolog of NCBI NO: 24414066 NR Description: OJ1136_A10.14 [Oryza sativa (japonica
  misc_feature (1)..(722): Homolog of NCBI NO: 7435657 NR Description: subtilisin-like proteinase (EC 3.4.21.-) 1 -
  misc_feature (1)..(722): Homolog of NCBI NO: 14488360 NR Description: putative serine protease [Oryza sativa (japonica
  misc_feature (1)..(721): Homolog of NCBI NO: 18396193 NR Description: subtilisin-like serine protease, putative
  misc_feature (1)..(721): Homolog of NCBI NO: 22331076 NR Description: subtilisin-like serine protease, putative
  misc_feature (1)..(721): Homolog of NCBI NO: 18423316 NR Description: subtilisin-like serine protease [Arabidopsis
  misc_feature (30)..(720): Homolog of NCBI NO: 24414066 NR Description: OJ1136_A10.14 [Oryza sativa (japonica
  misc_feature (1)..(722): Homolog of NCBI NO: 7435657 NR Description: subtilisin-like proteinase (EC 3.4.21.-) 1 -
  misc_feature (1)..(722): Homolog of NCBI NO: 14488360 NR Description: putative serine protease [Oryza sativa (japonica
  misc_feature (1)..(721): Homolog of NCBI NO: 18396193 NR Description: subtilisin-like serine protease, putative
  misc_feature (1)..(721): Homolog of NCBI NO: 22331076 NR Description: subtilisin-like serine protease, putative
  misc_feature (1)..(721): Homolog of NCBI NO: 18423316 NR Description: subtilisin-like serine protease [Arabidopsis
  misc_feature (1)..(721): Homolog of NCBI NO: 7435656 NR Description: subtilisin-like proteinase (EC 3.4.21.-) 2 -
  misc_feature (167)..(722): Homolog of NCBI NO: 29786399 NR Description: putative serine protease [Populus euramericana]
  misc_feature (1)..(721): Homolog of NCBI NO: 30678198 NR Description: subtilisin-like serine protease, putative
  misc_feature (1)..(722): Homolog of NCBI NO: 7435657 NR Description: subtilisin-like proteinase (EC 3.4.21.-) 1 -
  misc_feature (1)..(722): Homolog of NCBI NO: 14488360 NR Description: putative serine protease [Oryza sativa (japonica
  misc_feature (1)..(721): Homolog of NCBI NO: 18396193 NR Description: subtilisin-like serine protease, putative
  misc_feature (1)..(721): Homolog of NCBI NO: 22331076 NR Description: subtilisin-like serine protease, putative
  misc_feature (1)..(721): Homolog of NCBI NO: 18423316 NR Description: subtilisin-like serine protease [Arabidopsis
  misc_feature (1)..(721): Homolog of NCBI NO: 7435656 NR Description: subtilisin-like proteinase (EC 3.4.21.-) 2 -
  misc_feature (167)..(722): Homolog of NCBI NO: 29786399 NR Description: putative serine protease [Populus euramericana]
  misc_feature (1)..(721): Homolog of NCBI NO: 30678198 NR Description: subtilisin-like serine protease, putative
  misc_feature (1)..(719): Homolog of NCBI NO: 30697281 NR Description: subtilisin-like serine protease [Arabidopsis
  misc_feature (1)..(719): Homolog of NCBI NO: 30697281 NR Description: subtilisin-like serine protease [Arabidopsis
  misc_feature (30)..(720): Homolog of NCBI NO: 24414066 NR Description: OJ1136_A10.14 [Oryza sativa (japonica
  misc_feature (1)..(722): Homolog of NCBI NO: 7435657 NR Description: subtilisin-like proteinase (EC 3.4.21.-) 1 -
  misc_feature (1)..(722): Homolog of NCBI NO: 14488360 NR Description: putative serine protease [Oryza sativa (japonica
  misc_feature (1)..(721): Homolog of NCBI NO: 18396193 NR Description: subtilisin-like serine protease, putative
  misc_feature (1)..(721): Homolog of NCBI NO: 22331076 NR Description: subtilisin-like serine protease, putative
  misc_feature (1)..(721): Homolog of NCBI NO: 18423316 NR Description: subtilisin-like serine protease [Arabidopsis
  misc_feature (1)..(721): Homolog of NCBI NO: 7435656 NR Description: subtilisin-like proteinase (EC 3.4.21.-) 2 -
  misc_feature (167)..(722): Homolog of NCBI NO: 29786399 NR Description: putative serine protease [Populus euramericana]
  misc_feature (1)..(719): Homolog of NCBI NO: 30697281 NR Description: subtilisin-like serine protease [Arabidopsis
  misc_feature (1)..(721): Homolog of NCBI NO: 18423316 NR Description: subtilisin-like serine protease [Arabidopsis
  misc_feature (1)..(721): Homolog of NCBI NO: 22331076 NR Description: subtilisin-like serine protease, putative
  misc_feature (1)..(721): Homolog of NCBI NO: 18396193 NR Description: subtilisin-like serine protease, putative
  misc_feature (1)..(722): Homolog of NCBI NO: 14488360 NR Description: putative serine protease [Oryza sativa (japonica
  misc_feature (1)..(722): Homolog of NCBI NO: 7435657 NR Description: subtilisin-like proteinase (EC 3.4.21.-) 1 -

SEQ ID NO: 45202 - DNA, 2794 bp, Arabidopsis thaliana
  misc_feature (1)..(2794): Ceres Seq. ID no. 12601525
  misc_feature: MA Experiment ID: 20000184 Result: Down-regulated in Transcription
  misc_feature: MA Experiment 20000184 PARAMETER Experiment Name: At_Shoots__P Parameter: Age (day) Value: 7
  misc_feature: MA Experiment 20000184 PARAMETER Experiment Name: At_Shoots__P Parameter: Tissue Value: Shoots vs. Whole Plant
  misc_feature: MA Experiment ID: 20000234 Result: Up-regulated in Transcription
  misc_feature: MA Experiment 20000234 PARAMETER Experiment Name: At_Siliques_P Parameter: Age (day) Value: 21
  misc_feature: MA Experiment 20000234 PARAMETER Experiment Name: At_Siliques_P Parameter: Organism Value: A. thaliana
  misc_feature: MA Experiment 20000234 PARAMETER Experiment Name: At_Siliques_P Parameter: Plant Line Value: WS
  misc_feature: MA Experiment 20000234 PARAMETER Experiment Name: At_Siliques_P Parameter: Tissue Value: Less Than 5mm Siliques vs. Whole Plant
  misc_feature: MA Experiment ID: 20000235 Result: Up-regulated in Transcription
  misc_feature: MA Experiment 20000235 PARAMETER Experiment Name: At_Siliques_P Parameter: Age (day) Value: 21
  misc_feature: MA Experiment 20000235 PARAMETER Experiment Name: At_Siliques_P Parameter: Organism Value: A. thaliana
  misc_feature: MA Experiment 20000235 PARAMETER Experiment Name: At_Siliques_P Parameter: Plant Line Value: WS
  misc_feature: MA Experiment 20000235 PARAMETER Experiment Name: At_Siliques_P Parameter: Tissue Value: 5-10mm Siliques vs. Whole Plant
  misc_feature: MA Experiment ID: 20000264 Result: Up-regulated in Transcription
  misc_feature: MA Experiment 20000264 PARAMETER Experiment Name: At_Open_Flower_P Parameter: Age (day) Value: 21
  misc_feature: MA Experiment 20000264 PARAMETER Experiment Name: At_Open_Flower_P Parameter: Plant Line Value: WS
  misc_feature: MA Experiment 20000264 PARAMETER Experiment Name: At_Open_Flower_P Parameter: Tissue Value: Open Flower vs. Whole Plant
  misc_feature: MA Experiment ID: 20000265 Result: Up-regulated in Transcription
  misc_feature: MA Experiment 20000265 PARAMETER Experiment Name: At_Open_Flower_P Parameter: Age (day) Value: 21
  misc_feature: MA Experiment 20000265 PARAMETER Experiment Name: At_Open_Flower_P Parameter: Plant Line Value: WS
  misc_feature: MA Experiment 20000265 PARAMETER Experiment Name: At_Open_Flower_P Parameter: Tissue Value: Closed Flower vs. Whole Plant
  misc_feature: MA Experiment ID: 20000286 Result: Up-regulated in Transcription
  misc_feature: MA Experiment 20000286 PARAMETER Experiment Name: At_Open_Flower_P Parameter: Age (day) Value: 21
  misc_feature: MA Experiment 20000286 PARAMETER Experiment Name: At_Open_Flower_P Parameter: Plant Line Value: WS
  misc_feature: MA Experiment 20000286 PARAMETER Experiment Name: At_Open_Flower_P Parameter: Tissue Value: Half Open vs. Whole Plant
  misc_feature: MA Experiment ID: 20000794 Result: Up-regulated in Transcription
  misc_feature: MA Experiment 20000794 PARAMETER Experiment Name: At_Petals_P Parameter: Age (day) Value: 23-25 days
  misc_feature: MA Experiment 20000794 PARAMETER Experiment Name: At_Petals_P Parameter: Plant Line Value: WS
  misc_feature: MA Experiment 20000794 PARAMETER Experiment Name: At_Petals_P Parameter: Tissue Value: Petals vs. Whole plant
  misc_feature: MA Experiment ID: 20001757 Result: Down-regulated in Transcription
  misc_feature: MA Experiment 20001757 PARAMETER Experiment Name: At_50mM_NH4NO3_L-to-H_P Parameter: Timepoint (hr) Value: 6
  misc_feature: MA Experiment 20001757 PARAMETER Experiment Name: At_50mM_NH4NO3_L-to-H_P Parameter: Tissue Value: Leaf
  misc_feature: MA Experiment 20001757 PARAMETER Experiment Name: At_50mM_NH4NO3_L-to-H_P Parameter: Treatment Value: 50mM NH4NO3 vs 100mM Mannitol
gagctctccttgttttttattcctccgacaaggacgaggttccaagagaacttagcttcttgttctacgtacgacaccaaaaattaattcaaaaaagaaaaagaagagagttcaatgagaaaacattctcttgatcgatggcttttaacagctgttcttgtcgttctcctctcgtcttcttcctccttcgcggccaagaaggacgccaagaagaagaagaagagtaataaggaggtgacatatgatggaacctctttgatcatcgatggcaaaagagagcttctttattctggctctattcattacccgagaagcactccggaaatgtggccaagtatcatcaagagagccaagcaaggcggtttgaacacgattcagacatacgttttctggaatgtacatgagcctcaacaaggaaagttcaacttttcgggacgagctgatttggtgaagttcataaagttgattcaaaagaatggaatgtatgtgaccttaaggcttggaccgttcatccaagctgaatggactcatggaggacttccttattggcttagagaagttcctggaattttcttccgtacagacaataaacaattcaaggagcatacagaaaggtatgtacggatgatactcgacaaaatgaaggaggaaagattgtttgcgtcacaaggaggccccattatattaggacagatagaaaacgaatatagcgcggttcaacgtgcatataaacaagacgggttaaactacattaaatgggcatctaatttggtggactcaatgaaactcgggatcccatgggttatgtgcaagcagaacgacgctcctgatcctatgatcaatgcttgtaatggaagacattgcggtgatactttccccggtccaaacagagaaaacaaaccatctttatggactgagaattggactactcagttccgcgtgtttggtgatccgccaactcaaagatcagtagaagatatcgcgtattcagttgctcgattcttctccaagaacggaacccatgtcaactactacatgtaccacggagggactaactttggaagaacctctgcacattatgtgaccactagatactacgatgatgcacctcttgatgaatatggtttagagaaagagcctaagtatggtcatcttaagcatcttcacaacgctcttaacctctgcaagaagccacttctttggggtcagcctaaaaccgagaaacctggaaaagatacagagattagatactacgaacaacctggaaccaaaacttgtgctgctttcttggctaacaacaatactgaagctgcagaaaccatcaaattcaagggcagagaatacgtgatcgcgcctcgttctattagtattcttcccgattgtaaaactgttgtttacaacactgcacagattgtttctcaacacacttcaaggaactttatgaagtctaaaaaggcaaacaagaagtttgatttcaaagttttcacagagacattgcctagtaaactcgaaggtaactcatacatacccgttgagctttatggtttgactaaagacaagacagactatggatggtacacaacaagcttcaaggttcacaagaatcacttacctaccaagaaaggagttaagacttttgtgaggattgctagtcttggacacgcgttgcacgcttggcttaacggagaataccttggaagtggacatggaagccacgaagagaagagttttgttttccaaaaacaggttacactaaaagcaggagagaatcatcttgtaatgcttggtgttctcacaggattcccagacagtggatcttacatggagcatagatacaccggtcctcgtggtatttccatcttaggattgacttctggaacacttgatctcactgagagcagcaaatggggaaacaagatcggtatggaaggtgaaaaacttggaatccacactgaggaaggtttaaagaaggtcgaatggaaaaaattcaccggaaaagcaccaggacttacatggtaccagacatactttgatgcaccagagagcgtaagcgcagcaacgattcgcatgcatggaatgggaaaagggttgatttgggtgaacggagaaggcgttggaagatattggcaatcgttcttgtctccattaggtcaacctacacaaatagagtatcacatccctagatctttcttaaagcccaagaagaaccttcttgttatctttgaggaagagcctaatgtgaagcctgagcttatggactttgccatcgttaacagagacactgtttgttcttacgttggagaaaactacactccaagtgttagacactggactaggaagaaagatcaagttcaagccatcacagataacgtgagtctcacggctactcttaaatgctcaggcactaagaagatcgcagcagttgagttcgctagcttcggaaaccctattggtgtttgtggaaacttcacacttggtacttgtaatgctcctgtttcaaagcaagtcatcgagaagcactgtttggggaaagctgaatgtgtgattccggtgaacaagagcacgtttcaacaagacaagaaggattcatgtaagaacgttgtgaagatgcttgccgtgcaagtcaagtgtggtcgtgggaagaagaactgaagagtgtatatcatcacattacatatggttcatgtattgtgtttagtagaccaatttcaaagtgttgtgacatcgatttttgtcgttctgtttgtatttgatttcttcaatttaactctaatacacgagtaatatattcgaa

SEQ ID NO: 45203 - protein, 845 aa, Arabidopsis thaliana
  peptide (1)..(845): Ceres Seq. ID no. 12601526
  misc_feature (759)..(839): Pfam Name: Galactose binding lectin domain Pfam Description: Galactose binding lectin domain
  misc_feature (759)..(839): Pfam Name: Galactose binding lectin domain Pfam Description: Galactose binding lectin domain
  misc_feature (39)..(706): Homolog of NCBI NO: 30697899 NR Description: glycosyl hydrolase family 35 (beta-galactosidase)
  misc_feature (628)..(839): Homolog of NCBI NO: 30690633 NR Description: glycosyl hydrolase family 35 (beta-galactosidase)
  misc_feature (41)..(674): Homolog of NCBI NO: 30690633 NR Description: glycosyl hydrolase family 35 (beta-galactosidase)
  misc_feature (628)..(839): Homolog of NCBI NO: 18419821 NR Description: glycosyl hydrolase family 35 (beta-galactosidase)
  misc_feature (41)..(674): Homolog of NCBI NO: 18419821 NR Description: glycosyl hydrolase family 35 (beta-galactosidase)
  misc_feature (39)..(706): Homolog of NCBI NO: 30697899 NR Description: glycosyl hydrolase family 35 (beta-galactosidase)
  misc_feature (41)..(674): Homolog of NCBI NO: 30690633 NR Description: glycosyl hydrolase family 35 (beta-galactosidase)
  misc_feature (41)..(674): Homolog of NCBI NO: 18419821 NR Description: glycosyl hydrolase family 35 (beta-galactosidase)
  misc_feature (71)..(845): Homolog of NCBI NO: 22329242 NR Description: glycosyl hydrolase family 35 (beta-galactosidase)
  misc_feature (102)..(845): Homolog of NCBI NO: 7484825 NR Description: beta-galactosidase homolog F20M13.150 -
  misc_feature (36)..(723): Homolog of NCBI NO: 10862896 NR Description: putative beta-galactosidase [Nicotiana tabacum]
  misc_feature (41)..(839): Homolog of NCBI NO: 30699255 NR Description: glycosyl hydrolase family 35 (beta-galactosidase)
  misc_feature (41)..(818): Homolog of NCBI NO: 26451843 NR Description: unknown protein [Arabidopsis thaliana]
  misc_feature (628)..(839): Homolog of NCBI NO: 18419821 NR Description: glycosyl hydrolase family 35 (beta-galactosidase)
  misc_feature (628)..(839): Homolog of NCBI NO: 30690633 NR Description: glycosyl hydrolase family 35 (beta-galactosidase)
  misc_feature (41)..(818): Homolog of NCBI NO: 26451843 NR Description: unknown protein [Arabidopsis thaliana]
  misc_feature (41)..(839): Homolog of NCBI NO: 30699255 NR Description: glycosyl hydrolase family 35 (beta-galactosidase)
  misc_feature (36)..(723): Homolog of NCBI NO: 10862896 NR Description: putative beta-galactosidase [Nicotiana tabacum]
  misc_feature (102)..(845): Homolog of NCBI NO: 7484825 NR Description: beta-galactosidase homolog F20M13.150 -
  misc_feature (71)..(845): Homolog of NCBI NO: 22329242 NR Description: glycosyl hydrolase family 35 (beta-galactosidase)
MRKHSLDRWLLTAVLVVLLSSSSSFAAKKDAKKKKKSNKEVTYDGTSLIIDGKRELLYSGSIHYPRSTPEMWPSIIKRAKQGGLNTIQTYVFWNVHEPQQGKFNFSGRADLVKFIKLIQKNGMYVTLRLGPFIQAEWTHGGLPYWLREVPGIFFRTDNKQFKEHTERYVRMILDKMKEERLFASQGGPIILGQIENEYSAVQRAYKQDGLNYIKWASNLVDSMKLGIPWVMCKQNDAPDPMINACNGRHCGDTFPGPNRENKPSLWTENWTTQFRVFGDPPTQRSVEDIAYSVARFFSKNGTHVNYYMYHGGTNFGRTSAHYVTTRYYDDAPLDEYGLEKEPKYGHLKHLHNALNLCKKPLLWGQPKTEKPGKDTEIRYYEQPGTKTCAAFLANNNTEAAETIKFKGREYVIAPRSISILPDCKTVVYNTAQIVSQHTSRNFMKSKKANKKFDFKVFTETLPSKLEGNSYIPVELYGLTKDKTDYGWYTTSFKVHKNHLPTKKGVKTFVRIASLGHALHAWLNGEYLGSGHGSHEEKSFVFQKQVTLKAGENHLVMLGVLTGFPDSGSYMEHRYTGPRGISILGLTSGTLDLTESSKWGNKIGMEGEKLGIHTEEGLKKVEWKKFTGKAPGLTWYQTYFDAPESVSAATIRMHGMGKGLIWVNGEGVGRYWQSFLSPLGQPTQIEYHIPRSFLKPKKNLLVIFEEEPNVKPELMDFAIVNRDTVCSYVGENYTPSVRHWTRKKDQVQAITDNVSLTATLKCSGTKKIAAVEFASFGNPIGVCGNFTLGTCNAPVSKQVIEKHCLGKAECVIPVNKSTFQQDKKDSCKNVVKMLAVQVKCGRGKKN

SEQ ID NO: 45204 - protein, 775 aa, Arabidopsis thaliana
  peptide (1)..(775): Ceres Seq. ID no. 12601527
  misc_feature (689)..(769): Pfam Name: Galactose binding lectin domain Pfam Description: Galactose binding lectin domain
  misc_feature (689)..(769): Pfam Name: Galactose binding lectin domain Pfam Description: Galactose binding lectin domain
  misc_feature (1)..(636): Homolog of NCBI NO: 30697899 NR Description: glycosyl hydrolase family 35 (beta-galactosidase)
  misc_feature (558)..(769): Homolog of NCBI NO: 30690633 NR Description: glycosyl hydrolase family 35 (beta-galactosidase)
  misc_feature (1)..(604): Homolog of NCBI NO: 30690633 NR Description: glycosyl hydrolase family 35 (beta-galactosidase)
  misc_feature (558)..(769): Homolog of NCBI NO: 18419821 NR Description: glycosyl hydrolase family 35 (beta-galactosidase)
  misc_feature (1)..(604): Homolog of NCBI NO: 18419821 NR Description: glycosyl hydrolase family 35 (beta-galactosidase)
  misc_feature (1)..(636): Homolog of NCBI NO: 30697899 NR Description: glycosyl hydrolase family 35 (beta-galactosidase)
  misc_feature (1)..(604): Homolog of NCBI NO: 30690633 NR Description: glycosyl hydrolase family 35 (beta-galactosidase)
  misc_feature (1)..(604): Homolog of NCBI NO: 18419821 NR Description: glycosyl hydrolase family 35 (beta-galactosidase)
  misc_feature (1)..(775): Homolog of NCBI NO: 22329242 NR Description: glycosyl hydrolase family 35 (beta-galactosidase)
  misc_feature (32)..(775): Homolog of NCBI NO: 7484825 NR Description: beta-galactosidase homolog F20M13.150 -
  misc_feature (1)..(653): Homolog of NCBI NO: 10862896 NR Description: putative beta-galactosidase [Nicotiana tabacum]
  misc_feature (1)..(769): Homolog of NCBI NO: 30699255 NR Description: glycosyl hydrolase family 35 (beta-galactosidase)
  misc_feature (1)..(748): Homolog of NCBI NO: 26451843 NR Description: unknown protein [Arabidopsis thaliana]
  misc_feature (558)..(769): Homolog of NCBI NO: 18419821 NR Description: glycosyl hydrolase family 35 (beta-galactosidase)
  misc_feature (558)..(769): Homolog of NCBI NO: 30690633 NR Description: glycosyl hydrolase family 35 (beta-galactosidase)
  misc_feature (1)..(748): Homolog of NCBI NO: 26451843 NR Description: unknown protein [Arabidopsis thaliana]
  misc_feature (1)..(769): Homolog of NCBI NO: 30699255 NR Description: glycosyl hydrolase family 35 (beta-galactosidase)
  misc_feature (1)..(653): Homolog of NCBI NO: 10862896 NR Description: putative beta-galactosidase [Nicotiana tabacum]
  misc_feature (32)..(775): Homolog of NCBI NO: 7484825 NR Description: beta-galactosidase homolog F20M13.150 -
  misc_feature (1)..(775): Homolog of NCBI NO: 22329242 NR Description: glycosyl hydrolase family 35 (beta-galactosidase)
MWPSIIKRAKQGGLNTIQTYVFWNVHEPQQGKFNFSGRADLVKFIKLIQKNGMYVTLRLGPFIQAEWTHGGLPYWLREVPGIFFRTDNKQFKEHTERYVRMILDKMKEERLFASQGGPIILGQIENEYSAVQRAYKQDGLNYIKWASNLVDSMKLGIPWVMCKQNDAPDPMINACNGRHCGDTFPGPNRENKPSLWTENWTTQFRVFGDPPTQRSVEDIAYSVARFFSKNGTHVNYYMYHGGTNFGRTSAHYVTTRYYDDAPLDEYGLEKEPKYGHLKHLHNALNLCKKPLLWGQPKTEKPGKDTEIRYYEQPGTKTCAAFLANNNTEAAETIKFKGREYVIAPRSISILPDCKTVVYNTAQIVSQHTSRNFMKSKKANKKFDFKVFTETLPSKLEGNSYIPVELYGLTKDKTDYGWYTTSFKVHKNHLPTKKGVKTFVRIASLGHALHAWLNGEYLGSGHGSHEEKSFVFQKQVTLKAGENHLVMLGVLTGFPDSGSYMEHRYTGPRGISILGLTSGTLDLTESSKWGNKIGMEGEKLGIHTEEGLKKVEWKKFTGKAPGLTWYQTYFDAPESVSAATIRMHGMGKGLIWVNGEGVGRYWQSFLSPLGQPTQIEYHIPRSFLKPKKNLLVIFEEEPNVKPELMDFAIVNRDTVCSYVGENYTPSVRHWTRKKDQVQAITDNVSLTATLKCSGTKKIAAVEFASFGNPIGVCGNFTLGTCNAPVSKQVIEKHCLGKAECVIPVNKSTFQQDKKDSCKNVVKMLAVQVKCGRGKKN

SEQ ID NO: 45205 - protein, 723 aa, Arabidopsis thaliana
  peptide (1)..(723): Ceres Seq. ID no. 12601528
  misc_feature (637)..(717): Pfam Name: Galactose binding lectin domain Pfam Description: Galactose binding lectin domain
  misc_feature (637)..(717): Pfam Name: Galactose binding lectin domain Pfam Description: Galactose binding lectin domain
  misc_feature (1)..(584): Homolog of NCBI NO: 30697899 NR Description: glycosyl hydrolase family 35 (beta-galactosidase)
  misc_feature (506)..(717): Homolog of NCBI NO: 30690633 NR Description: glycosyl hydrolase family 35 (beta-galactosidase)
  misc_feature (1)..(552): Homolog of NCBI NO: 30690633 NR Description: glycosyl hydrolase family 35 (beta-galactosidase)
  misc_feature (506)..(717): Homolog of NCBI NO: 18419821 NR Description: glycosyl hydrolase family 35 (beta-galactosidase)
  misc_feature (1)..(552): Homolog of NCBI NO: 18419821 NR Description: glycosyl hydrolase family 35 (beta-galactosidase)
  misc_feature (1)..(584): Homolog of NCBI NO: 30697899 NR Description: glycosyl hydrolase family 35 (beta-galactosidase)
  misc_feature (1)..(552): Homolog of NCBI NO: 30690633 NR Description: glycosyl hydrolase family 35 (beta-galactosidase)
  misc_feature (1)..(552): Homolog of NCBI NO: 18419821 NR Description: glycosyl hydrolase family 35 (beta-galactosidase)
  misc_feature (1)..(723): Homolog of NCBI NO: 22329242 NR Description: glycosyl hydrolase family 35 (beta-galactosidase)
  misc_feature (1)..(723): Homolog of NCBI NO: 7484825 NR Description: beta-galactosidase homolog F20M13.150 -
  misc_feature (1)..(601): Homolog of NCBI NO: 10862896 NR Description: putative beta-galactosidase [Nicotiana tabacum]
  misc_feature (1)..(717): Homolog of NCBI NO: 30699255 NR Description: glycosyl hydrolase family 35 (beta-galactosidase)
  misc_feature (1)..(696): Homolog of NCBI NO: 26451843 NR Description: unknown protein [Arabidopsis thaliana]
  misc_feature (506)..(717): Homolog of NCBI NO: 18419821 NR Description: glycosyl hydrolase family 35 (beta-galactosidase)
  misc_feature (506)..(717): Homolog of NCBI NO: 30690633 NR Description: glycosyl hydrolase family 35 (beta-galactosidase)
  misc_feature (1)..(696): Homolog of NCBI NO: 26451843 NR Description: unknown protein [Arabidopsis thaliana]
  misc_feature (1)..(717): Homolog of NCBI NO: 30699255 NR Description: glycosyl hydrolase family 35 (beta-galactosidase)
  misc_feature (1)..(601): Homolog of NCBI NO: 10862896 NR Description: putative beta-galactosidase [Nicotiana tabacum]
  misc_feature (1)..(723): Homolog of NCBI NO: 7484825 NR Description: beta-galactosidase homolog F20M13.150 -
  misc_feature (1)..(723): Homolog of NCBI NO: 22329242 NR Description: glycosyl hydrolase family 35 (beta-galactosidase)
MYVTLRLGPFIQAEWTHGGLPYWLREVPGIFFRTDNKQFKEHTERYVRMILDKMKEERLFASQGGPIILGQIENEYSAVQRAYKQDGLNYIKWASNLVDSMKLGIPWVMCKQNDAPDPMINACNGRHCGDTFPGPNRENKPSLWTENWTTQFRVFGDPPTQRSVEDIAYSVARFFSKNGTHVNYYMYHGGTNFGRTSAHYVTTRYYDDAPLDEYGLEKEPKYGHLKHLHNALNLCKKPLLWGQPKTEKPGKDTEIRYYEQPGTKTCAAFLANNNTEAAETIKFKGREYVIAPRSISILPDCKTVVYNTAQIVSQHTSRNFMKSKKANKKFDFKVFTETLPSKLEGNSYIPVELYGLTKDKTDYGWYTTSFKVHKNHLPTKKGVKTFVRIASLGHALHAWLNGEYLGSGHGSHEEKSFVFQKQVTLKAGENHLVMLGVLTGFPDSGSYMEHRYTGPRGISILGLTSGTLDLTESSKWGNKIGMEGEKLGIHTEEGLKKVEWKKFTGKAPGLTWYQTYFDAPESVSAATIRMHGMGKGLIWVNGEGVGRYWQSFLSPLGQPTQIEYHIPRSFLKPKKNLLVIFEEEPNVKPELMDFAIVNRDTVCSYVGENYTPSVRHWTRKKDQVQAITDNVSLTATLKCSGTKKIAAVEFASFGNPIGVCGNFTLGTCNAPVSKQVIEKHCLGKAECVIPVNKSTFQQDKKDSCKNVVKMLAVQVKCGRGKKN

SEQ ID NO: 45206 - DNA, 2066 bp, Arabidopsis thaliana; identical to SEQ ID NO: 39017
  misc_feature (1)..(2066): Ceres Seq. ID no. 13495924
  misc_feature: MA Experiment ID: 108434 Result: Down-regulated in Transcription
  misc_feature: MA Experiment 108434 PARAMETER Experiment Name: At_Root_Tips_cDNA_P Parameter: Tissue Value: Root Tips
  misc_feature: MA Experiment ID: 108435 Result: Down-regulated in Transcription
  misc_feature: MA Experiment 108435 PARAMETER Experiment Name: At_stm_Mutants_cDNA_P Parameter: Plant Line Value: wt Landsburg vs stm
  misc_feature: MA Experiment 108435 PARAMETER Experiment Name: At_stm_Mutants_cDNA_P Parameter: Tissue Value: Shoot Apical Meristem Region
  misc_feature: MA Experiment ID: 108463 Result: Up-regulated in Transcription
  misc_feature: MA Experiment 108463 PARAMETER Experiment Name: At_Germinating_Seeds_cDNA_P Parameter: Age (day) Value: 3 vs. 0
  misc_feature: MA Experiment 108463 PARAMETER Experiment Name: At_Germinating_Seeds_cDNA_P Parameter: Tissue Value: Germinating Seeds
  misc_feature: MA Experiment ID: 108573 Result: Up-regulated in Transcription
  misc_feature: MA Experiment 108573 PARAMETER Experiment Name: At_Drought_cDNA_P Parameter: Timepoint (hr) Value: 6
  misc_feature: MA Experiment 108573 PARAMETER Experiment Name: At_Drought_cDNA_P Parameter: Tissue Value: Aerial
  misc_feature: MA Experiment 108573 PARAMETER Experiment Name: At_Drought_cDNA_P Parameter: Treatment Value: Drought vs. No Drought
  misc_feature: MA Experiment ID: 108574 Result: Down-regulated in Transcription
  misc_feature: MA Experiment 108574 PARAMETER Experiment Name: At_Wounding__cDNA_P Parameter: Timepoint (hr) Value: 1
  misc_feature: MA Experiment 108574 PARAMETER Experiment Name: At_Wounding__cDNA_P Parameter: Tissue Value: Aerial
  misc_feature: MA Experiment 108574 PARAMETER Experiment Name: At_Wounding__cDNA_P Parameter: Treatment Value: Wounding vs. No Wounding
  misc_feature: MA Experiment ID: 108577 Result: Down-regulated in Transcription
  misc_feature: MA Experiment 108577 PARAMETER Experiment Name: At_42deg_Heat_cDNA_P Parameter: Temperature (deg C) Value: 42 vs. 22
  misc_feature: MA Experiment 108577 PARAMETER Experiment Name: At_42deg_Heat_cDNA_P Parameter: Timepoint (hr) Value: 6
  misc_feature: MA Experiment 108577 PARAMETER Experiment Name: At_42deg_Heat_cDNA_P Parameter: Tissue Value: Aerial
  misc_feature: MA Experiment ID: 108668 Result: Down-regulated in Transcription
  misc_feature: MA Experiment 108668 PARAMETER Experiment Name: At_2mM_SA_cDNA_P Parameter: Plant Line Value: WS
  misc_feature: MA Experiment 108668 PARAMETER Experiment Name: At_2mM_SA_cDNA_P Parameter: Timepoint (hr) Value: 6
  misc_feature: MA Experiment 108668 PARAMETER Experiment Name: At_2mM_SA_cDNA_P Parameter: Treatment Value: 2mM SA vs. No Treatment
  misc_feature: MA Experiment ID: 20000030 Result: Down-regulated in Transcription
  misc_feature: MA Experiment 20000030 PARAMETER Experiment Name: At_CS6630_Roots_cDNA_P Parameter: Plant Line Value: CS6630 vs. WS
  misc_feature: MA Experiment 20000030 PARAMETER Experiment Name: At_CS6630_Roots_cDNA_P Parameter: Tissue Value: Roots
  misc_feature: MA Experiment ID: 20000071 Result: Up-regulated in Transcription
  misc_feature: MA Experiment 20000071 PARAMETER Experiment Name: At_100uM_ABA_Mutants_cDNA_P Parameter: Plant Line Value: CS8104
  misc_feature: MA Experiment 20000071 PARAMETER Experiment Name: At_100uM_ABA_Mutants_cDNA_P Parameter: Timepoint (hr) Value: 6
  misc_feature: MA Experiment 20000071 PARAMETER Experiment Name: At_100uM_ABA_Mutants_cDNA_P Parameter: Tissue Value: Aerial
  misc_feature: MA Experiment 20000071 PARAMETER Experiment Name: At_100uM_ABA_Mutants_cDNA_P Parameter: Treatment Value: 100uM ABA vs. No Treatment
  misc_feature: MA Experiment ID: 20000224 Result: Up-regulated in Transcription
  misc_feature: MA Experiment ID: 20000315 Result: Down-regulated in Transcription
  misc_feature: MA Experiment 20000315 PARAMETER Experiment Name: At_14day_Shoots-Roots_Sub_P Parameter: Age (day) Value: 14
  misc_feature: MA Experiment 20000315 PARAMETER Experiment Name: At_14day_Shoots-Roots_Sub_P Parameter: Organism Value: A. thaliana
  misc_feature: MA Experiment 20000315 PARAMETER Experiment Name: At_14day_Shoots-Roots_Sub_P Parameter: Plant Line Value: WS
  misc_feature: MA Experiment 20000315 PARAMETER Experiment Name: At_14day_Shoots-Roots_Sub_P Parameter: Tissue Value: Shoots vs. Whole Plant
  misc_feature: MA Experiment ID: 20000328 Result: Down-regulated in Transcription
  misc_feature: MA Experiment 20000328 PARAMETER Experiment Name: At_42deg_Heat_Sub_P Parameter: Age (day) Value: 14
  misc_feature: MA Experiment 20000328 PARAMETER Experiment Name: At_42deg_Heat_Sub_P Parameter: Organism Value: A. thaliana
  misc_feature: MA Experiment 20000328 PARAMETER Experiment Name: At_42deg_Heat_Sub_P Parameter: Plant Line Value: WS
  misc_feature: MA Experiment 20000328 PARAMETER Experiment Name: At_42deg_Heat_Sub_P Parameter: Temperature (deg C) Value: 42 vs. 22
  misc_feature: MA Experiment 20000328 PARAMETER Experiment Name: At_42deg_Heat_Sub_P Parameter: Timepoint (hr) Value: 6
  misc_feature: MA Experiment 20000328 PARAMETER Experiment Name: At_42deg_Heat_Sub_P Parameter: Tissue Value: Aerial
  misc_feature: MA Experiment ID: 20000355 Result: Down-regulated in Transcription
  misc_feature: MA Experiment 20000355 PARAMETER Experiment Name: At_Siliques_Sub_P Parameter: Age (day) Value: 21
  misc_feature: MA Experiment 20000355 PARAMETER Experiment Name: At_Siliques_Sub_P Parameter: Organism Value: A. thaliana
  misc_feature: MA Experiment 20000355 PARAMETER Experiment Name: At_Siliques_Sub_P Parameter: Plant Line Value: WS
  misc_feature: MA Experiment 20000355 PARAMETER Experiment Name: At_Siliques_Sub_P Parameter: Tissue Value: Less Than 5mm Siliques vs. Whole Plant
  misc_feature: MA Experiment ID: 20000440 Result: Down-regulated in Transcription
  misc_feature: MA Experiment 20000440 PARAMETER Experiment Name: At_Closed-Flower__Sub_P Parameter: Tissue Value: Closed Flower vs. Whole Plant

SEQ ID NO: 45207 - protein, 573 aa, Arabidopsis thaliana; identical to SEQ ID NO: 39018
  peptide (1)..(573): Ceres Seq. ID no. 13495925
  misc_feature (305)..(489): Pfam Name: CRAL/TRIO domain Pfam Description: CRAL/TRIO domain
  misc_feature (305)..(489): Pfam Name: CRAL/TRIO domain Pfam Description: CRAL/TRIO domain
  misc_feature (305)..(489): Pfam Name: CRAL/TRIO domain Pfam Description: CRAL/TRIO domain
  misc_feature (5)..(489): Homolog of NCBI NO: 25407487 NR Description: hypothetical protein AT4g09160 [imported] -
  misc_feature (5)..(573): Homolog of NCBI NO: 30680992 NR Description: expressed protein [Arabidopsis thaliana]
  misc_feature (27)..(573): Homolog of NCBI NO: 14334978 NR Description: unknown protein [Arabidopsis thaliana]
  misc_feature (27)..(573): Homolog of NCBI NO: 18397616 NR Description: expressed protein [Arabidopsis thaliana]
  misc_feature (239)..(573): Homolog of NCBI NO: 15081614 NR Description: At1g72160/T9N14_8 [Arabidopsis thaliana]
  misc_feature (5)..(489): Homolog of NCBI NO: 25407487 NR Description: hypothetical protein AT4g09160 [imported] -
  misc_feature (27)..(573): Homolog of NCBI NO: 14334978 NR Description: unknown protein [Arabidopsis thaliana]
  misc_feature (239)..(573): Homolog of NCBI NO: 15081614 NR Description: At1g72160/T9N14_8 [Arabidopsis thaliana]
  misc_feature (27)..(573): Homolog of NCBI NO: 18397616 NR Description: expressed protein [Arabidopsis thaliana]
  misc_feature (27)..(573): Homolog of NCBI NO: 14334978 NR Description: unknown protein [Arabidopsis thaliana]
  misc_feature (5)..(573): Homolog of NCBI NO: 30680992 NR Description: expressed protein [Arabidopsis thaliana]
  misc_feature (5)..(489): Homolog of NCBI NO: 25407487 NR Description: hypothetical protein AT4g09160 [imported] -
  misc_feature (1)..(573): Homolog of NCBI NO: 15218382 NR Description: cytosolic factor -related [Arabidopsis thaliana]
  misc_feature (1)..(573): Homolog of NCBI NO: 15219901 NR Description: expressed protein [Arabidopsis thaliana]
  misc_feature (121)..(572): Homolog of NCBI NO: 8894548 NR Description: hypothetical protein [Cicer arietinum]
  misc_feature (36)..(573): Homolog of NCBI NO: 34907288 NR Description: contains ESTs
  misc_feature (117)..(573): Homolog of NCBI NO: 15218383 NR Description: cytosolic factor -related [Arabidopsis thaliana]
  misc_feature (1)..(573): Homolog of NCBI NO: 15218382 NR Description: cytosolic factor -related [Arabidopsis thaliana]
  misc_feature (1)..(573): Homolog of NCBI NO: 15219901 NR Description: expressed protein [Arabidopsis thaliana]
  misc_feature (121)..(572): Homolog of NCBI NO: 8894548 NR Description: hypothetical protein [Cicer arietinum]
  misc_feature (36)..(573): Homolog of NCBI NO: 34907288 NR Description: contains ESTs
  misc_feature (117)..(573): Homolog of NCBI NO: 15218383 NR Description: cytosolic factor -related [Arabidopsis thaliana]
  misc_feature (239)..(573): Homolog of NCBI NO: 15081614 NR Description: At1g72160/T9N14_8 [Arabidopsis thaliana]
  misc_feature (27)..(573): Homolog of NCBI NO: 18397616 NR Description: expressed protein [Arabidopsis thaliana]
  misc_feature (5)..(573): Homolog of NCBI NO: 30680992 NR Description: expressed protein [Arabidopsis thaliana]
  misc_feature (117)..(573): Homolog of NCBI NO: 15218383 NR Description: cytosolic factor -related [Arabidopsis thaliana]
  misc_feature (36)..(573): Homolog of NCBI NO: 34907288 NR Description: contains ESTs
  misc_feature (121)..(572): Homolog of NCBI NO: 8894548 NR Description: hypothetical protein [Cicer arietinum]
  misc_feature (1)..(573): Homolog of NCBI NO: 15219901 NR Description: expressed protein [Arabidopsis thaliana]
  misc_feature (1)..(573): Homolog of NCBI NO: 15218382 NR Description: cytosolic factor -related [Arabidopsis thaliana]

SEQ ID NO: 45208 - protein, 298 aa, Arabidopsis thaliana; identical to SEQ ID NO: 39019
  peptide (1)..(298): Ceres Seq. ID no. 13495926
  misc_feature (30)..(214): Pfam Name: CRAL/TRIO domain Pfam Description: CRAL/TRIO domain
  misc_feature (30)..(214): Pfam Name: CRAL/TRIO domain Pfam Description: CRAL/TRIO domain
  misc_feature (30)..(214): Pfam Name: CRAL/TRIO domain Pfam Description: CRAL/TRIO domain
  misc_feature (1)..(214): Homolog of NCBI NO: 25407487 NR Description: hypothetical protein AT4g09160 [imported] -
  misc_feature (1)..(298): Homolog of NCBI NO: 30680992 NR Description: expressed protein [Arabidopsis thaliana]
  misc_feature (1)..(298): Homolog of NCBI NO: 14334978 NR Description: unknown protein [Arabidopsis thaliana]
  misc_feature (1)..(298): Homolog of NCBI NO: 18397616 NR Description: expressed protein [Arabidopsis thaliana]
  misc_feature (1)..(298): Homolog of NCBI NO: 15081614 NR Description: At1g72160/T9N14_8 [Arabidopsis thaliana]
  misc_feature (1)..(214): Homolog of NCBI NO: 25407487 NR Description: hypothetical protein AT4g09160 [imported] -
  misc_feature (1)..(298): Homolog of NCBI NO: 14334978 NR Description: unknown protein [Arabidopsis thaliana]
  misc_feature (1)..(298): Homolog of NCBI NO: 15081614 NR Description: At1g72160/T9N14_8 [Arabidopsis thaliana]
  misc_feature (1)..(298): Homolog of NCBI NO: 18397616 NR Description: expressed protein [Arabidopsis thaliana]
  misc_feature (1)..(298): Homolog of NCBI NO: 14334978 NR Description: unknown protein [Arabidopsis thaliana]
  misc_feature (1)..(298): Homolog of NCBI NO: 30680992 NR Description: expressed protein [Arabidopsis thaliana]
  misc_feature (1)..(214): Homolog of NCBI NO: 25407487 NR Description: hypothetical protein AT4g09160 [imported] -
  misc_feature (1)..(298): Homolog of NCBI NO: 15218382 NR Description: cytosolic factor -related [Arabidopsis thaliana]
  misc_feature (1)..(298): Homolog of NCBI NO: 15219901 NR Description: expressed protein [Arabidopsis thaliana]
  misc_feature (1)..(297): Homolog of NCBI NO: 8894548 NR Description: hypothetical protein [Cicer arietinum]
  misc_feature (1)..(298): Homolog of NCBI NO: 34907288 NR Description: contains ESTs
  misc_feature (1)..(298): Homolog of NCBI NO: 15218383 NR Description: cytosolic factor -related [Arabidopsis thaliana]
  misc_feature (1)..(298): Homolog of NCBI NO: 15218382 NR Description: cytosolic factor -related [Arabidopsis thaliana]
  misc_feature (1)..(298): Homolog of NCBI NO: 15219901 NR Description: expressed protein [Arabidopsis thaliana]
  misc_feature (1)..(297): Homolog of NCBI NO: 8894548 NR Description: hypothetical protein [Cicer arietinum]
  misc_feature (1)..(298): Homolog of NCBI NO: 34907288 NR Description: contains ESTs
  misc_feature (1)..(298): Homolog of NCBI NO: 15218383 NR Description: cytosolic factor -related [Arabidopsis thaliana]
  misc_feature (1)..(298): Homolog of NCBI NO: 15081614 NR Description: At1g72160/T9N14_8 [Arabidopsis thaliana]
  misc_feature (1)..(298): Homolog of NCBI NO: 18397616 NR Description: expressed protein [Arabidopsis thaliana]
  misc_feature (1)..(298): Homolog of NCBI NO: 30680992 NR Description: expressed protein [Arabidopsis thaliana]
  misc_feature (1)..(298): Homolog of NCBI NO: 15218383 NR Description: cytosolic factor -related [Arabidopsis thaliana]
  misc_feature (1)..(298): Homolog of NCBI NO: 34907288 NR Description: contains ESTs
  misc_feature (1)..(297): Homolog of NCBI NO: 8894548 NR Description: hypothetical protein [Cicer arietinum]
  misc_feature (1)..(298): Homolog of NCBI NO: 15219901 NR Description: expressed protein [Arabidopsis thaliana]
  misc_feature (1)..(298): Homolog of NCBI NO: 15218382 NR Description: cytosolic factor -related [Arabidopsis thaliana]

SEQ ID NO: 45209 - DNA, 1166 bp, Arabidopsis thaliana
  misc_feature (1)..(1166): Ceres Seq. ID no. 13591615
  misc_feature: MA Experiment ID: 20000180 Result: Up-regulated in Transcription
  misc_feature: MA Experiment 20000180 PARAMETER Experiment Name: At_Germinating_Seeds_P Parameter: Age (hr) Value: 24 vs. 0
  misc_feature: MA Experiment 20000180 PARAMETER Experiment Name: At_Germinating_Seeds_P Parameter: Tissue Value: Germinating Seeds
  misc_feature: MA Experiment ID: 20000182 Result: Up-regulated in Transcription
  misc_feature: MA Experiment 20000182 PARAMETER Experiment Name: At_2mM_SA_P Parameter: Age (day) Value: 14
  misc_feature: MA Experiment 20000182 PARAMETER Experiment Name: At_2mM_SA_P Parameter: Organism Value: A. thaliana
  misc_feature: MA Experiment 20000182 PARAMETER Experiment Name: At_2mM_SA_P Parameter: Plant Line Value: WS
  misc_feature: MA Experiment 20000182 PARAMETER Experiment Name: At_2mM_SA_P Parameter: Timepoint (hr) Value: 6
  misc_feature: MA Experiment 20000182 PARAMETER Experiment Name: At_2mM_SA_P Parameter: Tissue Value: Aerial
  misc_feature: MA Experiment 20000182 PARAMETER Experiment Name: At_2mM_SA_P Parameter: Treatment Value: 2mM SA vs. No Treatment
  misc_feature: MA Experiment ID: 20000185 Result: Up-regulated in Transcription
  misc_feature: MA Experiment 20000185 PARAMETER Experiment Name: At_Roots__P Parameter: Age (day) Value: 7 vs. 21
  misc_feature: MA Experiment 20000185 PARAMETER Experiment Name: At_Roots__P Parameter: Organism Value: A. thaliana
  misc_feature: MA Experiment 20000185 PARAMETER Experiment Name: At_Roots__P Parameter: Tissue Value: Roots vs. Whole Plant
  misc_feature: MA Experiment ID: 20000227 Result: Up-regulated in Transcription
  misc_feature: MA Experiment 20000227 PARAMETER Experiment Name: At_Root-Tips-vs-Tops_P Parameter: Tissue Value: Root Tips vs. Root Tops
  misc_feature: MA Experiment ID: 20000264 Result: Up-regulated in Transcription
  misc_feature: MA Experiment 20000264 PARAMETER Experiment Name: At_Open_Flower_P Parameter: Age (day) Value: 21
  misc_feature: MA Experiment 20000264 PARAMETER Experiment Name: At_Open_Flower_P Parameter: Plant Line Value: WS
  misc_feature: MA Experiment 20000264 PARAMETER Experiment Name: At_Open_Flower_P Parameter: Tissue Value: Open Flower vs. Whole Plant
  misc_feature: MA Experiment ID: 20000265 Result: Up-regulated in Transcription
  misc_feature: MA Experiment 20000265 PARAMETER Experiment Name: At_Open_Flower_P Parameter: Age (day) Value: 21
  misc_feature: MA Experiment 20000265 PARAMETER Experiment Name: At_Open_Flower_P Parameter: Plant Line Value: WS
  misc_feature: MA Experiment 20000265 PARAMETER Experiment Name: At_Open_Flower_P Parameter: Tissue Value: Closed Flower vs. Whole Plant
  misc_feature: MA Experiment ID: 20000286 Result: Up-regulated in Transcription
  misc_feature: MA Experiment 20000286 PARAMETER Experiment Name: At_Open_Flower_P Parameter: Age (day) Value: 21
  misc_feature: MA Experiment 20000286 PARAMETER Experiment Name: At_Open_Flower_P Parameter: Plant Line Value: WS
  misc_feature: MA Experiment 20000286 PARAMETER Experiment Name: At_Open_Flower_P Parameter: Tissue Value: Half Open vs. Whole Plant
  misc_feature: MA Experiment ID: 20000439 Result: Up-regulated in Transcription
  misc_feature: MA Experiment 20000439 PARAMETER Experiment Name: At_Roots__P Parameter: Age (day) Value: 14 vs. 21
  misc_feature: MA Experiment 20000439 PARAMETER Experiment Name: At_Roots__P Parameter: Organism Value: A. thaliana
  misc_feature: MA Experiment 20000439 PARAMETER Experiment Name: At_Roots__P Parameter: Tissue Value: Roots vs. Whole Plant
  misc_feature: MA Experiment ID: 20000496 Result: Up-regulated in Transcription
  misc_feature: MA Experiment 20000496 PARAMETER Experiment Name: At_Guard_Cells_P Parameter: Harvest Date Value: 7/19/2002
  misc_feature: MA Experiment 20000496 PARAMETER Experiment Name: At_Guard_Cells_P Parameter: Organism Value: Canola
  misc_feature: MA Experiment 20000496 PARAMETER Experiment Name: At_Guard_Cells_P Parameter: Tissue Value: Guard Cells vs. Leaves
  misc_feature: MA Experiment ID: 20000527 Result: Down-regulated in Transcription
  misc_feature: MA Experiment 20000527 PARAMETER Experiment Name: At_10percent_PEG_P Parameter: Age (day) Value: 20
  misc_feature: MA Experiment 20000527 PARAMETER Experiment Name: At_10percent_PEG_P Parameter: Organism Value: A. thaliana
  misc_feature: MA Experiment 20000527 PARAMETER Experiment Name: At_10percent_PEG_P Parameter: Plant Line Value: WS
  misc_feature: MA Experiment 20000527 PARAMETER Experiment Name: At_10percent_PEG_P Parameter: Timepoint (day) Value: 20
  misc_feature: MA Experiment 20000527 PARAMETER Experiment Name: At_10percent_PEG_P Parameter: Tissue Value: Whole Plant
  misc_feature: MA Experiment 20000527 PARAMETER Experiment Name: At_10percent_PEG_P Parameter: Treatment Value: 10percent PEG vs. No Treatment
  misc_feature: MA Experiment ID: 20001248 Result: Down-regulated in Transcription
  misc_feature: MA Experiment 20001248 PARAMETER Experiment Name: At_Far-red-induction_P Parameter: Age (day) Value: 7
  misc_feature: MA Experiment 20001248 PARAMETER Experiment Name: At_Far-red-induction_P Parameter: Light Value: Far-red vs. White
  misc_feature: MA Experiment 20001248 PARAMETER Experiment Name: At_Far-red-induction_P Parameter: Organism Value: A. thaliana
  misc_feature: MA Experiment 20001248 PARAMETER Experiment Name: At_Far-red-induction_P Parameter: Plant Line Value: Columbia
  misc_feature: MA Experiment 20001248 PARAMETER Experiment Name: At_Far-red-induction_P Parameter: Timepoint (hr) Value: 4
  misc_feature: MA Experiment 20001248 PARAMETER Experiment Name: At_Far-red-induction_P Parameter: Tissue Value: Whole Plant
ggtggtgaatgagagagtcaactttaatggagaaagtcacaaggagaactatctcctccttcatcttctttatcgtctcttctaccattctttttctcgccggaaaatcctcggccaaaatttctcataacggtgacaataatgtgacggccttgttcctctttggagactctttcttggatgcaggaaacaataattacattaacaccactacacttgaccaagccaattttccaccttatggtcaaacattctttggcctccccaccggaagattctccgacggtcgtctcatctctgatttcattgcggaatatgcgaatttgccgttaattccgccgtttttggaaccgggaaatagtcaaaagaagctttacggcgtcaactttgcgtctgctggtgctggtgctcttgtggaaacgttccaaggttcggttataaatttgagaacacaattggatcactacaagaaagtggagagattatggaggacaaactttggtaaagaagaaagcaagaagagaatctcaagagctgtctatttgataagcattgggagcaatgactactcaagcattttcttgaccaatcaatctcttcccatttcaatgtctcaacatgttgacattgtcattggtaatctgactacattcattcatgaaatatacaagattggaggacgtaaattcgggttcttgaatgtgcctgacttgggttgttttccggctttacgaattctacaaccgaagaatgatgattcttgcttaagagatgcttcaagattagcaagcatgcataacagagctctgacaaatctcttgtttcaaatgcaaagacaagtcaagggattcaaattctccctatttgacatgaacaaaagccttagactcagaatgcaacatccttctaaatttgggtttaaagaaggggaagaagcttgttgtggaactgggaagtggagaggagtattcagctgtggagggaagagaattgtgaaagaatatcaattgtgtgagaatcctaaagattatattttttgggattcacttcatctcacacaaaatacatataaccaattcgcaaacttaatttggaacggtggacacatgtcagattctctagtggttggtccatacaatatcaataatttatttcagattccttga

SEQ ID NO: 45210 - protein, 385 aa, Arabidopsis thaliana
  peptide (1)..(385): Ceres Seq. ID no. 13591616
  misc_feature (49)..(361): Pfam Name: GDSL-like Lipase/Acylhydrolase Pfam Description: GDSL-like Lipase/Acylhydrolase
  misc_feature (49)..(361): Pfam Name: GDSL-like Lipase/Acylhydrolase Pfam Description: GDSL-like Lipase/Acylhydrolase
  misc_feature (19)..(384): Homolog of NCBI NO: 15221018 NR Description: GDSL-motif lipase/hydrolase protein [Arabidopsis
  misc_feature (27)..(384): Homolog of NCBI NO: 15231809 NR Description: GDSL-motif lipase/hydrolase protein [Arabidopsis
  misc_feature (19)..(106): Homolog of NCBI NO: 25405682 NR Description: hypothetical protein F15I1.7 [imported] -
  misc_feature (95)..(384): Homolog of NCBI NO: 25405682 NR Description: hypothetical protein F15I1.7 [imported] -
  misc_feature (16)..(364): Homolog of NCBI NO: 15220995 NR Description: GDSL-motif lipase/hydrolase protein [Arabidopsis
  misc_feature (19)..(384): Homolog of NCBI NO: 15221018 NR Description: GDSL-motif lipase/hydrolase protein [Arabidopsis
  misc_feature (19)..(106): Homolog of NCBI NO: 25405682 NR Description: hypothetical protein F15I1.7 [imported] -
  misc_feature (16)..(364): Homolog of NCBI NO: 15220995 NR Description: GDSL-motif lipase/hydrolase protein [Arabidopsis
  misc_feature (1)..(385): Homolog of NCBI NO: 30695607 NR Description: GDSL-motif lipase/hydrolase protein [Arabidopsis
  misc_feature (7)..(385): Homolog of NCBI NO: 25336254 NR Description: hypothetical protein T18A20.15 [imported] -
  misc_feature (25)..(384): Homolog of NCBI NO: 21358785 NR Description: lipase SIL1 [Brassica rapa subsp. pekinensis]
  misc_feature (16)..(384): Homolog of NCBI NO: 25336255 NR Description: hypothetical protein F15I1.2 [imported] -
  misc_feature (26)..(384): Homolog of NCBI NO: 15237530 NR Description: GDSL-motif lipase/hydrolase protein [Arabidopsis
  misc_feature (95)..(384): Homolog of NCBI NO: 25405682 NR Description: hypothetical protein F15I1.7 [imported] -
  misc_feature (27)..(384): Homolog of NCBI NO: 15231809 NR Description: GDSL-motif lipase/hydrolase protein [Arabidopsis
  misc_feature (26)..(384): Homolog of NCBI NO: 15237530 NR Description: GDSL-motif lipase/hydrolase protein [Arabidopsis
  misc_feature (16)..(384): Homolog of NCBI NO: 25336255 NR Description: hypothetical protein F15I1.2 [imported] -
  misc_feature (25)..(384): Homolog of NCBI NO: 21358785 NR Description: lipase SIL1 [Brassica rapa subsp. pekinensis]
  misc_feature (7)..(385): Homolog of NCBI NO: 25336254 NR Description: hypothetical protein T18A20.15 [imported] -
  misc_feature (1)..(385): Homolog of NCBI NO: 30695607 NR Description: GDSL-motif lipase/hydrolase protein [Arabidopsis
MRESTLMEKVTRRTISSFIFFIVSSTILFLAGKSSAKISHNGDNNVTALFLFGDSFLDAGNNNYINTTTLDQANFPPYGQTFFGLPTGRFSDGRLISDFIAEYANLPLIPPFLEPGNSQKKLYGVNFASAGAGALVETFQGSVINLRTQLDHYKKVERLWRTNFGKEESKKRISRAVYLISIGSNDYSSIFLTNQSLPISMSQHVDIVIGNLTTFIHEIYKIGGRKFGFLNVPDLGCFPALRILQPKNDDSCLRDASRLASMHNRALTNLLFQMQRQVKGFKFSLFDMNKSLRLRMQHPSKFGFKEGEEACCGTGKWRGVFSCGGKRIVKEYQLCENPKDYIFWDSLHLTQNTYNQFANLIWNGGHMSDSLVVGPYNINNLFQIP

SEQ ID NO: 45211 - protein, 379 aa, Arabidopsis thaliana
  peptide (1)..(379): Ceres Seq. ID no. 13591617
  misc_feature (43)..(355): Pfam Name: GDSL-like Lipase/Acylhydrolase Pfam Description: GDSL-like Lipase/Acylhydrolase
  misc_feature (43)..(355): Pfam Name: GDSL-like Lipase/Acylhydrolase Pfam Description: GDSL-like Lipase/Acylhydrolase
  misc_feature (13)..(378): Homolog of NCBI NO: 15221018 NR Description: GDSL-motif lipase/hydrolase protein [Arabidopsis
  misc_feature (21)..(378): Homolog of NCBI NO: 15231809 NR Description: GDSL-motif lipase/hydrolase protein [Arabidopsis
  misc_feature (13)..(100): Homolog of NCBI NO: 25405682 NR Description: hypothetical protein F15I1.7 [imported] -
  misc_feature (89)..(378): Homolog of NCBI NO: 25405682 NR Description: hypothetical protein F15I1.7 [imported] -
  misc_feature (10)..(358): Homolog of NCBI NO: 15220995 NR Description: GDSL-motif lipase/hydrolase protein [Arabidopsis
  misc_feature (13)..(378): Homolog of NCBI NO: 15221018 NR Description: GDSL-motif lipase/hydrolase protein [Arabidopsis
  misc_feature (13)..(100): Homolog of NCBI NO: 25405682 NR Description: hypothetical protein F15I1.7 [imported] -
  misc_feature (10)..(358): Homolog of NCBI NO: 15220995 NR Description: GDSL-motif lipase/hydrolase protein [Arabidopsis
  misc_feature (1)..(379): Homolog of NCBI NO: 30695607 NR Description: GDSL-motif lipase/hydrolase protein [Arabidopsis
  misc_feature (1)..(379): Homolog of NCBI NO: 25336254 NR Description: hypothetical protein T18A20.15 [imported] -
  misc_feature (19)..(378): Homolog of NCBI NO: 21358785 NR Description: lipase SIL1 [Brassica rapa subsp. pekinensis]
  misc_feature (10)..(378): Homolog of NCBI NO: 25336255 NR Description: hypothetical protein F15I1.2 [imported] -
  misc_feature (20)..(378): Homolog of NCBI NO: 15237530 NR Description: GDSL-motif lipase/hydrolase protein [Arabidopsis
  misc_feature (89)..(378): Homolog of NCBI NO: 25405682 NR Description: hypothetical protein F15I1.7 [imported] -
  misc_feature (21)..(378): Homolog of NCBI NO: 15231809 NR Description: GDSL-motif lipase/hydrolase protein [Arabidopsis
  misc_feature (20)..(378): Homolog of NCBI NO: 15237530 NR Description: GDSL-motif lipase/hydrolase protein [Arabidopsis
  misc_feature (10)..(378): Homolog of NCBI NO: 25336255 NR Description: hypothetical protein F15I1.2 [imported] -
  misc_feature (19)..(378): Homolog of NCBI NO: 21358785 NR Description: lipase SIL1 [Brassica rapa subsp. pekinensis]
  misc_feature (1)..(379): Homolog of NCBI NO: 25336254 NR Description: hypothetical protein T18A20.15 [imported] -
  misc_feature (1)..(379): Homolog of NCBI NO: 30695607 NR Description: GDSL-motif lipase/hydrolase protein [Arabidopsis
MEKVTRRTISSFIFFIVSSTILFLAGKSSAKISHNGDNNVTALFLFGDSFLDAGNNNYINTTTLDQANFPPYGQTFFGLPTGRFSDGRLISDFIAEYANLPLIPPFLEPGNSQKKLYGVNFASAGAGALVETFQGSVINLRTQLDHYKKVERLWRTNFGKEESKKRISRAVYLISIGSNDYSSIFLTNQSLPISMSQHVDIVIGNLTTFIHEIYKIGGRKFGFLNVPDLGCFPALRILQPKNDDSCLRDASRLASMHNRALTNLLFQMQRQVKGFKFSLFDMNKSLRLRMQHPSKFGFKEGEEACCGTGKWRGVFSCGGKRIVKEYQLCENPKDYIFWDSLHLTQNTYNQFANLIWNGGHMSDSLVVGPYNINNLFQIP

SEQ ID NO: 45212 - DNA, 2498 bp, Arabidopsis thaliana
  misc_feature (1)..(2498): Ceres Seq. ID no. 12560492
  misc_feature: MA Experiment ID: 20000234 Result: Down-regulated in Transcription
  misc_feature: MA Experiment 20000234 PARAMETER Experiment Name: At_Siliques_P Parameter: Age (day) Value: 21
  misc_feature: MA Experiment 20000234 PARAMETER Experiment Name: At_Siliques_P Parameter: Organism Value: A. thaliana
  misc_feature: MA Experiment 20000234 PARAMETER Experiment Name: At_Siliques_P Parameter: Plant Line Value: WS
  misc_feature: MA Experiment 20000234 PARAMETER Experiment Name: At_Siliques_P Parameter: Tissue Value: Less Than 5mm Siliques vs. Whole Plant
  misc_feature: MA Experiment ID: 20000264 Result: Down-regulated in Transcription
  misc_feature: MA Experiment 20000264 PARAMETER Experiment Name: At_Open_Flower_P Parameter: Age (day) Value: 21
  misc_feature: MA Experiment 20000264 PARAMETER Experiment Name: At_Open_Flower_P Parameter: Plant Line Value: WS
  misc_feature: MA Experiment 20000264 PARAMETER Experiment Name: At_Open_Flower_P Parameter: Tissue Value: Open Flower vs. Whole Plant
  misc_feature: MA Experiment ID: 20000265 Result: Down-regulated in Transcription
  misc_feature: MA Experiment 20000265 PARAMETER Experiment Name: At_Open_Flower_P Parameter: Age (day) Value: 21
  misc_feature: MA Experiment 20000265 PARAMETER Experiment Name: At_Open_Flower_P Parameter: Plant Line Value: WS
  misc_feature: MA Experiment 20000265 PARAMETER Experiment Name: At_Open_Flower_P Parameter: Tissue Value: Closed Flower vs. Whole Plant
  misc_feature: MA Experiment ID: 20000438 Result: Down-regulated in Transcription
  misc_feature: MA Experiment 20000438 PARAMETER Experiment Name: At_Shoots__P Parameter: Age (day) Value: 14
  misc_feature: MA Experiment 20000438 PARAMETER Experiment Name: At_Shoots__P Parameter: Tissue Value: Shoots vs. Whole Plant
  misc_feature: MA Experiment ID: 20001248 Result: Up-regulated in Transcription
  misc_feature: MA Experiment 20001248 PARAMETER Experiment Name: At_Far-red-induction_P Parameter: Age (day) Value: 7
  misc_feature: MA Experiment 20001248 PARAMETER Experiment Name: At_Far-red-induction_P Parameter: Light Value: Far-red vs. White
  misc_feature: MA Experiment 20001248 PARAMETER Experiment Name: At_Far-red-induction_P Parameter: Organism Value: A. thaliana
  misc_feature: MA Experiment 20001248 PARAMETER Experiment Name: At_Far-red-induction_P Parameter: Plant Line Value: Columbia
  misc_feature: MA Experiment 20001248 PARAMETER Experiment Name: At_Far-red-induction_P Parameter: Timepoint (hr) Value: 4
  misc_feature: MA Experiment 20001248 PARAMETER Experiment Name: At_Far-red-induction_P Parameter: Tissue Value: Whole Plant
  misc_feature: MA Experiment ID: 20001450 Result: Up-regulated in Transcription
  misc_feature: MA Experiment 20001450 PARAMETER Experiment Name: At_Far-red-induction_P Parameter: Age (day) Value: 7
  misc_feature: MA Experiment 20001450 PARAMETER Experiment Name: At_Far-red-induction_P Parameter: Light Value: Far-red vs. White
  misc_feature: MA Experiment 20001450 PARAMETER Experiment Name: At_Far-red-induction_P Parameter: Organism Value: A. thaliana
  misc_feature: MA Experiment 20001450 PARAMETER Experiment Name: At_Far-red-induction_P Parameter: Plant Line Value: Columbia
  misc_feature: MA Experiment 20001450 PARAMETER Experiment Name: At_Far-red-induction_P Parameter: Timepoint (hr) Value: 8
  misc_feature: MA Experiment 20001450 PARAMETER Experiment Name: At_Far-red-induction_P Parameter: Tissue Value: Whole Plant
  misc_feature: MA Experiment ID: 20001451 Result: Up-regulated in Transcription
  misc_feature: MA Experiment 20001451 PARAMETER Experiment Name: At_Far-red-induction_P Parameter: Age (day) Value: 7
  misc_feature: MA Experiment 20001451 PARAMETER Experiment Name: At_Far-red-induction_P Parameter: Light Value: Far-red vs. White
  misc_feature: MA Experiment 20001451 PARAMETER Experiment Name: At_Far-red-induction_P Parameter: Organism Value: A. thaliana
  misc_feature: MA Experiment 20001451 PARAMETER Experiment Name: At_Far-red-induction_P Parameter: Plant Line Value: Columbia
  misc_feature: MA Experiment 20001451 PARAMETER Experiment Name: At_Far-red-induction_P Parameter: Timepoint (hr) Value: 24
  misc_feature: MA Experiment 20001451 PARAMETER Experiment Name: At_Far-red-induction_P Parameter: Tissue Value: Whole Plant
catcgtaatatccactctccgtctctatctctatctctcattctctctcatccaacgctatgatcggagagaaagatctcgccggagatggagagtgttctcgaaccaaaacatcaaagcctcgattctctaatctaaacaaccaaactcatcaagacgacaaaaccggtcagtatcatcagaaaggcgtcgactttctcaacgtccggtccaacaatctcgatggtgggttttcttcaaaatcatcacccagatcaggaaacgagctcactcttagctatctctgtgaaaactccggtaaactcgctgaaagtcttggtcaaaaggggaaagaagtagtcaccttttctgagaattcaagctacgatgataaatgggtcgagagagatttcttcaatttgagagaaatgaatcctaattcttctaaacgtaaggctcacgaagaagaagaagaagctgaagaagaagaagataagaaaagtaacaaaatcgaaaccctaaatctctctttagctttacctgatgtatctctgtctttaacggcgtcaaacgccgtgaaaaggccgagagtggtgacgagcgagagaacaacgacgtcgttttcaaacgatttcacggcgacggcgccgtcgatgtcttactcttactctcatcctttctctcacaacattagctgctcgatgactcgaaactccacagatttcgattgctccgttggtaaagacgatcacatctggtgcgccggcgaaggaaccaacggatctgttcatagccgattcagaccaatcggtgacggcggcgtagcgctcgcgaacaatccagtttccggtaaaccttcaagctctgctgattactctttctttccctcggagttaccggctcggccggggaatgaagtcacgatctccggcgattcgaggaagaaagtagctaacttggaagataacgatgcggttagatcggagagggtgttatacgacatcgtttcgaaatcgatttcttctgtggctttgattattcaagggatggctgatgaaactctagaatcagctaaagagtatctaaggaacttgattgattcaccggagaagaaggagaagctggtgaatcttcagaaccagattgataaaaggtctgatcttagtaaggagacgttatcgaaatgtgttaaagatcagcttgatatcttggtagctgtaagaacagggcttaagtatttcctctctggtaagatcagaatccctatgaacgaattggtagagatctttctcttcttgagatgtaggaatgtgaattgtaagagtctcttgcctgttgatgattgtgaatgcaagatctgttccaacaacaaaggcttttgtagctcttgtatgtgtcctgtttgtttgagatttgattcagctagcaatacttgtagttgggttggttgtgatgtgtgttcgcattggtgtcatgctgcttgtgggattcagaagaatttgatcaaaccgggacatagtttgaaaggtcagagaggtactactgagatgatgtttcattgcattggatgtgctcataagtcagagatgtttggattcgttaaggatgtttttgtgtgttgcgctaagaattggggacttgagactttgatcaaggagcttgattgtgttagaaaggttttccgaggaagtgatgatgcaaaaggcaaagcattgcatcttaaagccaatgaaatggttaagaagctagagagtaaacagatttcccctcttgatgcttctaacttcatcattcagttcttcaactatgctgagtcaataccagaaattcccgacccaccgagagagctaaccgttgcagcggaaacgagctacagaaaagacgaggcatctgtgacgccttcaacatcaaaggatcaaaagaagaagagctttgcgttaacagatgcaatgatgaacagttttgatagtttagagagcatggtgagaatcaaggaggctgaaacaagaatgttccagaagaaagcagacgaggccagaatagaggcagagagtttcaagagaatgatagaaatgaagacggagaagatggaggaggagtacacagagaaactagcgcgtctgtgtctgcaggagacggaggagagaaggaggaataagctggaggagctcaagaagcttgagaattcgcactgcgattacaggaacatgaagctgagaatggaggctgagattgctggattgttgaagagaatggaagttacaagacaacaattggtatgaaggaatccgaaaaacagagcctttcaattatccatttctctgcactctgctccttgtttcgttttgtgggaaatacaaaattagtgataagtgttttatatgtttctctggaaattgtcttctaaatcttttttttaatctataacttccgtttttgattatatttataactatatatattttatatgattatataatacatgtattttgtataaagtaaatcatttgtactgccgt

SEQ ID NO: 45213 - protein, 733 aa, Arabidopsis thaliana
  peptide (1)..(733): Ceres Seq. ID no. 12560493
  misc_feature (285)..(733): Homolog of NCBI NO: 15238905 NR Description: putative protein; protein id: At5g48160.1
  misc_feature (285)..(717): Homolog of NCBI NO: 18398053 NR Description: expressed protein
  misc_feature (96)..(258): Homolog of NCBI NO: 15229445 NR Description: putative protein; protein id: At3g63500.1
  misc_feature (283)..(715): Homolog of NCBI NO: 15229445 NR Description: putative protein; protein id: At3g63500.1
  misc_feature (572)..(733): Homolog of NCBI NO: 25402780 NR Description: protein F10B6.14 [imported] - Arabidopsis
  misc_feature (96)..(258): Homolog of NCBI NO: 28973711 NR Description: unknown protein [Arabidopsis thaliana]
  misc_feature (283)..(715): Homolog of NCBI NO: 28973711 NR Description: unknown protein [Arabidopsis thaliana]
  misc_feature (96)..(258): Homolog of NCBI NO: 30695820 NR Description: expressed protein [Arabidopsis thaliana]
  misc_feature (283)..(715): Homolog of NCBI NO: 30695820 NR Description: expressed protein [Arabidopsis thaliana]
  misc_feature (1)..(700): Homolog of NCBI NO: 25402780 NR Description: protein F10B6.14 [imported] - Arabidopsis
MIGEKDLAGDGECSRTKTSKPRFSNLNNQTHQDDKTGQYHQKGVDFLNVRSNNLDGGFSSKSSPRSGNELTLSYLCENSGKLAESLGQKGKEVVTFSENSSYDDKWVERDFFNLREMNPNSSKRKAHEEEEEAEEEEDKKSNKIETLNLSLALPDVSLSLTASNAVKRPRVVTSERTTTSFSNDFTATAPSMSYSYSHPFSHNISCSMTRNSTDFDCSVGKDDHIWCAGEGTNGSVHSRFRPIGDGGVALANNPVSGKPSSSADYSFFPSELPARPGNEVTISGDSRKKVANLEDNDAVRSERVLYDIVSKSISSVALIIQGMADETLESAKEYLRNLIDSPEKKEKLVNLQNQIDKRSDLSKETLSKCVKDQLDILVAVRTGLKYFLSGKIRIPMNELVEIFLFLRCRNVNCKSLLPVDDCECKICSNNKGFCSSCMCPVCLRFDSASNTCSWVGCDVCSHWCHAACGIQKNLIKPGHSLKGQRGTTEMMFHCIGCAHKSEMFGFVKDVFVCCAKNWGLETLIKELDCVRKVFRGSDDAKGKALHLKANEMVKKLESKQISPLDASNFIIQFFNYAESIPEIPDPPRELTVAAETSYRKDEASVTPSTSKDQKKKSFALTDAMMNSFDSLESMVRIKEAETRMFQKKADEARIEAESFKRMIEMKTEKMEEEYTEKLARLCLQETEERRRNKLEELKKLENSHCDYRNMKLRMEAEIAGLLKRMEVTRQQLV

SEQ ID NO: 45214 - protein, 617 aa, Arabidopsis thaliana
  peptide (1)..(617): Ceres Seq. ID no. 12560494
  misc_feature (169)..(617): Homolog of NCBI NO: 15238905 NR Description: putative protein; protein id: At5g48160.1
  misc_feature (169)..(601): Homolog of NCBI NO: 18398053 NR Description: expressed protein
  misc_feature (1)..(142): Homolog of NCBI NO: 15229445 NR Description: putative protein; protein id: At3g63500.1
  misc_feature (167)..(599): Homolog of NCBI NO: 15229445 NR Description: putative protein; protein id: At3g63500.1
  misc_feature (456)..(617): Homolog of NCBI NO: 25402780 NR Description: protein F10B6.14 [imported] - Arabidopsis
  misc_feature (1)..(142): Homolog of NCBI NO: 28973711 NR Description: unknown protein [Arabidopsis thaliana]
  misc_feature (167)..(599): Homolog of NCBI NO: 28973711 NR Description: unknown protein [Arabidopsis thaliana]
  misc_feature (1)..(142): Homolog of NCBI NO: 30695820 NR Description: expressed protein [Arabidopsis thaliana]
  misc_feature (167)..(599): Homolog of NCBI NO: 30695820 NR Description: expressed protein [Arabidopsis thaliana]
  misc_feature (1)..(584): Homolog of NCBI NO: 25402780 NR Description: protein F10B6.14 [imported] - Arabidopsis
MNPNSSKRKAHEEEEEAEEEEDKKSNKIETLNLSLALPDVSLSLTASNAVKRPRVVTSERTTTSFSNDFTATAPSMSYSYSHPFSHNISCSMTRNSTDFDCSVGKDDHIWCAGEGTNGSVHSRFRPIGDGGVALANNPVSGKPSSSADYSFFPSELPARPGNEVTISGDSRKKVANLEDNDAVRSERVLYDIVSKSISSVALIIQGMADETLESAKEYLRNLIDSPEKKEKLVNLQNQIDKRSDLSKETLSKCVKDQLDILVAVRTGLKYFLSGKIRIPMNELVEIFLFLRCRNVNCKSLLPVDDCECKICSNNKGFCSSCMCPVCLRFDSASNTCSWVGCDVCSHWCHAACGIQKNLIKPGHSLKGQRGTTEMMFHCIGCAHKSEMFGFVKDVFVCCAKNWGLETLIKELDCVRKVFRGSDDAKGKALHLKANEMVKKLESKQISPLDASNFIIQFFNYAESIPEIPDPPRELTVAAETSYRKDEASVTPSTSKDQKKKSFALTDAMMNSFDSLESMVRIKEAETRMFQKKADEARIEAESFKRMIEMKTEKMEEEYTEKLARLCLQETEERRRNKLEELKKLENSHCDYRNMKLRMEAEIAGLLKRMEVTRQQLV

SEQ ID NO: 45215 - protein, 542 aa, Arabidopsis thaliana
  peptide (1)..(542): Ceres Seq. ID no. 12560495
  misc_feature (94)..(542): Homolog of NCBI NO: 15238905 NR Description: putative protein; protein id: At5g48160.1
  misc_feature (94)..(526): Homolog of NCBI NO: 18398053 NR Description: expressed protein
  misc_feature (1)..(67): Homolog of NCBI NO: 15229445 NR Description: putative protein; protein id: At3g63500.1
  misc_feature (92)..(524): Homolog of NCBI NO: 15229445 NR Description: putative protein; protein id: At3g63500.1
  misc_feature (381)..(542): Homolog of NCBI NO: 25402780 NR Description: protein F10B6.14 [imported] - Arabidopsis
  misc_feature (1)..(67): Homolog of NCBI NO: 28973711 NR Description: unknown protein [Arabidopsis thaliana]
  misc_feature (92)..(524): Homolog of NCBI NO: 28973711 NR Description: unknown protein [Arabidopsis thaliana]
  misc_feature (1)..(67): Homolog of NCBI NO: 30695820 NR Description: expressed protein [Arabidopsis thaliana]
  misc_feature (92)..(524): Homolog of NCBI NO: 30695820 NR Description: expressed protein [Arabidopsis thaliana]
  misc_feature (1)..(509): Homolog of NCBI NO: 25402780 NR Description: protein F10B6.14 [imported] - Arabidopsis
MSYSYSHPFSHNISCSMTRNSTDFDCSVGKDDHIWCAGEGTNGSVHSRFRPIGDGGVALANNPVSGKPSSSADYSFFPSELPARPGNEVTISGDSRKKVANLEDNDAVRSERVLYDIVSKSISSVALIIQGMADETLESAKEYLRNLIDSPEKKEKLVNLQNQIDKRSDLSKETLSKCVKDQLDILVAVRTGLKYFLSGKIRIPMNELVEIFLFLRCRNVNCKSLLPVDDCECKICSNNKGFCSSCMCPVCLRFDSASNTCSWVGCDVCSHWCHAACGIQKNLIKPGHSLKGQRGTTEMMFHCIGCAHKSEMFGFVKDVFVCCAKNWGLETLIKELDCVRKVFRGSDDAKGKALHLKANEMVKKLESKQISPLDASNFIIQFFNYAESIPEIPDPPRELTVAAETSYRKDEASVTPSTSKDQKKKSFALTDAMMNSFDSLESMVRIKEAETRMFQKKADEARIEAESFKRMIEMKTEKMEEEYTEKLARLCLQETEERRRNKLEELKKLENSHCDYRNMKLRMEAEIAGLLKRMEVTRQQLV

SEQ ID NO: 45216 - DNA, 2718 bp, Arabidopsis thaliana
  misc_feature (1)..(2718): Ceres Seq. ID no. 12560525
  misc_feature: MA Experiment ID: 20000180 Result: Up-regulated in Transcription
  misc_feature: MA Experiment 20000180 PARAMETER Experiment Name: At_Germinating_Seeds_P Parameter: Age (hr) Value: 24 vs. 0
  misc_feature: MA Experiment 20000180 PARAMETER Experiment Name: At_Germinating_Seeds_P Parameter: Tissue Value: Germinating Seeds
  misc_feature: MA Experiment ID: 20000182 Result: Up-regulated in Transcription
  misc_feature: MA Experiment 20000182 PARAMETER Experiment Name: At_2mM_SA_P Parameter: Age (day) Value: 14
  misc_feature: MA Experiment 20000182 PARAMETER Experiment Name: At_2mM_SA_P Parameter: Organism Value: A. thaliana
  misc_feature: MA Experiment 20000182 PARAMETER Experiment Name: At_2mM_SA_P Parameter: Plant Line Value: WS
  misc_feature: MA Experiment 20000182 PARAMETER Experiment Name: At_2mM_SA_P Parameter: Timepoint (hr) Value: 6
  misc_feature: MA Experiment 20000182 PARAMETER Experiment Name: At_2mM_SA_P Parameter: Tissue Value: Aerial
  misc_feature: MA Experiment 20000182 PARAMETER Experiment Name: At_2mM_SA_P Parameter: Treatment Value: 2mM SA vs. No Treatment
  misc_feature: MA Experiment ID: 20000184 Result: Up-regulated in Transcription
  misc_feature: MA Experiment 20000184 PARAMETER Experiment Name: At_Shoots__P Parameter: Age (day) Value: 7
  misc_feature: MA Experiment 20000184 PARAMETER Experiment Name: At_Shoots__P Parameter: Tissue Value: Shoots vs. Whole Plant
  misc_feature: MA Experiment ID: 20000185 Result: Up-regulated in Transcription
  misc_feature: MA Experiment 20000185 PARAMETER Experiment Name: At_Roots__P Parameter: Age (day) Value: 7 vs. 21
  misc_feature: MA Experiment 20000185 PARAMETER Experiment Name: At_Roots__P Parameter: Organism Value: A. thaliana
  misc_feature: MA Experiment 20000185 PARAMETER Experiment Name: At_Roots__P Parameter: Tissue Value: Roots vs. Whole Plant
  misc_feature: MA Experiment ID: 20000268 Result: Up-regulated in Transcription
  misc_feature: MA Experiment 20000268 PARAMETER Experiment Name: At_100mM_NaCl__P Parameter: Age (day) Value: 14
  misc_feature: MA Experiment 20000268 PARAMETER Experiment Name: At_100mM_NaCl__P Parameter: Organism Value: A. thaliana
  misc_feature: MA Experiment 20000268 PARAMETER Experiment Name: At_100mM_NaCl__P Parameter: Plant Line Value: WS
  misc_feature: MA Experiment 20000268 PARAMETER Experiment Name: At_100mM_NaCl__P Parameter: Timepoint (hr) Value: 6
  misc_feature: MA Experiment 20000268 PARAMETER Experiment Name: At_100mM_NaCl__P Parameter: Tissue Value: Whole Plant
  misc_feature: MA Experiment 20000268 PARAMETER Experiment Name: At_100mM_NaCl__P Parameter: Treatment Value: 100mM NaCl vs. No Treatment
  misc_feature: MA Experiment ID: 20000436 Result: Up-regulated in Transcription
  misc_feature: MA Experiment 20000436 PARAMETER Experiment Name: At_Drought_P Parameter: Age (day) Value: 7
  misc_feature: MA Experiment 20000436 PARAMETER Experiment Name: At_Drought_P Parameter: Organism Value: A. thaliana
  misc_feature: MA Experiment 20000436 PARAMETER Experiment Name: At_Drought_P Parameter: Plant Line Value: WS
  misc_feature: MA Experiment 20000436 PARAMETER Experiment Name: At_Drought_P Parameter: Timepoint (hr) Value: 12
  misc_feature: MA Experiment 20000436 PARAMETER Experiment Name: At_Drought_P Parameter: Tissue Value: Whole Plant
  misc_feature: MA Experiment 20000436 PARAMETER Experiment Name: At_Drought_P Parameter: Treatment Value: Drought vs. No Drought
  misc_feature: MA Experiment ID: 20000437 Result: Up-regulated in Transcription
  misc_feature: MA Experiment 20000437 PARAMETER Experiment Name: At_Drought_P Parameter: Age (day) Value: 8
  misc_feature: MA Experiment 20000437 PARAMETER Experiment Name: At_Drought_P Parameter: Organism Value: A. thaliana
  misc_feature: MA Experiment 20000437 PARAMETER Experiment Name: At_Drought_P Parameter: Plant Line Value: WS
  misc_feature: MA Experiment 20000437 PARAMETER Experiment Name: At_Drought_P Parameter: Timepoint (hr) Value: 24
  misc_feature: MA Experiment 20000437 PARAMETER Experiment Name: At_Drought_P Parameter: Tissue Value: Whole Plant
  misc_feature: MA Experiment 20000437 PARAMETER Experiment Name: At_Drought_P Parameter: Treatment Value: Drought vs. No Drought
  misc_feature: MA Experiment ID: 20000438 Result: Up-regulated in Transcription
  misc_feature: MA Experiment 20000438 PARAMETER Experiment Name: At_Shoots__P Parameter: Age (day) Value: 14
  misc_feature: MA Experiment 20000438 PARAMETER Experiment Name: At_Shoots__P Parameter: Tissue Value: Shoots vs. Whole Plant
  misc_feature: MA Experiment ID: 20000439 Result: Up-regulated in Transcription
  misc_feature: MA Experiment 20000439 PARAMETER Experiment Name: At_Roots__P Parameter: Age (day) Value: 14 vs. 21
  misc_feature: MA Experiment 20000439 PARAMETER Experiment Name: At_Roots__P Parameter: Organism Value: A. thaliana
  misc_feature: MA Experiment 20000439 PARAMETER Experiment Name: At_Roots__P Parameter: Tissue Value: Roots vs. Whole Plant
  misc_feature: MA Experiment ID: 20000495 Result: Down-regulated in Transcription
  misc_feature: MA Experiment 20000495 PARAMETER Experiment Name: At_Guard_Cells_P Parameter: Harvest Date Value: 8/2/2002
  misc_feature: MA Experiment 20000495 PARAMETER Experiment Name: At_Guard_Cells_P Parameter: Organism Value: A. thaliana
  misc_feature: MA Experiment 20000495 PARAMETER Experiment Name: At_Guard_Cells_P Parameter: Tissue Value: Guard Cells vs. Leaves
  misc_feature: MA Experiment ID: 20001248 Result: Down-regulated in Transcription
  misc_feature: MA Experiment 20001248 PARAMETER Experiment Name: At_Far-red-induction_P Parameter: Age (day) Value: 7
  misc_feature: MA Experiment 20001248 PARAMETER Experiment Name: At_Far-red-induction_P Parameter: Light Value: Far-red vs. White
  misc_feature: MA Experiment 20001248 PARAMETER Experiment Name: At_Far-red-induction_P Parameter: Organism Value: A. thaliana
  misc_feature: MA Experiment 20001248 PARAMETER Experiment Name: At_Far-red-induction_P Parameter: Plant Line Value: Columbia
  misc_feature: MA Experiment 20001248 PARAMETER Experiment Name: At_Far-red-induction_P Parameter: Timepoint (hr) Value: 4
  misc_feature: MA Experiment 20001248 PARAMETER Experiment Name: At_Far-red-induction_P Parameter: Tissue Value: Whole Plant
  misc_feature: MA Experiment ID: 20001554 Result: Up-regulated in Transcription
  misc_feature: MA Experiment 20001554 PARAMETER Experiment Name: At_Drought_Soil_Dry_P Parameter: Age (day) Value: 21
  misc_feature: MA Experiment 20001554 PARAMETER Experiment Name: At_Drought_Soil_Dry_P Parameter: Organism Value: A. thaliana
  misc_feature: MA Experiment 20001554 PARAMETER Experiment Name: At_Drought_Soil_Dry_P Parameter: Plant Line Value: WS
  misc_feature: MA Experiment 20001554 PARAMETER Experiment Name: At_Drought_Soil_Dry_P Parameter: Post Timepoint (hr) Value: None
  misc_feature: MA Experiment 20001554 PARAMETER Experiment Name: At_Drought_Soil_Dry_P Parameter: Post-Treatment Value: None
  misc_feature: MA Experiment 20001554 PARAMETER Experiment Name: At_Drought_Soil_Dry_P Parameter: Timepoint (day) Value: 7
  misc_feature: MA Experiment 20001554 PARAMETER Experiment Name: At_Drought_Soil_Dry_P Parameter: Treatment Value: Drought vs. No Drought
  misc_feature: MA Experiment ID: 20001560 Result: Down-regulated in Transcription
  misc_feature: MA Experiment 20001560 PARAMETER Experiment Name: At_Drought_Soil_Dry_P Parameter: Age (day) Value: 28
  misc_feature: MA Experiment 20001560 PARAMETER Experiment Name: At_Drought_Soil_Dry_P Parameter: Organism Value: A. thaliana
  misc_feature: MA Experiment 20001560 PARAMETER Experiment Name: At_Drought_Soil_Dry_P Parameter: Plant Line Value: WS
  misc_feature: MA Experiment 20001560 PARAMETER Experiment Name: At_Drought_Soil_Dry_P Parameter: Post Timepoint (hr) Value: None
  misc_feature: MA Experiment 20001560 PARAMETER Experiment Name: At_Drought_Soil_Dry_P Parameter: Post-Treatment Value: None
  misc_feature: MA Experiment 20001560 PARAMETER Experiment Name: At_Drought_Soil_Dry_P Parameter: Timepoint (day) Value: 14
  misc_feature: MA Experiment 20001560 PARAMETER Experiment Name: At_Drought_Soil_Dry_P Parameter: Treatment Value: Drought vs. No Drought
  misc_feature: MA Experiment ID: 20001904 Result: Up-regulated in Transcription
  misc_feature: MA Experiment 20001904 PARAMETER Experiment Name: At_Drought_Reproduction_P Parameter: Age (day) Value: 37
  misc_feature: MA Experiment 20001904 PARAMETER Experiment Name: At_Drought_Reproduction_P Parameter: Organism Value: A. thaliana
  misc_feature: MA Experiment 20001904 PARAMETER Experiment Name: At_Drought_Reproduction_P Parameter: Plant Line Value: WS
  misc_feature: MA Experiment 20001904 PARAMETER Experiment Name: At_Drought_Reproduction_P Parameter: Timepoint (day) Value: 7
  misc_feature: MA Experiment 20001904 PARAMETER Experiment Name: At_Drought_Reproduction_P Parameter: Tissue Value: Rosettes
  misc_feature: MA Experiment 20001904 PARAMETER Experiment Name: At_Drought_Reproduction_P Parameter: Treatment Value: Drought vs. No Drought
  misc_feature: MA Experiment ID: 20001906 Result: Up-regulated in Transcription
  misc_feature: MA Experiment 20001906 PARAMETER Experiment Name: At_Drought_Reproduction_P Parameter: Age (day) Value: 35
  misc_feature: MA Experiment 20001906 PARAMETER Experiment Name: At_Drought_Reproduction_P Parameter: Organism Value: A. thaliana
  misc_feature: MA Experiment 20001906 PARAMETER Experiment Name: At_Drought_Reproduction_P Parameter: Plant Line Value: WS
  misc_feature: MA Experiment 20001906 PARAMETER Experiment Name: At_Drought_Reproduction_P Parameter: Timepoint (day) Value: 5
  misc_feature: MA Experiment 20001906 PARAMETER Experiment Name: At_Drought_Reproduction_P Parameter: Tissue Value: Siliques
  misc_feature: MA Experiment 20001906 PARAMETER Experiment Name: At_Drought_Reproduction_P Parameter: Treatment Value: Drought vs. No Drought
  misc_feature: MA Experiment ID: 20001910 Result: Up-regulated in Transcription
  misc_feature: MA Experiment 20001910 PARAMETER Experiment Name: At_Drought_Reproduction_P Parameter: Age (day) Value: 37
  misc_feature: MA Experiment 20001910 PARAMETER Experiment Name: At_Drought_Reproduction_P Parameter: Organism Value: A. thaliana
  misc_feature: MA Experiment 20001910 PARAMETER Experiment Name: At_Drought_Reproduction_P Parameter: Plant Line Value: WS
  misc_feature: MA Experiment 20001910 PARAMETER Experiment Name: At_Drought_Reproduction_P Parameter: Timepoint (day) Value: 7
  misc_feature: MA Experiment 20001910 PARAMETER Experiment Name: At_Drought_Reproduction_P Parameter: Tissue Value: Flowers
  misc_feature: MA Experiment 20001910 PARAMETER Experiment Name: At_Drought_Reproduction_P Parameter: Treatment Value: Drought vs. No Drought
  misc_feature: MA Experiment ID: 20001911 Result: Up-regulated in Transcription
  misc_feature: MA Experiment 20001911 PARAMETER Experiment Name: At_Drought_Reproduction_P Parameter: Age (day) Value: 40
  misc_feature: MA Experiment 20001911 PARAMETER Experiment Name: At_Drought_Reproduction_P Parameter: Organism Value: A. thaliana
  misc_feature: MA Experiment 20001911 PARAMETER Experiment Name: At_Drought_Reproduction_P Parameter: Plant Line Value: WS
  misc_feature: MA Experiment 20001911 PARAMETER Experiment Name: At_Drought_Reproduction_P Parameter: Timepoint (day) Value: 10
  misc_feature: MA Experiment 20001911 PARAMETER Experiment Name: At_Drought_Reproduction_P Parameter: Tissue Value: Flowers
  misc_feature: MA Experiment 20001911 PARAMETER Experiment Name: At_Drought_Reproduction_P Parameter: Treatment Value: Drought vs. No Drought
aatccataatcttatcatataatcaaattcgggaaagtttttaagtttcataaactctataaattactctctaccatcttaacctaaaaaacattctcaatcctttgtccaaaatcttgcatatcggcaaaatggcttcgccgtgtttgaccaagtccgattccggtatcaatggcgttgactttaccgaaaaattccggttagaagattccactctcttagccaatggtcaagtcgtcttaaccgatgttccggttaacgttactctcacctcttcaccttacttagtcgacaaagacggtgtaccactcgacgtctctgccggttcattcatcgggtttaacctcgacggagagcccaaaagccaccacgtggcatccatcggaaaactcaagaacattcgtttcatgagcatattccgtttcaaggtttggtggactactcattgggtcggatcaaacggacgtgacatcgagaacgagactcaaatcatcattcttgatcaatccgggtcggattctggacccggatccgggtcgggtcgtccttatgttctcttgctacctcttcttgaaggctccttccgttcatcattccaatccggagaagacgatgacgtggcggtctgtgtcgaatccgggtcgaccgaagtaaccgggtcggagtttcgtcagattgtgtatgtccatgccggggatgacccgttcaagctcgtgaaagacgccatgaaagtgattagggttcatatgaatacgttcaagcttcttgaagagaaatcgccgccgggaattgtcgataaattcgggtggtgcacttgggatgctttttacttgacggtgaatcctgacggagttcataaaggtgttaagtgtctcgtcgacggtggttgtcctccgggattggttcttatcgacgacggttggcaatcgattggacatgattccgatggtattgatgtcgaagggatgaatattaccgtcgccggtgaacaaatgccttgcaggcttctgaagtttgaagagaaccacaaattcaaagactacgtttctccaaaagatcaaaacgacgtcggaatgaaagctttcgtcagagatctgaaagatgaattctccaccgttgattacatctacgtttggcacgcactttgcggttactggggaggtctccgtcctgaagctccggctctgccgccgtcgaccattatccggcccgagctctctccaggacttaaactaacaatggaagatctcgccgtcgataagatcatagagaccggaatcggatttgcctcgccggacttggcgaaagagttctacgaaggtcttcactctcatcttcaaaacgccggtattgacggcgttaaagttgatgtcatccacatattggagatgttatgccagaaatatggcgggagagttgacttggccaaagcttacttcaaggcgttaacgtcgtcagtgaataagcattttaacggtaacggcgttatcgccagcatggagcattgcaatgactttatgttccttggaactgaagccatctctcttggtcgtgtcggtgatgacttttggtgcacggatccatcaggcgatccaaacggtacgttttggctacaaggatgtcacatggtccactgtgcatacaacagtctctggatgggaaatttcattcagcctgattgggacatgtttcagtccacacatccttgtgctgagttccatgctgcttctcgggccatttccggtgggccgatttacatcagtgattgtgtgggcaagcatgattttgatctcttgaagcgtcttgttttgcccaacggttcgattttgaggtgtgagtactatgctctcccaactcgtgaccgtctctttgaggatcctcttcatgatggcaaaaccatgctcaagatttggaacttgaacaagtacactggagttattggagcattcaactgtcaaggaggaggatggtgcagagaaaccagacgtaaccaatgtttctctgaatgcgtcaacacgttaaccgccaccacaagccctaaagacgttgaatggaacagtggaagcagcccaatctccattgcaaacgttgaagagtttgctttgttcttgtctcaatccaagaagcttttgttgtctggactaaacgatgatcttgagctgactttggagcctttcaagtttgagctgatcactgtctctcctgttgtgaccattgagggtaattcagtccggtttgctccgattggactggttaacatgctaaacacaagcggtgcgatccggtctttggtgtataatgatgaatctgttgaggtcggagtttttggtgccggagagtttagggtttatgcatcgaaaaaacctgtgagctgcttaattgatggtgaagttgttgagtttggttatgaagactcaatggtgatggtgcaagtcccttggtctggtccagatggtttgtcttctattcagtatttgttttagagattttgaaggtccttatttgtttccttcttaactccgtaccgttcgttgagtttttgaaagaactccgagccgttttttatatggtttctgagagtaaacaatttatgttggtttttttttgtcaaacatttatgttggcttttttatttgaggattttctttttatcattggtagaatctttgtactgccatattttcgtatttattataaatgatctgttcttttcataat

SEQ ID NO: 45217 - protein, 783 aa, Arabidopsis thaliana
  peptide (1)..(783): Ceres Seq. ID no. 12560526
  misc_feature (296)..(783): Homolog of NCBI NO: 21038869 NR Description: putative stachyose synthase [Alonsoa meridionalis]
  misc_feature (22)..(304): Homolog of NCBI NO: 19571727 NR Description: stachyose synthase [Stachys affinis]
  misc_feature (306)..(783): Homolog of NCBI NO: 19571727 NR Description: stachyose synthase [Stachys affinis]
  misc_feature (22)..(783): Homolog of NCBI NO: 15235191 NR Description: glycosyl hydrolase family 36; protein id:
  misc_feature (15)..(304): Homolog of NCBI NO: 6634701 NR Description: galactinol-raffinose galactosyltransferase [Vigna
  misc_feature (314)..(783): Homolog of NCBI NO: 6634701 NR Description: galactinol-raffinose galactosyltransferase [Vigna
  misc_feature (414)..(783): Homolog of NCBI NO: 34896196 NR Description: putative raffinose synthase
  misc_feature (13)..(416): Homolog of NCBI NO: 34896196 NR Description: putative raffinose synthase
  misc_feature (1)..(783): Homolog of NCBI NO: 18181865 NR Description: raffinose synthase [Pisum sativum]
  misc_feature (9)..(783): Homolog of NCBI NO: 4106395 NR Description: raffinose synthase [Cucumis sativus]
MASPCLTKSDSGINGVDFTEKFRLEDSTLLANGQVVLTDVPVNVTLTSSPYLVDKDGVPLDVSAGSFIGFNLDGEPKSHHVASIGKLKNIRFMSIFRFKVWWTTHWVGSNGRDIENETQIIILDQSGSDSGPGSGSGRPYVLLLPLLEGSFRSSFQSGEDDDVAVCVESGSTEVTGSEFRQIVYVHAGDDPFKLVKDAMKVIRVHMNTFKLLEEKSPPGIVDKFGWCTWDAFYLTVNPDGVHKGVKCLVDGGCPPGLVLIDDGWQSIGHDSDGIDVEGMNITVAGEQMPCRLLKFEENHKFKDYVSPKDQNDVGMKAFVRDLKDEFSTVDYIYVWHALCGYWGGLRPEAPALPPSTIIRPELSPGLKLTMEDLAVDKIIETGIGFASPDLAKEFYEGLHSHLQNAGIDGVKVDVIHILEMLCQKYGGRVDLAKAYFKALTSSVNKHFNGNGVIASMEHCNDFMFLGTEAISLGRVGDDFWCTDPSGDPNGTFWLQGCHMVHCAYNSLWMGNFIQPDWDMFQSTHPCAEFHAASRAISGGPIYISDCVGKHDFDLLKRLVLPNGSILRCEYYALPTRDRLFEDPLHDGKTMLKIWNLNKYTGVIGAFNCQGGGWCRETRRNQCFSECVNTLTATTSPKDVEWNSGSSPISIANVEEFALFLSQSKKLLLSGLNDDLELTLEPFKFELITVSPVVTIEGNSVRFAPIGLVNMLNTSGAIRSLVYNDESVEVGVFGAGEFRVYASKKPVSCLIDGEVVEFGYEDSMVMVQVPWSGPDGLSSIQYLF

SEQ ID NO: 45218 - protein, 691 aa, Arabidopsis thaliana
  peptide (1)..(691): Ceres Seq. ID no. 12560527
  misc_feature (204)..(691): Homolog of NCBI NO: 21038869 NR Description: putative stachyose synthase [Alonsoa meridionalis]
  misc_feature (1)..(212): Homolog of NCBI NO: 19571727 NR Description: stachyose synthase [Stachys affinis]
  misc_feature (214)..(691): Homolog of NCBI NO: 19571727 NR Description: stachyose synthase [Stachys affinis]
  misc_feature (1)..(691): Homolog of NCBI NO: 15235191 NR Description: glycosyl hydrolase family 36; protein id:
  misc_feature (1)..(212): Homolog of NCBI NO: 6634701 NR Description: galactinol-raffinose galactosyltransferase [Vigna
  misc_feature (222)..(691): Homolog of NCBI NO: 6634701 NR Description: galactinol-raffinose galactosyltransferase [Vigna
  misc_feature (322)..(691): Homolog of NCBI NO: 34896196 NR Description: putative raffinose synthase
  misc_feature (1)..(324): Homolog of NCBI NO: 34896196 NR Description: putative raffinose synthase
  misc_feature (1)..(691): Homolog of NCBI NO: 18181865 NR Description: raffinose synthase [Pisum sativum]
  misc_feature (1)..(691): Homolog of NCBI NO: 4106395 NR Description: raffinose synthase [Cucumis sativus]
MSIFRFKVWWTTHWVGSNGRDIENETQIIILDQSGSDSGPGSGSGRPYVLLLPLLEGSFRSSFQSGEDDDVAVCVESGSTEVTGSEFRQIVYVHAGDDPFKLVKDAMKVIRVHMNTFKLLEEKSPPGIVDKFGWCTWDAFYLTVNPDGVHKGVKCLVDGGCPPGLVLIDDGWQSIGHDSDGIDVEGMNITVAGEQMPCRLLKFEENHKFKDYVSPKDQNDVGMKAFVRDLKDEFSTVDYIYVWHALCGYWGGLRPEAPALPPSTIIRPELSPGLKLTMEDLAVDKIIETGIGFASPDLAKEFYEGLHSHLQNAGIDGVKVDVIHILEMLCQKYGGRVDLAKAYFKALTSSVNKHFNGNGVIASMEHCNDFMFLGTEAISLGRVGDDFWCTDPSGDPNGTFWLQGCHMVHCAYNSLWMGNFIQPDWDMFQSTHPCAEFHAASRAISGGPIYISDCVGKHDFDLLKRLVLPNGSILRCEYYALPTRDRLFEDPLHDGKTMLKIWNLNKYTGVIGAFNCQGGGWCRETRRNQCFSECVNTLTATTSPKDVEWNSGSSPISIANVEEFALFLSQSKKLLLSGLNDDLELTLEPFKFELITVSPVVTIEGNSVRFAPIGLVNMLNTSGAIRSLVYNDESVEVGVFGAGEFRVYASKKPVSCLIDGEVVEFGYEDSMVMVQVPWSGPDGLSSIQYLF

SEQ ID NO: 45219 - protein, 585 aa, Arabidopsis thaliana
  peptide (1)..(585): Ceres Seq. ID no. 12560528
  misc_feature (98)..(585): Homolog of NCBI NO: 21038869 NR Description: putative stachyose synthase [Alonsoa meridionalis]
  misc_feature (1)..(106): Homolog of NCBI NO: 19571727 NR Description: stachyose synthase [Stachys affinis]
  misc_feature (108)..(585): Homolog of NCBI NO: 19571727 NR Description: stachyose synthase [Stachys affinis]
  misc_feature (1)..(585): Homolog of NCBI NO: 15235191 NR Description: glycosyl hydrolase family 36; protein id:
  misc_feature (1)..(106): Homolog of NCBI NO: 6634701 NR Description: galactinol-raffinose galactosyltransferase [Vigna
  misc_feature (116)..(585): Homolog of NCBI NO: 6634701 NR Description: galactinol-raffinose galactosyltransferase [Vigna
  misc_feature (216)..(585): Homolog of NCBI NO: 34896196 NR Description: putative raffinose synthase
  misc_feature (1)..(218): Homolog of NCBI NO: 34896196 NR Description: putative raffinose synthase
  misc_feature (1)..(585): Homolog of NCBI NO: 18181865 NR Description: raffinose synthase [Pisum sativum]
  misc_feature (1)..(585): Homolog of NCBI NO: 4106395 NR Description: raffinose synthase [Cucumis sativus]
MKVIRVHMNTFKLLEEKSPPGIVDKFGWCTWDAFYLTVNPDGVHKGVKCLVDGGCPPGLVLIDDGWQSIGHDSDGIDVEGMNITVAGEQMPCRLLKFEENHKFKDYVSPKDQNDVGMKAFVRDLKDEFSTVDYIYVWHALCGYWGGLRPEAPALPPSTIIRPELSPGLKLTMEDLAVDKIIETGIGFASPDLAKEFYEGLHSHLQNAGIDGVKVDVIHILEMLCQKYGGRVDLAKAYFKALTSSVNKHFNGNGVIASMEHCNDFMFLGTEAISLGRVGDDFWCTDPSGDPNGTFWLQGCHMVHCAYNSLWMGNFIQPDWDMFQSTHPCAEFHAASRAISGGPIYISDCVGKHDFDLLKRLVLPNGSILRCEYYALPTRDRLFEDPLHDGKTMLKIWNLNKYTGVIGAFNCQGGGWCRETRRNQCFSECVNTLTATTSPKDVEWNSGSSPISIANVEEFALFLSQSKKLLLSGLNDDLELTLEPFKFELITVSPVVTIEGNSVRFAPIGLVNMLNTSGAIRSLVYNDESVEVGVFGAGEFRVYASKKPVSCLIDGEVVEFGYEDSMVMVQVPWSGPDGLSSIQYLF

SEQ ID NO: 45220 - DNA, 2123 bp, Arabidopsis thaliana
  misc_feature (1)..(2123): Ceres Seq. ID no. 13575963
  misc_feature: MA Experiment ID: 20000171 Result: Down-regulated in Transcription
  misc_feature: MA Experiment 20000171 PARAMETER Experiment Name: At_42deg_Heat_P Parameter: Age (day) Value: 14
  misc_feature: MA Experiment 20000171 PARAMETER Experiment Name: At_42deg_Heat_P Parameter: Organism Value: A. thaliana
  misc_feature: MA Experiment 20000171 PARAMETER Experiment Name: At_42deg_Heat_P Parameter: Plant Line Value: WS
  misc_feature: MA Experiment 20000171 PARAMETER Experiment Name: At_42deg_Heat_P Parameter: Temperature (deg C) Value: 42 vs. 22
  misc_feature: MA Experiment 20000171 PARAMETER Experiment Name: At_42deg_Heat_P Parameter: Timepoint (hr) Value: 1
  misc_feature: MA Experiment 20000171 PARAMETER Experiment Name: At_42deg_Heat_P Parameter: Tissue Value: Aerial
  misc_feature: MA Experiment ID: 20000173 Result: Down-regulated in Transcription
  misc_feature: MA Experiment 20000173 PARAMETER Experiment Name: At_42deg_Heat_P Parameter: Age (day) Value: 14
  misc_feature: MA Experiment 20000173 PARAMETER Experiment Name: At_42deg_Heat_P Parameter: Organism Value: A. thaliana
  misc_feature: MA Experiment 20000173 PARAMETER Experiment Name: At_42deg_Heat_P Parameter: Plant Line Value: WS
  misc_feature: MA Experiment 20000173 PARAMETER Experiment Name: At_42deg_Heat_P Parameter: Temperature (deg C) Value: 42 vs. 22
  misc_feature: MA Experiment 20000173 PARAMETER Experiment Name: At_42deg_Heat_P Parameter: Timepoint (hr) Value: 6
  misc_feature: MA Experiment 20000173 PARAMETER Experiment Name: At_42deg_Heat_P Parameter: Tissue Value: Aerial
gaatttagatctggaaaacaaaaataacatatttggacagtgaagaaagaattttgatacactcatagaaaacccgaaaggagaaaagcaaaaaagccagatcacaatctcaaactcgcttcttcttcttcctcactctcttattaggttcagttccttttcgattcttcgtgtggatcgctgtcggtagatttccgatttctttaggttctgctcgaaatcgtggtttagtgtttattatcatcgattcagaaaacggtgggtaaacttgtagcggaagatgaggcggtggccggtggatcaccggcggcgaggtagaaggagattgtcgagttggatatggtttctccttggttctttctctgtcgctggtttagttctcttcatcgttcagcattatcaccatcaacaagatccatcccagcttttacttgagagagacacgagaaccgaaatggtatctcctccccatttaaacttcacggaagaggtcacaagtgcttcctccttctctaggcagttagcagagcaaatgacacttgccaaagcttatgtgtttatagctaaagagcataataatcttcatttagcttgggaattgagttctaagatcagaagttgtcagcttttgctttccaaagcagctatgagaggacaacctatttcgtttgatgaggctaaaccgattattactggtctatcagctcttatctacaaggctcaagatgcacattatgatattgccaccactatgatgaccatgaaatctcacatccaagcacttgaagagcgtgcaaatgcagctactgttcagaccacaatatttgggcaattggttgctgaggcattaccaaagagcctccactgtttgacgataaagctcacatctgattgggtaacagagccatctcgccatgaactggcagatgagaacagaaactcacctagacttgtcgacaacaacctctaccacttctgcatcttctcggacaacgtgattgccacctcggttgttgttaattcaactgtctcgaatgctgatcatccaaagcagcttgttttccacatagtgacgaatcgagtgagctacaaagctatgcaggcctggtttctaagtaatgacttcaagggctcagcaatagagatcaggagcgtagaggagttttcttggttgaatgcttcatattctcctgttgttaagcaactgctggacacagatgcaagagcttactatttcggggaacagacaagtcaagatacgatttccgagccaaaagtgaggaacccaaagtacttgtcattactgaaccatctcagattctacattccggagatctatccacagctagagaagattgttttcctagacgatgatgttgttgttcagaaagatttgactccactcttctccttggatctgcatggaaacgtcaatggagctgtggaaacatgtcttgaagcctttcaccgatattacaagtatctaaatttctcgaacccactcatcagctcaaagttcgacccacaagcatgtggatgggcttttggtatgaacgtttttgatctgatcgcttggaggaatgcaaacgtgactgctcggtaccattactggcaagatcagaacagagaacgaacgctttggaaactcgggacactccctccaggtctactatctttctatggtctcacagagccactggacagaagatggcatgtcttgggtttaggttacgatgtgaacatcgataaccgtctgatcgaaacagcagctgtgattcactataatggtaacatgaagccttggctaaagctggctattggtaggtataaacctttctggttaaagtttttgaactcgagccatccttatttacaagattgtgtcacagcttaaagcaaaagacgttgagagttgaggctaatcaatatcagaagattcttgatttcttatacactttgaagattcttttttttttggaatattgtagatcaaattcagatttccttctgaagactgttttttgttttttttgggtcggaagagaaaacttataatcacacacacattagaggttgaatatattacttacagggataattggtgacctctgttctacgttttt

SEQ ID NO: 45221 - protein, 537 aa, Arabidopsis thaliana
  peptide (1)..(537): Ceres Seq. ID no. 13575964
  misc_feature (70)..(534): Homolog of NCBI NO: 15233046 NR Description: glycosyltransferase family 8 [Arabidopsis
  misc_feature (79)..(534): Homolog of NCBI NO: 18422837 NR Description: glycosyltransferase family 8 [Arabidopsis
  misc_feature (79)..(534): Homolog of NCBI NO: 10177914 NR Description: emb|CAB71043.1~gene_id:MCA23.10~strong similarity
  misc_feature (70)..(534): Homolog of NCBI NO: 7271113 NR Description: 68 kDa protein [Cicer arietinum]
  misc_feature (59)..(325): Homolog of NCBI NO: 25518488 NR Description: hypothetical protein F25I16.8 - Arabidopsis
  misc_feature (2)..(536): Homolog of NCBI NO: 32492171 NR Description: OSJNBb0034I13.1 [Oryza sativa (japonica
  misc_feature (65)..(518): Homolog of NCBI NO: 25411994 NR Description: hypothetical protein At2g20810 [imported] -
  misc_feature (1)..(534): Homolog of NCBI NO: 18399484 NR Description: glycosyltransferase family 8 [Arabidopsis
  misc_feature (1)..(325): Homolog of NCBI NO: 18394628 NR Description: glycosyltransferase family 8 [Arabidopsis
  misc_feature (1)..(537): Homolog of NCBI NO: 15293067 NR Description: unknown protein [Arabidopsis thaliana]
  misc_feature (70)..(534): Homolog of NCBI NO: 15233046 NR Description: glycosyltransferase family 8 [Arabidopsis
  misc_feature (79)..(534): Homolog of NCBI NO: 18422837 NR Description: glycosyltransferase family 8 [Arabidopsis
  misc_feature (79)..(534): Homolog of NCBI NO: 10177914 NR Description: emb|CAB71043.1~gene_id:MCA23.10~strong similarity
  misc_feature (70)..(534): Homolog of NCBI NO: 7271113 NR Description: 68 kDa protein [Cicer arietinum]
  misc_feature (59)..(325): Homolog of NCBI NO: 25518488 NR Description: hypothetical protein F25I16.8 - Arabidopsis
  misc_feature (2)..(536): Homolog of NCBI NO: 32492171 NR Description: OSJNBb0034I13.1 [Oryza sativa (japonica
  misc_feature (65)..(518): Homolog of NCBI NO: 25411994 NR Description: hypothetical protein At2g20810 [imported] -
  misc_feature (1)..(534): Homolog of NCBI NO: 18399484 NR Description: glycosyltransferase family 8 [Arabidopsis
  misc_feature (1)..(325): Homolog of NCBI NO: 18394628 NR Description: glycosyltransferase family 8 [Arabidopsis
  misc_feature (1)..(537): Homolog of NCBI NO: 15293067 NR Description: unknown protein [Arabidopsis thaliana]
MRRWPVDHRRRGRRRLSSWIWFLLGSFSVAGLVLFIVQHYHHQQDPSQLLLERDTRTEMVSPPHLNFTEEVTSASSFSRQLAEQMTLAKAYVFIAKEHNNLHLAWELSSKIRSCQLLLSKAAMRGQPISFDEAKPIITGLSALIYKAQDAHYDIATTMMTMKSHIQALEERANAATVQTTIFGQLVAEALPKSLHCLTIKLTSDWVTEPSRHELADENRNSPRLVDNNLYHFCIFSDNVIATSVVVNSTVSNADHPKQLVFHIVTNRVSYKAMQAWFLSNDFKGSAIEIRSVEEFSWLNASYSPVVKQLLDTDARAYYFGEQTSQDTISEPKVRNPKYLSLLNHLRFYIPEIYPQLEKIVFLDDDVVVQKDLTPLFSLDLHGNVNGAVETCLEAFHRYYKYLNFSNPLISSKFDPQACGWAFGMNVFDLIAWRNANVTARYHYWQDQNRERTLWKLGTLPPGLLSFYGLTEPLDRRWHVLGLGYDVNIDNRLIETAAVIHYNGNMKPWLKLAIGRYKPFWLKFLNSSHPYLQDCVTA

SEQ ID NO: 45222 - protein, 479 aa, Arabidopsis thaliana
  peptide (1)..(479): Ceres Seq. ID no. 13575965
  misc_feature (12)..(476): Homolog of NCBI NO: 15233046 NR Description: glycosyltransferase family 8 [Arabidopsis
  misc_feature (21)..(476): Homolog of NCBI NO: 18422837 NR Description: glycosyltransferase family 8 [Arabidopsis
  misc_feature (21)..(476): Homolog of NCBI NO: 10177914 NR Description: emb|CAB71043.1~gene_id:MCA23.10~strong similarity
  misc_feature (12)..(476): Homolog of NCBI NO: 7271113 NR Description: 68 kDa protein [Cicer arietinum]
  misc_feature (1)..(267): Homolog of NCBI NO: 25518488 NR Description: hypothetical protein F25I16.8 - Arabidopsis
  misc_feature (1)..(478): Homolog of NCBI NO: 32492171 NR Description: OSJNBb0034I13.1 [Oryza sativa (japonica
  misc_feature (7)..(460): Homolog of NCBI NO: 25411994 NR Description: hypothetical protein At2g20810 [imported] -
  misc_feature (1)..(476): Homolog of NCBI NO: 18399484 NR Description: glycosyltransferase family 8 [Arabidopsis
  misc_feature (1)..(267): Homolog of NCBI NO: 18394628 NR Description: glycosyltransferase family 8 [Arabidopsis
  misc_feature (1)..(479): Homolog of NCBI NO: 15293067 NR Description: unknown protein [Arabidopsis thaliana]
  misc_feature (12)..(476): Homolog of NCBI NO: 15233046 NR Description: glycosyltransferase family 8 [Arabidopsis
  misc_feature (21)..(476): Homolog of NCBI NO: 18422837 NR Description: glycosyltransferase family 8 [Arabidopsis
  misc_feature (21)..(476): Homolog of NCBI NO: 10177914 NR Description: emb|CAB71043.1~gene_id:MCA23.10~strong similarity
  misc_feature (12)..(476): Homolog of NCBI NO: 7271113 NR Description: 68 kDa protein [Cicer arietinum]
  misc_feature (1)..(267): Homolog of NCBI NO: 25518488 NR Description: hypothetical protein F25I16.8 - Arabidopsis
  misc_feature (1)..(478): Homolog of NCBI NO: 32492171 NR Description: OSJNBb0034I13.1 [Oryza sativa (japonica
  misc_feature (7)..(460): Homolog of NCBI NO: 25411994 NR Description: hypothetical protein At2g20810 [imported] -
  misc_feature (1)..(476): Homolog of NCBI NO: 18399484 NR Description: glycosyltransferase family 8 [Arabidopsis
  misc_feature (1)..(267): Homolog of NCBI NO: 18394628 NR Description: glycosyltransferase family 8 [Arabidopsis
  misc_feature (1)..(479): Homolog of NCBI NO: 15293067 NR Description: unknown protein [Arabidopsis thaliana]
MVSPPHLNFTEEVTSASSFSRQLAEQMTLAKAYVFIAKEHNNLHLAWELSSKIRSCQLLLSKAAMRGQPISFDEAKPIITGLSALIYKAQDAHYDIATTMMTMKSHIQALEERANAATVQTTIFGQLVAEALPKSLHCLTIKLTSDWVTEPSRHELADENRNSPRLVDNNLYHFCIFSDNVIATSVVVNSTVSNADHPKQLVFHIVTNRVSYKAMQAWFLSNDFKGSAIEIRSVEEFSWLNASYSPVVKQLLDTDARAYYFGEQTSQDTISEPKVRNPKYLSLLNHLRFYIPEIYPQLEKIVFLDDDVVVQKDLTPLFSLDLHGNVNGAVETCLEAFHRYYKYLNFSNPLISSKFDPQACGWAFGMNVFDLIAWRNANVTARYHYWQDQNRERTLWKLGTLPPGLLSFYGLTEPLDRRWHVLGLGYDVNIDNRLIETAAVIHYNGNMKPWLKLAIGRYKPFWLKFLNSSHPYLQDCVTA

SEQ ID NO: 45223 - protein, 453 aa, Arabidopsis thaliana
  peptide (1)..(453): Ceres Seq. ID no. 13575966
  misc_feature (1)..(450): Homolog of NCBI NO: 15233046 NR Description: glycosyltransferase family 8 [Arabidopsis
  misc_feature (1)..(450): Homolog of NCBI NO: 18422837 NR Description: glycosyltransferase family 8 [Arabidopsis
  misc_feature (1)..(450): Homolog of NCBI NO: 10177914 NR Description: emb|CAB71043.1~gene_id:MCA23.10~strong similarity
  misc_feature (1)..(450): Homolog of NCBI NO: 7271113 NR Description: 68 kDa protein [Cicer arietinum]
  misc_feature (1)..(241): Homolog of NCBI NO: 25518488 NR Description: hypothetical protein F25I16.8 - Arabidopsis
  misc_feature (1)..(452): Homolog of NCBI NO: 32492171 NR Description: OSJNBb0034I13.1 [Oryza sativa (japonica
  misc_feature (1)..(434): Homolog of NCBI NO: 25411994 NR Description: hypothetical protein At2g20810 [imported] -
  misc_feature (1)..(450): Homolog of NCBI NO: 18399484 NR Description: glycosyltransferase family 8 [Arabidopsis
  misc_feature (1)..(241): Homolog of NCBI NO: 18394628 NR Description: glycosyltransferase family 8 [Arabidopsis
  misc_feature (1)..(453): Homolog of NCBI NO: 15293067 NR Description: unknown protein [Arabidopsis thaliana]
  misc_feature (1)..(450): Homolog of NCBI NO: 15233046 NR Description: glycosyltransferase family 8 [Arabidopsis
  misc_feature (1)..(450): Homolog of NCBI NO: 18422837 NR Description: glycosyltransferase family 8 [Arabidopsis
  misc_feature (1)..(450): Homolog of NCBI NO: 10177914 NR Description: emb|CAB71043.1~gene_id:MCA23.10~strong similarity
  misc_feature (1)..(450): Homolog of NCBI NO: 7271113 NR Description: 68 kDa protein [Cicer arietinum]
  misc_feature (1)..(241): Homolog of NCBI NO: 25518488 NR Description: hypothetical protein F25I16.8 - Arabidopsis
  misc_feature (1)..(452): Homolog of NCBI NO: 32492171 NR Description: OSJNBb0034I13.1 [Oryza sativa (japonica
  misc_feature (1)..(434): Homolog of NCBI NO: 25411994 NR Description: hypothetical protein At2g20810 [imported] -
  misc_feature (1)..(450): Homolog of NCBI NO: 18399484 NR Description: glycosyltransferase family 8 [Arabidopsis
  misc_feature (1)..(241): Homolog of NCBI NO: 18394628 NR Description: glycosyltransferase family 8 [Arabidopsis
  misc_feature (1)..(453): Homolog of NCBI NO: 15293067 NR Description: unknown protein [Arabidopsis thaliana]
MTLAKAYVFIAKEHNNLHLAWELSSKIRSCQLLLSKAAMRGQPISFDEAKPIITGLSALIYKAQDAHYDIATTMMTMKSHIQALEERANAATVQTTIFGQLVAEALPKSLHCLTIKLTSDWVTEPSRHELADENRNSPRLVDNNLYHFCIFSDNVIATSVVVNSTVSNADHPKQLVFHIVTNRVSYKAMQAWFLSNDFKGSAIEIRSVEEFSWLNASYSPVVKQLLDTDARAYYFGEQTSQDTISEPKVRNPKYLSLLNHLRFYIPEIYPQLEKIVFLDDDVVVQKDLTPLFSLDLHGNVNGAVETCLEAFHRYYKYLNFSNPLISSKFDPQACGWAFGMNVFDLIAWRNANVTARYHYWQDQNRERTLWKLGTLPPGLLSFYGLTEPLDRRWHVLGLGYDVNIDNRLIETAAVIHYNGNMKPWLKLAIGRYKPFWLKFLNSSHPYLQDCVTA

SEQ ID NO: 45224 - DNA, 2809 bp, Arabidopsis thaliana; identical to SEQ ID NO: 44960
  misc_feature (1)..(2809): Ceres Seq. ID no. 12559536
  misc_feature: MA Experiment ID: 108434 Result: Down-regulated in Transcription
  misc_feature: MA Experiment 108434 PARAMETER Experiment Name: At_Root_Tips_cDNA_P Parameter: Tissue Value: Root Tips
  misc_feature: MA Experiment ID: 108463 Result: Up-regulated in Transcription
  misc_feature: MA Experiment 108463 PARAMETER Experiment Name: At_Germinating_Seeds_cDNA_P Parameter: Age (day) Value: 3 vs. 0
  misc_feature: MA Experiment 108463 PARAMETER Experiment Name: At_Germinating_Seeds_cDNA_P Parameter: Tissue Value: Germinating Seeds
  misc_feature: MA Experiment ID: 108473 Result: Down-regulated in Transcription
  misc_feature: MA Experiment 108473 PARAMETER Experiment Name: At_Drought_Flowers_cDNA_P Parameter: Timepoint (hr) Value: 7 d
  misc_feature: MA Experiment 108473 PARAMETER Experiment Name: At_Drought_Flowers_cDNA_P Parameter: Tissue Value: Flower
  misc_feature: MA Experiment 108473 PARAMETER Experiment Name: At_Drought_Flowers_cDNA_P Parameter: Treatment Value: Drought vs. No Drought
  misc_feature: MA Experiment ID: 108488 Result: Up-regulated in Transcription
  misc_feature: MA Experiment ID: 108489 Result: Down-regulated in Transcription
  misc_feature: MA Experiment ID: 108574 Result: Up-regulated in Transcription
  misc_feature: MA Experiment 108574 PARAMETER Experiment Name: At_Wounding__cDNA_P Parameter: Timepoint (hr) Value: 1
  misc_feature: MA Experiment 108574 PARAMETER Experiment Name: At_Wounding__cDNA_P Parameter: Tissue Value: Aerial
  misc_feature: MA Experiment 108574 PARAMETER Experiment Name: At_Wounding__cDNA_P Parameter: Treatment Value: Wounding vs. No Wounding
  misc_feature: MA Experiment ID: 108579 Result: Up-regulated in Transcription
  misc_feature: MA Experiment 108579 PARAMETER Experiment Name: At_4deg_Cold_cDNA_P Parameter: Temperature (deg C) Value: 4 vs. 22
  misc_feature: MA Experiment 108579 PARAMETER Experiment Name: At_4deg_Cold_cDNA_P Parameter: Timepoint (hr) Value: 6
  misc_feature: MA Experiment 108579 PARAMETER Experiment Name: At_4deg_Cold_cDNA_P Parameter: Tissue Value: Aerial
  misc_feature: MA Experiment ID: 108585 Result: Down-regulated in Transcription
  misc_feature: MA Experiment 108585 PARAMETER Experiment Name: At_5mM_NaNP_cDNA_P Parameter: Timepoint (hr) Value: 6
  misc_feature: MA Experiment 108585 PARAMETER Experiment Name: At_5mM_NaNP_cDNA_P Parameter: Tissue Value: Aerial
  misc_feature: MA Experiment 108585 PARAMETER Experiment Name: At_5mM_NaNP_cDNA_P Parameter: Treatment Value: null
  misc_feature: MA Experiment ID: 108607 Result: Up-regulated in Transcription
  misc_feature: MA Experiment 108607 PARAMETER Experiment Name: At_100uM_ABA_cDNA_P Parameter: Timepoint (hr) Value: 4
  misc_feature: MA Experiment 108607 PARAMETER Experiment Name: At_100uM_ABA_cDNA_P Parameter: Tissue Value: Aerial
  misc_feature: MA Experiment 108607 PARAMETER Experiment Name: At_100uM_ABA_cDNA_P Parameter: Treatment Value: 100uM ABA vs. No Treatment
  misc_feature: MA Experiment ID: 20000069 Result: Up-regulated in Transcription
  misc_feature: MA Experiment 20000069 PARAMETER Experiment Name: At_100uM_ABA_Mutants_cDNA_P Parameter: Plant Line Value: CS23
  misc_feature: MA Experiment 20000069 PARAMETER Experiment Name: At_100uM_ABA_Mutants_cDNA_P Parameter: Timepoint (hr) Value: 6
  misc_feature: MA Experiment 20000069 PARAMETER Experiment Name: At_100uM_ABA_Mutants_cDNA_P Parameter: Tissue Value: Aerial
  misc_feature: MA Experiment 20000069 PARAMETER Experiment Name: At_100uM_ABA_Mutants_cDNA_P Parameter: Treatment Value: 100uM ABA vs. No Treatment
  misc_feature: MA Experiment ID: 20000070 Result: Up-regulated in Transcription
  misc_feature: MA Experiment 20000070 PARAMETER Experiment Name: At_100uM_ABA_Mutants_cDNA_P Parameter: Plant Line Value: CS24
  misc_feature: MA Experiment 20000070 PARAMETER Experiment Name: At_100uM_ABA_Mutants_cDNA_P Parameter: Timepoint (hr) Value: 6
  misc_feature: MA Experiment 20000070 PARAMETER Experiment Name: At_100uM_ABA_Mutants_cDNA_P Parameter: Tissue Value: Aerial
  misc_feature: MA Experiment 20000070 PARAMETER Experiment Name: At_100uM_ABA_Mutants_cDNA_P Parameter: Treatment Value: 100uM ABA vs. No Treatment
  misc_feature: MA Experiment ID: 20000086 Result: Up-regulated in Transcription
  misc_feature: MA Experiment 20000086 PARAMETER Experiment Name: At_100uM_ABA_Mutants_cDNA_P Parameter: Plant Line Value: CS22
  misc_feature: MA Experiment 20000086 PARAMETER Experiment Name: At_100uM_ABA_Mutants_cDNA_P Parameter: Timepoint (hr) Value: 6
  misc_feature: MA Experiment 20000086 PARAMETER Experiment Name: At_100uM_ABA_Mutants_cDNA_P Parameter: Tissue Value: Aerial
  misc_feature: MA Experiment 20000086 PARAMETER Experiment Name: At_100uM_ABA_Mutants_cDNA_P Parameter: Treatment Value: 100uM ABA vs. No Treatment
  misc_feature: MA Experiment ID: 20000088 Result: Up-regulated in Transcription
  misc_feature: MA Experiment 20000088 PARAMETER Experiment Name: At_100uM_ABA_Mutants_cDNA_P Parameter: Plant Line Value: Landsberg
  misc_feature: MA Experiment 20000088 PARAMETER Experiment Name: At_100uM_ABA_Mutants_cDNA_P Parameter: Timepoint (hr) Value: 6
  misc_feature: MA Experiment 20000088 PARAMETER Experiment Name: At_100uM_ABA_Mutants_cDNA_P Parameter: Tissue Value: Aerial
  misc_feature: MA Experiment 20000088 PARAMETER Experiment Name: At_100uM_ABA_Mutants_cDNA_P Parameter: Treatment Value: 100uM ABA vs. No Treatment
  misc_feature: MA Experiment ID: 20000111 Result: Down-regulated in Transcription
  misc_feature: MA Experiment 20000111 PARAMETER Experiment Name: At_42deg_Heat_cDNA_P Parameter: Temperature (deg C) Value: 42 vs. 22
  misc_feature: MA Experiment 20000111 PARAMETER Experiment Name: At_42deg_Heat_cDNA_P Parameter: Timepoint (hr) Value: 6
  misc_feature: MA Experiment 20000111 PARAMETER Experiment Name: At_42deg_Heat_cDNA_P Parameter: Tissue Value: Aerial
  misc_feature: MA Experiment ID: 20000112 Result: Down-regulated in Transcription
  misc_feature: MA Experiment 20000112 PARAMETER Experiment Name: At_42deg_Heat_cDNA_P Parameter: Temperature (deg C) Value: 42 vs. 22
  misc_feature: MA Experiment 20000112 PARAMETER Experiment Name: At_42deg_Heat_cDNA_P Parameter: Timepoint (hr) Value: 2
  misc_feature: MA Experiment 20000112 PARAMETER Experiment Name: At_42deg_Heat_cDNA_P Parameter: Tissue Value: Aerial
  misc_feature: MA Experiment ID: 20000113 Result: Down-regulated in Transcription
  misc_feature: MA Experiment 20000113 PARAMETER Experiment Name: At_42deg_Heat_cDNA_P Parameter: Temperature (deg C) Value: 42 vs. 22
  misc_feature: MA Experiment 20000113 PARAMETER Experiment Name: At_42deg_Heat_cDNA_P Parameter: Timepoint (hr) Value: 8
  misc_feature: MA Experiment 20000113 PARAMETER Experiment Name: At_42deg_Heat_cDNA_P Parameter: Tissue Value: Aerial
  misc_feature: MA Experiment ID: 20000173 Result: Down-regulated in Transcription
  misc_feature: MA Experiment 20000173 PARAMETER Experiment Name: At_42deg_Heat_P Parameter: Age (day) Value: 14
  misc_feature: MA Experiment 20000173 PARAMETER Experiment Name: At_42deg_Heat_P Parameter: Organism Value: A. thaliana
  misc_feature: MA Experiment 20000173 PARAMETER Experiment Name: At_42deg_Heat_P Parameter: Plant Line Value: WS
  misc_feature: MA Experiment 20000173 PARAMETER Experiment Name: At_42deg_Heat_P Parameter: Temperature (deg C) Value: 42 vs. 22
  misc_feature: MA Experiment 20000173 PARAMETER Experiment Name: At_42deg_Heat_P Parameter: Timepoint (hr) Value: 6
  misc_feature: MA Experiment 20000173 PARAMETER Experiment Name: At_42deg_Heat_P Parameter: Tissue Value: Aerial
  misc_feature: MA Experiment ID: 20000184 Result: Down-regulated in Transcription
  misc_feature: MA Experiment 20000184 PARAMETER Experiment Name: At_Shoots__P Parameter: Age (day) Value: 7
  misc_feature: MA Experiment 20000184 PARAMETER Experiment Name: At_Shoots__P Parameter: Tissue Value: Shoots vs. Whole Plant
  misc_feature: MA Experiment ID: 20000185 Result: Down-regulated in Transcription
  misc_feature: MA Experiment 20000185 PARAMETER Experiment Name: At_Roots__P Parameter: Age (day) Value: 7 vs. 21
  misc_feature: MA Experiment 20000185 PARAMETER Experiment Name: At_Roots__P Parameter: Organism Value: A. thaliana
  misc_feature: MA Experiment 20000185 PARAMETER Experiment Name: At_Roots__P Parameter: Tissue Value: Roots vs. Whole Plant
  misc_feature: MA Experiment ID: 20000211 Result: Up-regulated in Transcription
  misc_feature: MA Experiment 20000211 PARAMETER Experiment Name: At_0.001percent_MeJA__P Parameter: Age (day) Value: 14
  misc_feature: MA Experiment 20000211 PARAMETER Experiment Name: At_0.001percent_MeJA__P Parameter: Organism Value: A. thaliana
  misc_feature: MA Experiment 20000211 PARAMETER Experiment Name: At_0.001percent_MeJA__P Parameter: Plant Line Value: WS
  misc_feature: MA Experiment 20000211 PARAMETER Experiment Name: At_0.001percent_MeJA__P Parameter: Timepoint (hr) Value: 1
  misc_feature: MA Experiment 20000211 PARAMETER Experiment Name: At_0.001percent_MeJA__P Parameter: Tissue Value: Aerial
  misc_feature: MA Experiment 20000211 PARAMETER Experiment Name: At_0.001percent_MeJA__P Parameter: Treatment Value: 0.001percent MeJA vs. No Treatment
  misc_feature: MA Experiment ID: 20000213 Result: Up-regulated in Transcription
  misc_feature: MA Experiment 20000213 PARAMETER Experiment Name: At_4deg_Cold_P Parameter: Timepoint (hr) Value: 2
  misc_feature: MA Experiment ID: 20000224 Result: Up-regulated in Transcription
  misc_feature: MA Experiment ID: 20000286 Result: Up-regulated in Transcription
  misc_feature: MA Experiment 20000286 PARAMETER Experiment Name: At_Open_Flower_P Parameter: Age (day) Value: 21
  misc_feature: MA Experiment 20000286 PARAMETER Experiment Name: At_Open_Flower_P Parameter: Plant Line Value: WS
  misc_feature: MA Experiment 20000286 PARAMETER Experiment Name: At_Open_Flower_P Parameter: Tissue Value: Half Open vs. Whole Plant
  misc_feature: MA Experiment ID: 20000308 Result: Up-regulated in Transcription
  misc_feature: MA Experiment 20000308 PARAMETER Experiment Name: At_100mM_NaCl__P Parameter: Age (day) Value: 17
  misc_feature: MA Experiment 20000308 PARAMETER Experiment Name: At_100mM_NaCl__P Parameter: Organism Value: A. thaliana
  misc_feature: MA Experiment 20000308 PARAMETER Experiment Name: At_100mM_NaCl__P Parameter: Plant Line Value: WS
  misc_feature: MA Experiment 20000308 PARAMETER Experiment Name: At_100mM_NaCl__P Parameter: Timepoint (hr) Value: 72
  misc_feature: MA Experiment 20000308 PARAMETER Experiment Name: At_100mM_NaCl__P Parameter: Tissue Value: Whole Plant
  misc_feature: MA Experiment 20000308 PARAMETER Experiment Name: At_100mM_NaCl__P Parameter: Treatment Value: 100mM NaCl vs. No Treatment
  misc_feature: MA Experiment ID: 20000437 Result: Down-regulated in Transcription
  misc_feature: MA Experiment 20000437 PARAMETER Experiment Name: At_Drought_P Parameter: Age (day) Value: 8
  misc_feature: MA Experiment 20000437 PARAMETER Experiment Name: At_Drought_P Parameter: Organism Value: A. thaliana
  misc_feature: MA Experiment 20000437 PARAMETER Experiment Name: At_Drought_P Parameter: Plant Line Value: WS
  misc_feature: MA Experiment 20000437 PARAMETER Experiment Name: At_Drought_P Parameter: Timepoint (hr) Value: 24
  misc_feature: MA Experiment 20000437 PARAMETER Experiment Name: At_Drought_P Parameter: Tissue Value: Whole Plant
  misc_feature: MA Experiment 20000437 PARAMETER Experiment Name: At_Drought_P Parameter: Treatment Value: Drought vs. No Drought
  misc_feature: MA Experiment ID: 20000439 Result: Down-regulated in Transcription
  misc_feature: MA Experiment 20000439 PARAMETER Experiment Name: At_Roots__P Parameter: Age (day) Value: 14 vs. 21
  misc_feature: MA Experiment 20000439 PARAMETER Experiment Name: At_Roots__P Parameter: Organism Value: A. thaliana
  misc_feature: MA Experiment 20000439 PARAMETER Experiment Name: At_Roots__P Parameter: Tissue Value: Roots vs. Whole Plant
  misc_feature: MA Experiment ID: 20000452 Result: Up-regulated in Transcription
  misc_feature: MA Experiment 20000452 PARAMETER Experiment Name: At_CS6879_Shoots-Roots_P Parameter: Age (day) Value: 14
  misc_feature: MA Experiment 20000452 PARAMETER Experiment Name: At_CS6879_Shoots-Roots_P Parameter: Organism Value: A. thaliana
  misc_feature: MA Experiment 20000452 PARAMETER Experiment Name: At_CS6879_Shoots-Roots_P Parameter: Plant Line Value: CS6879 vs. WS
  misc_feature: MA Experiment 20000452 PARAMETER Experiment Name: At_CS6879_Shoots-Roots_P Parameter: Tissue Value: Shoots
  misc_feature: MA Experiment ID: 20000527 Result: Down-regulated in Transcription
  misc_feature: MA Experiment 20000527 PARAMETER Experiment Name: At_10percent_PEG_P Parameter: Age (day) Value: 20
  misc_feature: MA Experiment 20000527 PARAMETER Experiment Name: At_10percent_PEG_P Parameter: Organism Value: A. thaliana
  misc_feature: MA Experiment 20000527 PARAMETER Experiment Name: At_10percent_PEG_P Parameter: Plant Line Value: WS
  misc_feature: MA Experiment 20000527 PARAMETER Experiment Name: At_10percent_PEG_P Parameter: Timepoint (day) Value: 20
  misc_feature: MA Experiment 20000527 PARAMETER Experiment Name: At_10percent_PEG_P Parameter: Tissue Value: Whole Plant
  misc_feature: MA Experiment 20000527 PARAMETER Experiment Name: At_10percent_PEG_P Parameter: Treatment Value: 10percent PEG vs. No Treatment
  misc_feature: MA Experiment ID: 20000573 Result: Up-regulated in Transcription
  misc_feature: MA Experiment 20000573 PARAMETER Experiment Name: At_100uM_ABA_Mutants__P Parameter: Organism Value: A. thaliana
  misc_feature: MA Experiment 20000573 PARAMETER Experiment Name: At_100uM_ABA_Mutants__P Parameter: Plant Line Value: CS22 vs. Ler wt
  misc_feature: MA Experiment 20000573 PARAMETER Experiment Name: At_100uM_ABA_Mutants__P Parameter: Timepoint (hr) Value: N/A
  misc_feature: MA Experiment 20000573 PARAMETER Experiment Name: At_100uM_ABA_Mutants__P Parameter: Tissue Value: Whole Plant
  misc_feature: MA Experiment 20000573 PARAMETER Experiment Name: At_100uM_ABA_Mutants__P Parameter: Treatment Value: None
  misc_feature: MA Experiment ID: 20001247 Result: Down-regulated in Transcription
  misc_feature: MA Experiment 20001247 PARAMETER Experiment Name: At_Far-red-induction_P Parameter: Age (day) Value: 7
  misc_feature: MA Experiment 20001247 PARAMETER Experiment Name: At_Far-red-induction_P Parameter: Light Value: Far-red vs. White
  misc_feature: MA Experiment 20001247 PARAMETER Experiment Name: At_Far-red-induction_P Parameter: Organism Value: A. thaliana
  misc_feature: MA Experiment 20001247 PARAMETER Experiment Name: At_Far-red-induction_P Parameter: Plant Line Value: Columbia
  misc_feature: MA Experiment 20001247 PARAMETER Experiment Name: At_Far-red-induction_P Parameter: Timepoint (hr) Value: 1
  misc_feature: MA Experiment 20001247 PARAMETER Experiment Name: At_Far-red-induction_P Parameter: Tissue Value: Whole Plant
  misc_feature: MA Experiment ID: 20001248 Result: Down-regulated in Transcription
  misc_feature: MA Experiment 20001248 PARAMETER Experiment Name: At_Far-red-induction_P Parameter: Age (day) Value: 7
  misc_feature: MA Experiment 20001248 PARAMETER Experiment Name: At_Far-red-induction_P Parameter: Light Value: Far-red vs. White
  misc_feature: MA Experiment 20001248 PARAMETER Experiment Name: At_Far-red-induction_P Parameter: Organism Value: A. thaliana
  misc_feature: MA Experiment 20001248 PARAMETER Experiment Name: At_Far-red-induction_P Parameter: Plant Line Value: Columbia
  misc_feature: MA Experiment 20001248 PARAMETER Experiment Name: At_Far-red-induction_P Parameter: Timepoint (hr) Value: 4
  misc_feature: MA Experiment 20001248 PARAMETER Experiment Name: At_Far-red-induction_P Parameter: Tissue Value: Whole Plant
  misc_feature: MA Experiment ID: 20001450 Result: Down-regulated in Transcription
  misc_feature: MA Experiment 20001450 PARAMETER Experiment Name: At_Far-red-induction_P Parameter: Age (day) Value: 7
  misc_feature: MA Experiment 20001450 PARAMETER Experiment Name: At_Far-red-induction_P Parameter: Light Value: Far-red vs. White
  misc_feature: MA Experiment 20001450 PARAMETER Experiment Name: At_Far-red-induction_P Parameter: Organism Value: A. thaliana
  misc_feature: MA Experiment 20001450 PARAMETER Experiment Name: At_Far-red-induction_P Parameter: Plant Line Value: Columbia
  misc_feature: MA Experiment 20001450 PARAMETER Experiment Name: At_Far-red-induction_P Parameter: Timepoint (hr) Value: 8
  misc_feature: MA Experiment 20001450 PARAMETER Experiment Name: At_Far-red-induction_P Parameter: Tissue Value: Whole Plant
  misc_feature: MA Experiment ID: 20001451 Result: Down-regulated in Transcription
  misc_feature: MA Experiment 20001451 PARAMETER Experiment Name: At_Far-red-induction_P Parameter: Age (day) Value: 7
  misc_feature: MA Experiment 20001451 PARAMETER Experiment Name: At_Far-red-induction_P Parameter: Light Value: Far-red vs. White
  misc_feature: MA Experiment 20001451 PARAMETER Experiment Name: At_Far-red-induction_P Parameter: Organism Value: A. thaliana
  misc_feature: MA Experiment 20001451 PARAMETER Experiment Name: At_Far-red-induction_P Parameter: Plant Line Value: Columbia
  misc_feature: MA Experiment 20001451 PARAMETER Experiment Name: At_Far-red-induction_P Parameter: Timepoint (hr) Value: 24
  misc_feature: MA Experiment 20001451 PARAMETER Experiment Name: At_Far-red-induction_P Parameter: Tissue Value: Whole Plant
  misc_feature: MA Experiment ID: 20001555 Result: Down-regulated in Transcription
  misc_feature: MA Experiment 20001555 PARAMETER Experiment Name: At_Drought_Soil_Dry_P Parameter: Age (day) Value: 24
  misc_feature: MA Experiment 20001555 PARAMETER Experiment Name: At_Drought_Soil_Dry_P Parameter: Organism Value: A. thaliana
  misc_feature: MA Experiment 20001555 PARAMETER Experiment Name: At_Drought_Soil_Dry_P Parameter: Plant Line Value: WS
  misc_feature: MA Experiment 20001555 PARAMETER Experiment Name: At_Drought_Soil_Dry_P Parameter: Post Timepoint (hr) Value: None
  misc_feature: MA Experiment 20001555 PARAMETER Experiment Name: At_Drought_Soil_Dry_P Parameter: Post-Treatment Value: None
  misc_feature: MA Experiment 20001555 PARAMETER Experiment Name: At_Drought_Soil_Dry_P Parameter: Timepoint (day) Value: 10
  misc_feature: MA Experiment 20001555 PARAMETER Experiment Name: At_Drought_Soil_Dry_P Parameter: Treatment Value: Drought vs. No Drought
  misc_feature: MA Experiment ID: 20001558 Result: Down-regulated in Transcription
  misc_feature: MA Experiment 20001558 PARAMETER Experiment Name: At_Drought_Soil_Dry_P Parameter: Age (day) Value: 27
  misc_feature: MA Experiment 20001558 PARAMETER Experiment Name: At_Drought_Soil_Dry_P Parameter: Organism Value: A. thaliana
  misc_feature: MA Experiment 20001558 PARAMETER Experiment Name: At_Drought_Soil_Dry_P Parameter: Plant Line Value: WS
  misc_feature: MA Experiment 20001558 PARAMETER Experiment Name: At_Drought_Soil_Dry_P Parameter: Post Timepoint (hr) Value: 6
  misc_feature: MA Experiment 20001558 PARAMETER Experiment Name: At_Drought_Soil_Dry_P Parameter: Post-Treatment Value: Re-Water vs. No Drought
  misc_feature: MA Experiment 20001558 PARAMETER Experiment Name: At_Drought_Soil_Dry_P Parameter: Timepoint (day) Value: 13
  misc_feature: MA Experiment 20001558 PARAMETER Experiment Name: At_Drought_Soil_Dry_P Parameter: Treatment Value: Drought vs. No Drought
  misc_feature: MA Experiment ID: 20001757 Result: Up-regulated in Transcription
  misc_feature: MA Experiment 20001757 PARAMETER Experiment Name: At_50mM_NH4NO3_L-to-H_P Parameter: Timepoint (hr) Value: 6
  misc_feature: MA Experiment 20001757 PARAMETER Experiment Name: At_50mM_NH4NO3_L-to-H_P Parameter: Tissue Value: Leaf
  misc_feature: MA Experiment 20001757 PARAMETER Experiment Name: At_50mM_NH4NO3_L-to-H_P Parameter: Treatment Value: 50mM NH4NO3 vs 100mM Mannitol
  misc_feature: MA Experiment ID: 20001774 Result: Up-regulated in Transcription
  misc_feature: MA Experiment 20001774 PARAMETER Experiment Name: At_Far-red-enriched-adult_P Parameter: Age (day) Value: 31
  misc_feature: MA Experiment 20001774 PARAMETER Experiment Name: At_Far-red-enriched-adult_P Parameter: Light Value: Far-red enriched vs. White
  misc_feature: MA Experiment 20001774 PARAMETER Experiment Name: At_Far-red-enriched-adult_P Parameter: Organism Value: A. thaliana
  misc_feature: MA Experiment 20001774 PARAMETER Experiment Name: At_Far-red-enriched-adult_P Parameter: Plant Line Value: Columbia
  misc_feature: MA Experiment 20001774 PARAMETER Experiment Name: At_Far-red-enriched-adult_P Parameter: Timepoint (hr) Value: 72
  misc_feature: MA Experiment 20001774 PARAMETER Experiment Name: At_Far-red-enriched-adult_P Parameter: Tissue Value: Aerial
  misc_feature: MA Experiment ID: 20001911 Result: Down-regulated in Transcription
  misc_feature: MA Experiment 20001911 PARAMETER Experiment Name: At_Drought_Reproduction_P Parameter: Age (day) Value: 40
  misc_feature: MA Experiment 20001911 PARAMETER Experiment Name: At_Drought_Reproduction_P Parameter: Organism Value: A. thaliana
  misc_feature: MA Experiment 20001911 PARAMETER Experiment Name: At_Drought_Reproduction_P Parameter: Plant Line Value: WS
  misc_feature: MA Experiment 20001911 PARAMETER Experiment Name: At_Drought_Reproduction_P Parameter: Timepoint (day) Value: 10
  misc_feature: MA Experiment 20001911 PARAMETER Experiment Name: At_Drought_Reproduction_P Parameter: Tissue Value: Flowers
  misc_feature: MA Experiment 20001911 PARAMETER Experiment Name: At_Drought_Reproduction_P Parameter: Treatment Value: Drought vs. No Drought

SEQ ID NO: 45225 - protein, 904 aa, Arabidopsis thaliana; identical to SEQ ID NO: 44961
  peptide (1)..(904): Ceres Seq. ID no. 12559537
  misc_feature (114)..(205): Pfam Name: PLAT/LH2 domain Pfam Description: PLAT/LH2 domain
  misc_feature (114)..(205): Pfam Name: PLAT/LH2 domain Pfam Description: PLAT/LH2 domain
  misc_feature (114)..(205): Pfam Name: PLAT/LH2 domain Pfam Description: PLAT/LH2 domain
  misc_feature (75)..(903): Homolog of NCBI NO: 14589309 NR Description: lipoxygenase [Sesbania rostrata]
  misc_feature (145)..(359): Homolog of NCBI NO: 9714392 NR Description: lipoxygenase [Oryza sativa]
  misc_feature (311)..(904): Homolog of NCBI NO: 9714392 NR Description: lipoxygenase [Oryza sativa]
  misc_feature (119)..(904): Homolog of NCBI NO: 28411860 NR Description: putative lipoxygenase [Oryza sativa (japonica
  misc_feature (17)..(904): Homolog of NCBI NO: 34922538 NR Description: Lipoxygenase 2.3, chloroplast precursor
  misc_feature (75)..(903): Homolog of NCBI NO: 14589309 NR Description: lipoxygenase [Sesbania rostrata]
  misc_feature (311)..(904): Homolog of NCBI NO: 9714392 NR Description: lipoxygenase [Oryza sativa]
  misc_feature (17)..(904): Homolog of NCBI NO: 34922538 NR Description: Lipoxygenase 2.3, chloroplast precursor
  misc_feature (119)..(904): Homolog of NCBI NO: 28411860 NR Description: putative lipoxygenase [Oryza sativa (japonica
  misc_feature (311)..(904): Homolog of NCBI NO: 9714392 NR Description: lipoxygenase [Oryza sativa]
  misc_feature (145)..(359): Homolog of NCBI NO: 9714392 NR Description: lipoxygenase [Oryza sativa]
  misc_feature (75)..(903): Homolog of NCBI NO: 14589309 NR Description: lipoxygenase [Sesbania rostrata]
  misc_feature (24)..(904): Homolog of NCBI NO: 7433169 NR Description: probable lipoxygenase (EC 1.13.11.12) (clone H1)
  misc_feature (72)..(904): Homolog of NCBI NO: 7433168 NR Description: lipoxygenase (EC 1.13.11.12) loxC, chloroplast -
  misc_feature (125)..(904): Homolog of NCBI NO: 2826842 NR Description: loxc homologue [Lycopersicon pimpinellifolium]
  misc_feature (74)..(904): Homolog of NCBI NO: 7433160 NR Description: probable lipoxygenase (EC 1.13.11.12) CPRD46,
  misc_feature (103)..(904): Homolog of NCBI NO: 18461098 NR Description: lipoxygenase [Citrus jambhiri]
  misc_feature (24)..(904): Homolog of NCBI NO: 7433169 NR Description: probable lipoxygenase (EC 1.13.11.12) (clone H1)
  misc_feature (72)..(904): Homolog of NCBI NO: 7433168 NR Description: lipoxygenase (EC 1.13.11.12) loxC, chloroplast -
  misc_feature (125)..(904): Homolog of NCBI NO: 2826842 NR Description: loxc homologue [Lycopersicon pimpinellifolium]
  misc_feature (74)..(904): Homolog of NCBI NO: 7433160 NR Description: probable lipoxygenase (EC 1.13.11.12) CPRD46,
  misc_feature (103)..(904): Homolog of NCBI NO: 18461098 NR Description: lipoxygenase [Citrus jambhiri]
  misc_feature (17)..(904): Homolog of NCBI NO: 34922538 NR Description: Lipoxygenase 2.3, chloroplast precursor
  misc_feature (119)..(904): Homolog of NCBI NO: 28411860 NR Description: putative lipoxygenase [Oryza sativa (japonica
  misc_feature (145)..(359): Homolog of NCBI NO: 9714392 NR Description: lipoxygenase [Oryza sativa]
  misc_feature (103)..(904): Homolog of NCBI NO: 18461098 NR Description: lipoxygenase [Citrus jambhiri]
  misc_feature (74)..(904): Homolog of NCBI NO: 7433160 NR Description: probable lipoxygenase (EC 1.13.11.12) CPRD46,
  misc_feature (125)..(904): Homolog of NCBI NO: 2826842 NR Description: loxc homologue [Lycopersicon pimpinellifolium]
  misc_feature (72)..(904): Homolog of NCBI NO: 7433168 NR Description: lipoxygenase (EC 1.13.11.12) loxC, chloroplast -
  misc_feature (24)..(904): Homolog of NCBI NO: 7433169 NR Description: probable lipoxygenase (EC 1.13.11.12) (clone H1)

SEQ ID NO: 45226 - protein, 896 aa, Arabidopsis thaliana; identical to SEQ ID NO: 44962
  peptide (1)..(896): Ceres Seq. ID no. 12559538
  misc_feature (106)..(197): Pfam Name: PLAT/LH2 domain Pfam Description: PLAT/LH2 domain
  misc_feature (106)..(197): Pfam Name: PLAT/LH2 domain Pfam Description: PLAT/LH2 domain
  misc_feature (106)..(197): Pfam Name: PLAT/LH2 domain Pfam Description: PLAT/LH2 domain
  misc_feature (67)..(895): Homolog of NCBI NO: 14589309 NR Description: lipoxygenase [Sesbania rostrata]
  misc_feature (137)..(351): Homolog of NCBI NO: 9714392 NR Description: lipoxygenase [Oryza sativa]
  misc_feature (303)..(896): Homolog of NCBI NO: 9714392 NR Description: lipoxygenase [Oryza sativa]
  misc_feature (111)..(896): Homolog of NCBI NO: 28411860 NR Description: putative lipoxygenase [Oryza sativa (japonica
  misc_feature (9)..(896): Homolog of NCBI NO: 34922538 NR Description: Lipoxygenase 2.3, chloroplast precursor
  misc_feature (67)..(895): Homolog of NCBI NO: 14589309 NR Description: lipoxygenase [Sesbania rostrata]
  misc_feature (303)..(896): Homolog of NCBI NO: 9714392 NR Description: lipoxygenase [Oryza sativa]
  misc_feature (9)..(896): Homolog of NCBI NO: 34922538 NR Description: Lipoxygenase 2.3, chloroplast precursor
  misc_feature (111)..(896): Homolog of NCBI NO: 28411860 NR Description: putative lipoxygenase [Oryza sativa (japonica
  misc_feature (303)..(896): Homolog of NCBI NO: 9714392 NR Description: lipoxygenase [Oryza sativa]
  misc_feature (137)..(351): Homolog of NCBI NO: 9714392 NR Description: lipoxygenase [Oryza sativa]
  misc_feature (67)..(895): Homolog of NCBI NO: 14589309 NR Description: lipoxygenase [Sesbania rostrata]
  misc_feature (16)..(896): Homolog of NCBI NO: 7433169 NR Description: probable lipoxygenase (EC 1.13.11.12) (clone H1)
  misc_feature (64)..(896): Homolog of NCBI NO: 7433168 NR Description: lipoxygenase (EC 1.13.11.12) loxC, chloroplast -
  misc_feature (117)..(896): Homolog of NCBI NO: 2826842 NR Description: loxc homologue [Lycopersicon pimpinellifolium]
  misc_feature (66)..(896): Homolog of NCBI NO: 7433160 NR Description: probable lipoxygenase (EC 1.13.11.12) CPRD46,
  misc_feature (95)..(896): Homolog of NCBI NO: 18461098 NR Description: lipoxygenase [Citrus jambhiri]
  misc_feature (16)..(896): Homolog of NCBI NO: 7433169 NR Description: probable lipoxygenase (EC 1.13.11.12) (clone H1)
  misc_feature (64)..(896): Homolog of NCBI NO: 7433168 NR Description: lipoxygenase (EC 1.13.11.12) loxC, chloroplast -
  misc_feature (117)..(896): Homolog of NCBI NO: 2826842 NR Description: loxc homologue [Lycopersicon pimpinellifolium]
  misc_feature (66)..(896): Homolog of NCBI NO: 7433160 NR Description: probable lipoxygenase (EC 1.13.11.12) CPRD46,
  misc_feature (95)..(896): Homolog of NCBI NO: 18461098 NR Description: lipoxygenase [Citrus jambhiri]
  misc_feature (9)..(896): Homolog of NCBI NO: 34922538 NR Description: Lipoxygenase 2.3, chloroplast precursor
  misc_feature (111)..(896): Homolog of NCBI NO: 28411860 NR Description: putative lipoxygenase [Oryza sativa (japonica
  misc_feature (137)..(351): Homolog of NCBI NO: 9714392 NR Description: lipoxygenase [Oryza sativa]
  misc_feature (95)..(896): Homolog of NCBI NO: 18461098 NR Description: lipoxygenase [Citrus jambhiri]
  misc_feature (66)..(896): Homolog of NCBI NO: 7433160 NR Description: probable lipoxygenase (EC 1.13.11.12) CPRD46,
  misc_feature (117)..(896): Homolog of NCBI NO: 2826842 NR Description: loxc homologue [Lycopersicon pimpinellifolium]
  misc_feature (64)..(896): Homolog of NCBI NO: 7433168 NR Description: lipoxygenase (EC 1.13.11.12) loxC, chloroplast -
  misc_feature (16)..(896): Homolog of NCBI NO: 7433169 NR Description: probable lipoxygenase (EC 1.13.11.12) (clone H1)

SEQ ID NO: 45227 - protein, 754 aa, Arabidopsis thaliana; identical to SEQ ID NO: 44963
  peptide (1)..(754): Ceres Seq. ID no. 12559539
  misc_feature (1)..(55): Pfam Name: PLAT/LH2 domain Pfam Description: PLAT/LH2 domain
  misc_feature (1)..(55): Pfam Name: PLAT/LH2 domain Pfam Description: PLAT/LH2 domain
  misc_feature (1)..(55): Pfam Name: PLAT/LH2 domain Pfam Description: PLAT/LH2 domain
  misc_feature (1)..(753): Homolog of NCBI NO: 14589309 NR Description: lipoxygenase [Sesbania rostrata]
  misc_feature (1)..(209): Homolog of NCBI NO: 9714392 NR Description: lipoxygenase [Oryza sativa]
  misc_feature (161)..(754): Homolog of NCBI NO: 9714392 NR Description: lipoxygenase [Oryza sativa]
  misc_feature (1)..(754): Homolog of NCBI NO: 28411860 NR Description: putative lipoxygenase [Oryza sativa (japonica
  misc_feature (1)..(754): Homolog of NCBI NO: 34922538 NR Description: Lipoxygenase 2.3, chloroplast precursor
  misc_feature (1)..(753): Homolog of NCBI NO: 14589309 NR Description: lipoxygenase [Sesbania rostrata]
  misc_feature (161)..(754): Homolog of NCBI NO: 9714392 NR Description: lipoxygenase [Oryza sativa]
  misc_feature (1)..(754): Homolog of NCBI NO: 34922538 NR Description: Lipoxygenase 2.3, chloroplast precursor
  misc_feature (1)..(754): Homolog of NCBI NO: 28411860 NR Description: putative lipoxygenase [Oryza sativa (japonica
  misc_feature (161)..(754): Homolog of NCBI NO: 9714392 NR Description: lipoxygenase [Oryza sativa]
  misc_feature (1)..(209): Homolog of NCBI NO: 9714392 NR Description: lipoxygenase [Oryza sativa]
  misc_feature (1)..(753): Homolog of NCBI NO: 14589309 NR Description: lipoxygenase [Sesbania rostrata]
  misc_feature (1)..(754): Homolog of NCBI NO: 7433169 NR Description: probable lipoxygenase (EC 1.13.11.12) (clone H1)
  misc_feature (1)..(754): Homolog of NCBI NO: 7433168 NR Description: lipoxygenase (EC 1.13.11.12) loxC, chloroplast -
  misc_feature (1)..(754): Homolog of NCBI NO: 2826842 NR Description: loxc homologue [Lycopersicon pimpinellifolium]
  misc_feature (1)..(754): Homolog of NCBI NO: 7433160 NR Description: probable lipoxygenase (EC 1.13.11.12) CPRD46,
  misc_feature (1)..(754): Homolog of NCBI NO: 18461098 NR Description: lipoxygenase [Citrus jambhiri]
  misc_feature (1)..(754): Homolog of NCBI NO: 7433169 NR Description: probable lipoxygenase (EC 1.13.11.12) (clone H1)
  misc_feature (1)..(754): Homolog of NCBI NO: 7433168 NR Description: lipoxygenase (EC 1.13.11.12) loxC, chloroplast -
  misc_feature (1)..(754): Homolog of NCBI NO: 2826842 NR Description: loxc homologue [Lycopersicon pimpinellifolium]
  misc_feature (1)..(754): Homolog of NCBI NO: 7433160 NR Description: probable lipoxygenase (EC 1.13.11.12) CPRD46,
  misc_feature (1)..(754): Homolog of NCBI NO: 18461098 NR Description: lipoxygenase [Citrus jambhiri]
  misc_feature (1)..(754): Homolog of NCBI NO: 34922538 NR Description: Lipoxygenase 2.3, chloroplast precursor
  misc_feature (1)..(754): Homolog of NCBI NO: 28411860 NR Description: putative lipoxygenase [Oryza sativa (japonica
  misc_feature (1)..(209): Homolog of NCBI NO: 9714392 NR Description: lipoxygenase [Oryza sativa]
  misc_feature (1)..(754): Homolog of NCBI NO: 18461098 NR Description: lipoxygenase [Citrus jambhiri]
  misc_feature (1)..(754): Homolog of NCBI NO: 7433160 NR Description: probable lipoxygenase (EC 1.13.11.12) CPRD46,
  misc_feature (1)..(754): Homolog of NCBI NO: 2826842 NR Description: loxc homologue [Lycopersicon pimpinellifolium]
  misc_feature (1)..(754): Homolog of NCBI NO: 7433168 NR Description: lipoxygenase (EC 1.13.11.12) loxC, chloroplast -
  misc_feature (1)..(754): Homolog of NCBI NO: 7433169 NR Description: probable lipoxygenase (EC 1.13.11.12) (clone H1)

SEQ ID NO: 45228 - DNA, 1857 bp, Arabidopsis thaliana
  misc_feature (1)..(1857): Ceres Seq. ID no. 13575971
  misc_feature: MA Experiment ID: 20000185 Result: Up-regulated in Transcription
  misc_feature: MA Experiment 20000185 PARAMETER Experiment Name: At_Roots__P Parameter: Age (day) Value: 7 vs. 21
  misc_feature: MA Experiment 20000185 PARAMETER Experiment Name: At_Roots__P Parameter: Organism Value: A. thaliana
  misc_feature: MA Experiment 20000185 PARAMETER Experiment Name: At_Roots__P Parameter: Tissue Value: Roots vs. Whole Plant
  misc_feature: MA Experiment ID: 20000227 Result: Down-regulated in Transcription
  misc_feature: MA Experiment 20000227 PARAMETER Experiment Name: At_Root-Tips-vs-Tops_P Parameter: Tissue Value: Root Tips vs. Root Tops
  misc_feature: MA Experiment ID: 20000439 Result: Up-regulated in Transcription
  misc_feature: MA Experiment 20000439 PARAMETER Experiment Name: At_Roots__P Parameter: Age (day) Value: 14 vs. 21
  misc_feature: MA Experiment 20000439 PARAMETER Experiment Name: At_Roots__P Parameter: Organism Value: A. thaliana
  misc_feature: MA Experiment 20000439 PARAMETER Experiment Name: At_Roots__P Parameter: Tissue Value: Roots vs. Whole Plant
  misc_feature: MA Experiment ID: 20001248 Result: Down-regulated in Transcription
  misc_feature: MA Experiment 20001248 PARAMETER Experiment Name: At_Far-red-induction_P Parameter: Age (day) Value: 7
  misc_feature: MA Experiment 20001248 PARAMETER Experiment Name: At_Far-red-induction_P Parameter: Light Value: Far-red vs. White
  misc_feature: MA Experiment 20001248 PARAMETER Experiment Name: At_Far-red-induction_P Parameter: Organism Value: A. thaliana
  misc_feature: MA Experiment 20001248 PARAMETER Experiment Name: At_Far-red-induction_P Parameter: Plant Line Value: Columbia
  misc_feature: MA Experiment 20001248 PARAMETER Experiment Name: At_Far-red-induction_P Parameter: Timepoint (hr) Value: 4
  misc_feature: MA Experiment 20001248 PARAMETER Experiment Name: At_Far-red-induction_P Parameter: Tissue Value: Whole Plant
  misc_feature: MA Experiment ID: 20001451 Result: Down-regulated in Transcription
  misc_feature: MA Experiment 20001451 PARAMETER Experiment Name: At_Far-red-induction_P Parameter: Age (day) Value: 7
  misc_feature: MA Experiment 20001451 PARAMETER Experiment Name: At_Far-red-induction_P Parameter: Light Value: Far-red vs. White
  misc_feature: MA Experiment 20001451 PARAMETER Experiment Name: At_Far-red-induction_P Parameter: Organism Value: A. thaliana
  misc_feature: MA Experiment 20001451 PARAMETER Experiment Name: At_Far-red-induction_P Parameter: Plant Line Value: Columbia
  misc_feature: MA Experiment 20001451 PARAMETER Experiment Name: At_Far-red-induction_P Parameter: Timepoint (hr) Value: 24
  misc_feature: MA Experiment 20001451 PARAMETER Experiment Name: At_Far-red-induction_P Parameter: Tissue Value: Whole Plant
gcctcataacacataaaacacagtggacgtaactcctctgtttcctctgttctctgtcatggctagtttagtctctggtgataaagaagctcaaatctctggcgatccaggcagcaagcgcggtggatggatcactttcccgttcatgctcgctactttgttaggcctttccgtgacttctttcggatgggtaatgaatttgatcgtcttcctaatcgaagagttcaacatcaagagcatcgctgctgctcagatttcaaatgttgccaatggatgtctcagcatgttgcctgttgttgcagccattctagctgattctttctttggaaacattccggtcatcgcggcctcttctttcatttctctgcttggaatcgttctcttgacgcttattgcatctttggactacttgagacctcggccgtgtgaagcagggtcagtcctatgcacaccgccgtcaaaactccacctcgggatcttgtacacagccttagctttagtgaccactggagcaggtgggacacggttcaccatggcatccgcgggtgcaaaccaatatgagaaacctaaagaacaaggaagcttcttcaactggtacttcctcacactatacgctggagctattactggtgcaacagcaattgtatatatacaagacaatgctagctggaaactagggtttggtctctgcgcggctgctaatttgatcagtttcatagtttttgtctctgggaagagatactacaagcatgacaaaccaatgggaagtcccttcacgagtctaatccgcgttgtagtctctgctacagtaaaaaggaaggctgtaatatcatgcaacgaagaagactatcatcactatggtctcgaaaaggaggtcaagacttctgctgcaatgccatccaagagcttcaggttcttgaaccgcgccgctttgatgaccaaagatgatttaaatcagaaagaaggatcagttaacaacatctggaggctatgctctgtacaagaagtagaagatttcaaagccattctccgagtttttcctctatggttatcaatcatcttcgtgagtactcctatggtgatgcaaacaagcttgattgtactccaagctctagtcacggaccgcggacttggtcctaatttcaaagtcccggccggttccctccaagtaataataatcatcactgcatgcattgttatcatcatgaacaactggcttgtctttccaatgtacaagaagctaactcataagttgctgacaccgcttcaaaaagtcggtataggccaggttctcaccattctaagcatggcactctccgcggtggtagaagcaaagaggctgaaaacagttgaaaatggtcatcccatgtcagtgttatggttgtttcctccccttgtgatagtaggtataggcgaagccttccagtttccggccaatattgaattattttatggcgaattccccgagtctctgaggaacaccgcgacttcattgacctcggtggtgattggaatctctttctatttgagcacagctctcattgatcttatccagaggaccacagcgtggttaccaaatgacattaaccacggaagagtggacaatgtttactggcttttagtcattggaggaatcttgaatttcggctacttccttgtgtgttcttgggtctacaaatatagaaacctcaaggataatgatcaagaacaagatccaaaagatggtacaatgtaaagacacaacatgtttctattctagttctctttacattaattctctcctgttagcttttgtgttttcgtatgttttaccacttcacatatggaactacatttagaaaataatactttcaaact

SEQ ID NO: 45229 - protein, 558 aa, Arabidopsis thaliana
  peptide (1)..(558): Ceres Seq. ID no. 13575972
  misc_feature (92)..(484): Pfam Name: POT family Pfam Description: POT family
  misc_feature (1)..(551): Homolog of NCBI NO: 15231199 NR Description: hypothetical protein [Arabidopsis thaliana]
  misc_feature (479)..(557): Homolog of NCBI NO: 15231216 NR Description: transporter protein -related [Arabidopsis
  misc_feature (6)..(451): Homolog of NCBI NO: 15231216 NR Description: transporter protein -related [Arabidopsis
  misc_feature (1)..(557): Homolog of NCBI NO: 15231221 NR Description: transporter protein -related [Arabidopsis
  misc_feature (1)..(557): Homolog of NCBI NO: 26449486 NR Description: putative transporter protein [Arabidopsis
  misc_feature (1)..(557): Homolog of NCBI NO: 15231217 NR Description: transporter protein -related [Arabidopsis
  misc_feature (1)..(555): Homolog of NCBI NO: 11358696 NR Description: probable transporter protein - Arabidopsis
  misc_feature (1)..(555): Homolog of NCBI NO: 30692629 NR Description: transporter protein -related [Arabidopsis
  misc_feature (1)..(558): Homolog of NCBI NO: 26450397 NR Description: putative transporter protein [Arabidopsis
  misc_feature (1)..(558): Homolog of NCBI NO: 15231215 NR Description: transporter protein -related [Arabidopsis
MASLVSGDKEAQISGDPGSKRGGWITFPFMLATLLGLSVTSFGWVMNLIVFLIEEFNIKSIAAAQISNVANGCLSMLPVVAAILADSFFGNIPVIAASSFISLLGIVLLTLIASLDYLRPRPCEAGSVLCTPPSKLHLGILYTALALVTTGAGGTRFTMASAGANQYEKPKEQGSFFNWYFLTLYAGAITGATAIVYIQDNASWKLGFGLCAAANLISFIVFVSGKRYYKHDKPMGSPFTSLIRVVVSATVKRKAVISCNEEDYHHYGLEKEVKTSAAMPSKSFRFLNRAALMTKDDLNQKEGSVNNIWRLCSVQEVEDFKAILRVFPLWLSIIFVSTPMVMQTSLIVLQALVTDRGLGPNFKVPAGSLQVIIIITACIVIIMNNWLVFPMYKKLTHKLLTPLQKVGIGQVLTILSMALSAVVEAKRLKTVENGHPMSVLWLFPPLVIVGIGEAFQFPANIELFYGEFPESLRNTATSLTSVVIGISFYLSTALIDLIQRTTAWLPNDINHGRVDNVYWLLVIGGILNFGYFLVCSWVYKYRNLKDNDQEQDPKDGTM

SEQ ID NO: 45230 - protein, 529 aa, Arabidopsis thaliana
  peptide (1)..(529): Ceres Seq. ID no. 13575973
  misc_feature (63)..(455): Pfam Name: POT family Pfam Description: POT family
  misc_feature (1)..(522): Homolog of NCBI NO: 15231199 NR Description: hypothetical protein [Arabidopsis thaliana]
  misc_feature (450)..(528): Homolog of NCBI NO: 15231216 NR Description: transporter protein -related [Arabidopsis
  misc_feature (1)..(422): Homolog of NCBI NO: 15231216 NR Description: transporter protein -related [Arabidopsis
  misc_feature (1)..(528): Homolog of NCBI NO: 15231221 NR Description: transporter protein -related [Arabidopsis
  misc_feature (1)..(528): Homolog of NCBI NO: 26449486 NR Description: putative transporter protein [Arabidopsis
  misc_feature (1)..(528): Homolog of NCBI NO: 15231217 NR Description: transporter protein -related [Arabidopsis
  misc_feature (1)..(526): Homolog of NCBI NO: 11358696 NR Description: probable transporter protein - Arabidopsis
  misc_feature (1)..(526): Homolog of NCBI NO: 30692629 NR Description: transporter protein -related [Arabidopsis
  misc_feature (1)..(529): Homolog of NCBI NO: 26450397 NR Description: putative transporter protein [Arabidopsis
  misc_feature (1)..(529): Homolog of NCBI NO: 15231215 NR Description: transporter protein -related [Arabidopsis
MLATLLGLSVTSFGWVMNLIVFLIEEFNIKSIAAAQISNVANGCLSMLPVVAAILADSFFGNIPVIAASSFISLLGIVLLTLIASLDYLRPRPCEAGSVLCTPPSKLHLGILYTALALVTTGAGGTRFTMASAGANQYEKPKEQGSFFNWYFLTLYAGAITGATAIVYIQDNASWKLGFGLCAAANLISFIVFVSGKRYYKHDKPMGSPFTSLIRVVVSATVKRKAVISCNEEDYHHYGLEKEVKTSAAMPSKSFRFLNRAALMTKDDLNQKEGSVNNIWRLCSVQEVEDFKAILRVFPLWLSIIFVSTPMVMQTSLIVLQALVTDRGLGPNFKVPAGSLQVIIIITACIVIIMNNWLVFPMYKKLTHKLLTPLQKVGIGQVLTILSMALSAVVEAKRLKTVENGHPMSVLWLFPPLVIVGIGEAFQFPANIELFYGEFPESLRNTATSLTSVVIGISFYLSTALIDLIQRTTAWLPNDINHGRVDNVYWLLVIGGILNFGYFLVCSWVYKYRNLKDNDQEQDPKDGTM

SEQ ID NO: 45231 - protein, 513 aa, Arabidopsis thaliana
  peptide (1)..(513): Ceres Seq. ID no. 13575974
  misc_feature (47)..(439): Pfam Name: POT family Pfam Description: POT family
  misc_feature (1)..(506): Homolog of NCBI NO: 15231199 NR Description: hypothetical protein [Arabidopsis thaliana]
  misc_feature (434)..(512): Homolog of NCBI NO: 15231216 NR Description: transporter protein -related [Arabidopsis
  misc_feature (1)..(406): Homolog of NCBI NO: 15231216 NR Description: transporter protein -related [Arabidopsis
  misc_feature (1)..(512): Homolog of NCBI NO: 15231221 NR Description: transporter protein -related [Arabidopsis
  misc_feature (1)..(512): Homolog of NCBI NO: 26449486 NR Description: putative transporter protein [Arabidopsis
  misc_feature (1)..(512): Homolog of NCBI NO: 15231217 NR Description: transporter protein -related [Arabidopsis
  misc_feature (1)..(510): Homolog of NCBI NO: 11358696 NR Description: probable transporter protein - Arabidopsis
  misc_feature (1)..(510): Homolog of NCBI NO: 30692629 NR Description: transporter protein -related [Arabidopsis
  misc_feature (1)..(513): Homolog of NCBI NO: 26450397 NR Description: putative transporter protein [Arabidopsis
  misc_feature (1)..(513): Homolog of NCBI NO: 15231215 NR Description: transporter protein -related [Arabidopsis
MNLIVFLIEEFNIKSIAAAQISNVANGCLSMLPVVAAILADSFFGNIPVIAASSFISLLGIVLLTLIASLDYLRPRPCEAGSVLCTPPSKLHLGILYTALALVTTGAGGTRFTMASAGANQYEKPKEQGSFFNWYFLTLYAGAITGATAIVYIQDNASWKLGFGLCAAANLISFIVFVSGKRYYKHDKPMGSPFTSLIRVVVSATVKRKAVISCNEEDYHHYGLEKEVKTSAAMPSKSFRFLNRAALMTKDDLNQKEGSVNNIWRLCSVQEVEDFKAILRVFPLWLSIIFVSTPMVMQTSLIVLQALVTDRGLGPNFKVPAGSLQVIIIITACIVIIMNNWLVFPMYKKLTHKLLTPLQKVGIGQVLTILSMALSAVVEAKRLKTVENGHPMSVLWLFPPLVIVGIGEAFQFPANIELFYGEFPESLRNTATSLTSVVIGISFYLSTALIDLIQRTTAWLPNDINHGRVDNVYWLLVIGGILNFGYFLVCSWVYKYRNLKDNDQEQDPKDGTM

SEQ ID NO: 45232 - DNA, 2459 bp, Arabidopsis thaliana
  misc_feature (1)..(2459): Ceres Seq. ID no. 12561854
  misc_feature: MA Experiment ID: 20000171 Result: Down-regulated in Transcription
  misc_feature: MA Experiment 20000171 PARAMETER Experiment Name: At_42deg_Heat_P Parameter: Age (day) Value: 14
  misc_feature: MA Experiment 20000171 PARAMETER Experiment Name: At_42deg_Heat_P Parameter: Organism Value: A. thaliana
  misc_feature: MA Experiment 20000171 PARAMETER Experiment Name: At_42deg_Heat_P Parameter: Plant Line Value: WS
  misc_feature: MA Experiment 20000171 PARAMETER Experiment Name: At_42deg_Heat_P Parameter: Temperature (deg C) Value: 42 vs. 22
  misc_feature: MA Experiment 20000171 PARAMETER Experiment Name: At_42deg_Heat_P Parameter: Timepoint (hr) Value: 1
  misc_feature: MA Experiment 20000171 PARAMETER Experiment Name: At_42deg_Heat_P Parameter: Tissue Value: Aerial
  misc_feature: MA Experiment ID: 20000173 Result: Down-regulated in Transcription
  misc_feature: MA Experiment 20000173 PARAMETER Experiment Name: At_42deg_Heat_P Parameter: Age (day) Value: 14
  misc_feature: MA Experiment 20000173 PARAMETER Experiment Name: At_42deg_Heat_P Parameter: Organism Value: A. thaliana
  misc_feature: MA Experiment 20000173 PARAMETER Experiment Name: At_42deg_Heat_P Parameter: Plant Line Value: WS
  misc_feature: MA Experiment 20000173 PARAMETER Experiment Name: At_42deg_Heat_P Parameter: Temperature (deg C) Value: 42 vs. 22
  misc_feature: MA Experiment 20000173 PARAMETER Experiment Name: At_42deg_Heat_P Parameter: Timepoint (hr) Value: 6
  misc_feature: MA Experiment 20000173 PARAMETER Experiment Name: At_42deg_Heat_P Parameter: Tissue Value: Aerial
  misc_feature: MA Experiment ID: 20000180 Result: Up-regulated in Transcription
  misc_feature: MA Experiment 20000180 PARAMETER Experiment Name: At_Germinating_Seeds_P Parameter: Age (hr) Value: 24 vs. 0
  misc_feature: MA Experiment 20000180 PARAMETER Experiment Name: At_Germinating_Seeds_P Parameter: Tissue Value: Germinating Seeds
  misc_feature: MA Experiment ID: 20000213 Result: Up-regulated in Transcription
  misc_feature: MA Experiment 20000213 PARAMETER Experiment Name: At_4deg_Cold_P Parameter: Timepoint (hr) Value: 2
  misc_feature: MA Experiment ID: 20000235 Result: Up-regulated in Transcription
  misc_feature: MA Experiment 20000235 PARAMETER Experiment Name: At_Siliques_P Parameter: Age (day) Value: 21
  misc_feature: MA Experiment 20000235 PARAMETER Experiment Name: At_Siliques_P Parameter: Organism Value: A. thaliana
  misc_feature: MA Experiment 20000235 PARAMETER Experiment Name: At_Siliques_P Parameter: Plant Line Value: WS
  misc_feature: MA Experiment 20000235 PARAMETER Experiment Name: At_Siliques_P Parameter: Tissue Value: 5-10mm Siliques vs. Whole Plant
  misc_feature: MA Experiment ID: 20000437 Result: Down-regulated in Transcription
  misc_feature: MA Experiment 20000437 PARAMETER Experiment Name: At_Drought_P Parameter: Age (day) Value: 8
  misc_feature: MA Experiment 20000437 PARAMETER Experiment Name: At_Drought_P Parameter: Organism Value: A. thaliana
  misc_feature: MA Experiment 20000437 PARAMETER Experiment Name: At_Drought_P Parameter: Plant Line Value: WS
  misc_feature: MA Experiment 20000437 PARAMETER Experiment Name: At_Drought_P Parameter: Timepoint (hr) Value: 24
  misc_feature: MA Experiment 20000437 PARAMETER Experiment Name: At_Drought_P Parameter: Tissue Value: Whole Plant
  misc_feature: MA Experiment 20000437 PARAMETER Experiment Name: At_Drought_P Parameter: Treatment Value: Drought vs. No Drought
  misc_feature: MA Experiment ID: 20001451 Result: Down-regulated in Transcription
  misc_feature: MA Experiment 20001451 PARAMETER Experiment Name: At_Far-red-induction_P Parameter: Age (day) Value: 7
  misc_feature: MA Experiment 20001451 PARAMETER Experiment Name: At_Far-red-induction_P Parameter: Light Value: Far-red vs. White
  misc_feature: MA Experiment 20001451 PARAMETER Experiment Name: At_Far-red-induction_P Parameter: Organism Value: A. thaliana
  misc_feature: MA Experiment 20001451 PARAMETER Experiment Name: At_Far-red-induction_P Parameter: Plant Line Value: Columbia
  misc_feature: MA Experiment 20001451 PARAMETER Experiment Name: At_Far-red-induction_P Parameter: Timepoint (hr) Value: 24
  misc_feature: MA Experiment 20001451 PARAMETER Experiment Name: At_Far-red-induction_P Parameter: Tissue Value: Whole Plant
  misc_feature: MA Experiment ID: 20001557 Result: Up-regulated in Transcription
  misc_feature: MA Experiment 20001557 PARAMETER Experiment Name: At_Drought_Soil_Dry_P Parameter: Age (day) Value: 27
  misc_feature: MA Experiment 20001557 PARAMETER Experiment Name: At_Drought_Soil_Dry_P Parameter: Organism Value: A. thaliana
  misc_feature: MA Experiment 20001557 PARAMETER Experiment Name: At_Drought_Soil_Dry_P Parameter: Plant Line Value: WS
  misc_feature: MA Experiment 20001557 PARAMETER Experiment Name: At_Drought_Soil_Dry_P Parameter: Post Timepoint (hr) Value: 3
  misc_feature: MA Experiment 20001557 PARAMETER Experiment Name: At_Drought_Soil_Dry_P Parameter: Post-Treatment Value: Re-Water vs. No Drought
  misc_feature: MA Experiment 20001557 PARAMETER Experiment Name: At_Drought_Soil_Dry_P Parameter: Timepoint (day) Value: 13
  misc_feature: MA Experiment 20001557 PARAMETER Experiment Name: At_Drought_Soil_Dry_P Parameter: Treatment Value: Drought vs. No Drought
  misc_feature: MA Experiment ID: 20001558 Result: Up-regulated in Transcription
  misc_feature: MA Experiment 20001558 PARAMETER Experiment Name: At_Drought_Soil_Dry_P Parameter: Age (day) Value: 27
  misc_feature: MA Experiment 20001558 PARAMETER Experiment Name: At_Drought_Soil_Dry_P Parameter: Organism Value: A. thaliana
  misc_feature: MA Experiment 20001558 PARAMETER Experiment Name: At_Drought_Soil_Dry_P Parameter: Plant Line Value: WS
  misc_feature: MA Experiment 20001558 PARAMETER Experiment Name: At_Drought_Soil_Dry_P Parameter: Post Timepoint (hr) Value: 6
  misc_feature: MA Experiment 20001558 PARAMETER Experiment Name: At_Drought_Soil_Dry_P Parameter: Post-Treatment Value: Re-Water vs. No Drought
  misc_feature: MA Experiment 20001558 PARAMETER Experiment Name: At_Drought_Soil_Dry_P Parameter: Timepoint (day) Value: 13
  misc_feature: MA Experiment 20001558 PARAMETER Experiment Name: At_Drought_Soil_Dry_P Parameter: Treatment Value: Drought vs. No Drought
  misc_feature: MA Experiment ID: 20001560 Result: Up-regulated in Transcription
  misc_feature: MA Experiment 20001560 PARAMETER Experiment Name: At_Drought_Soil_Dry_P Parameter: Age (day) Value: 28
  misc_feature: MA Experiment 20001560 PARAMETER Experiment Name: At_Drought_Soil_Dry_P Parameter: Organism Value: A. thaliana
  misc_feature: MA Experiment 20001560 PARAMETER Experiment Name: At_Drought_Soil_Dry_P Parameter: Plant Line Value: WS
  misc_feature: MA Experiment 20001560 PARAMETER Experiment Name: At_Drought_Soil_Dry_P Parameter: Post Timepoint (hr) Value: None
  misc_feature: MA Experiment 20001560 PARAMETER Experiment Name: At_Drought_Soil_Dry_P Parameter: Post-Treatment Value: None
  misc_feature: MA Experiment 20001560 PARAMETER Experiment Name: At_Drought_Soil_Dry_P Parameter: Timepoint (day) Value: 14
  misc_feature: MA Experiment 20001560 PARAMETER Experiment Name: At_Drought_Soil_Dry_P Parameter: Treatment Value: Drought vs. No Drought
  misc_feature: MA Experiment ID: 20001757 Result: Down-regulated in Transcription
  misc_feature: MA Experiment 20001757 PARAMETER Experiment Name: At_50mM_NH4NO3_L-to-H_P Parameter: Timepoint (hr) Value: 6
  misc_feature: MA Experiment 20001757 PARAMETER Experiment Name: At_50mM_NH4NO3_L-to-H_P Parameter: Tissue Value: Leaf
  misc_feature: MA Experiment 20001757 PARAMETER Experiment Name: At_50mM_NH4NO3_L-to-H_P Parameter: Treatment Value: 50mM NH4NO3 vs 100mM Mannitol
  misc_feature: MA Experiment ID: 20001906 Result: Down-regulated in Transcription
  misc_feature: MA Experiment 20001906 PARAMETER Experiment Name: At_Drought_Reproduction_P Parameter: Age (day) Value: 35
  misc_feature: MA Experiment 20001906 PARAMETER Experiment Name: At_Drought_Reproduction_P Parameter: Organism Value: A. thaliana
  misc_feature: MA Experiment 20001906 PARAMETER Experiment Name: At_Drought_Reproduction_P Parameter: Plant Line Value: WS
  misc_feature: MA Experiment 20001906 PARAMETER Experiment Name: At_Drought_Reproduction_P Parameter: Timepoint (day) Value: 5
  misc_feature: MA Experiment 20001906 PARAMETER Experiment Name: At_Drought_Reproduction_P Parameter: Tissue Value: Siliques
  misc_feature: MA Experiment 20001906 PARAMETER Experiment Name: At_Drought_Reproduction_P Parameter: Treatment Value: Drought vs. No Drought
  misc_feature: MA Experiment ID: 20001908 Result: Down-regulated in Transcription
  misc_feature: MA Experiment 20001908 PARAMETER Experiment Name: At_Drought_Reproduction_P Parameter: Age (day) Value: 40
  misc_feature: MA Experiment 20001908 PARAMETER Experiment Name: At_Drought_Reproduction_P Parameter: Organism Value: A. thaliana
  misc_feature: MA Experiment 20001908 PARAMETER Experiment Name: At_Drought_Reproduction_P Parameter: Plant Line Value: WS
  misc_feature: MA Experiment 20001908 PARAMETER Experiment Name: At_Drought_Reproduction_P Parameter: Timepoint (day) Value: 10
  misc_feature: MA Experiment 20001908 PARAMETER Experiment Name: At_Drought_Reproduction_P Parameter: Tissue Value: Siliques
  misc_feature: MA Experiment 20001908 PARAMETER Experiment Name: At_Drought_Reproduction_P Parameter: Treatment Value: Drought vs. No Drought
  misc_feature: MA Experiment ID: 20001911 Result: Down-regulated in Transcription
  misc_feature: MA Experiment 20001911 PARAMETER Experiment Name: At_Drought_Reproduction_P Parameter: Age (day) Value: 40
  misc_feature: MA Experiment 20001911 PARAMETER Experiment Name: At_Drought_Reproduction_P Parameter: Organism Value: A. thaliana
  misc_feature: MA Experiment 20001911 PARAMETER Experiment Name: At_Drought_Reproduction_P Parameter: Plant Line Value: WS
  misc_feature: MA Experiment 20001911 PARAMETER Experiment Name: At_Drought_Reproduction_P Parameter: Timepoint (day) Value: 10
  misc_feature: MA Experiment 20001911 PARAMETER Experiment Name: At_Drought_Reproduction_P Parameter: Tissue Value: Flowers
  misc_feature: MA Experiment 20001911 PARAMETER Experiment Name: At_Drought_Reproduction_P Parameter: Treatment Value: Drought vs. No Drought
gaatttccaacatgttttgtttatagaaattgaataaaatcaaacgcgccttcatcttcaagttaaaaatcaaatcttaattagtgaagacaaagaagaagaagacattattttaagtgagttctctctctgtcacactcacaaagctttatactttctggctactgcaagctcatcactgaaaagagcttaaaccagagagatctgataagagaaattttagagtctctctgcttcaacaagatctacatcgaccaggagattagaaagaatcatgggttctaagcataacccaccagggaataacagatcgagaagtacactatctctactcgttgtggttggtttatgttgtttcttctatcttcttggagcatggcaaaagagtgggtttggtaaaggagatagcatagctatggagattacaaagcaagcgcagtgtactgacattgtcactgatcttgattttgaacctcatcacaacacagtgaagatcccacataaagctgatcccaaacctgtttctttcaaaccgtgtgatgtgaagctcaaggattacacgccttgtcaagagcaagaccgagctatgaagttcccgagagagaacatgatttacagagagagacattgtcctcctgataatgagaagctgcgttgtcttgttccagctcctaaagggtatatgactcctttcccttggcctaaaagcagagattatgttcactatgctaatgctcctttcaagagcttgactgtcgaaaaagctggacagaattgggttcagtttcaagggaatgtgtttaaattccctggtggaggaactatgtttcctcaaggtgctgatgcgtatattgaagagctagcttctgttatccctatcaaagatggctctgttagaaccgcattggacactggatgtggggttgctagttggggtgcttatatgcttaagaggaatgttttgactatgtcgtttgcgccaagggataaccacgaagcacaagtccagtttgcgcttgagagaggtgttccagcgattatcgctgttcttggatcaatccttcttccttaccctgcaagagcctttgacatggctcaatgctctcgatgcttgataccatggaccgcaaacgagggaacatacttaatggaagtagatagagtcttgagacctggaggttactgggtcttatcgggtcctccaatcaactggaagacatggcacaagacgtggaaccgaactaaagcagagctaaatgccgagcaaaagagaatagagggaatcgcagagtccttatgctgggagaagaagtatgagaagggagacattgcaattttcagaaagaaaataaacgatagatcatgcgatagatcaacaccggttgacacctgcaaaagaaaggacactgacgatgtctggtacaaggagatagaaacgtgtgtaacaccattccctaaagtatcaaacgaagaagaagttgctggaggaaagctaaagaagttccccgagaggctattcgcagtgcctccaagtatctctaaaggtttgattaatggcgtcgacgaggaatcataccaagaagacatcaatctatggaagaagcgagtgaccggatacaagagaattaacagactgataggttccaccagataccgtaatgtgatggatatgaacgccggtcttggtggattcgctgctgcgcttgaatcgcctaaatcgtgggttatgaatgtgattccaaccattaacaagaacacattgagtgttgtttatgagagaggtctcattggtatctatcatgactggtgtgaaggcttttcaacttatccaagaacatacgatttcattcacgctagtggtgtcttcagcttgtatcagcacagctgcaaacttgaggatattcttcttgaaactgatcggattttacgaccggaagggattgtgattttccgggatgaggttgatgttttgaatgatgtgaggaagatcgttgatggaatgagatgggatactaagttaatggatcatgaagacggtcctctcgtgccggagaagattcttgtcgccacgaagcagtattgggtagccggcgacgatggaaacaattctccgtcgtcttctaatagtgaagaagaataaaacaaaaacaaaaaactcctcaggttactaagcttgaagtgtagatctattttacaacatctggaaaattcttatcaaaaaaggaaggaatcagaatttccattaaagaaaggtgtcaaaaaaaagttgtaaaactatatagtagtgatcaagacgaatatgtgcatttatgttttatttttgttccctagtttttaattttatttttttgaaggaagaaaaaattagttccatgtgtttttgcaagatagttgaaaccttggacgcttgttatgtatgatgcgatcttgacattttttaataacagttattttaaata

SEQ ID NO: 45233 - protein, 621 aa, Arabidopsis thaliana
  peptide (1)..(621): Ceres Seq. ID no. 12561855
  misc_feature (94)..(600): Pfam Name: Putative methyltransferase Pfam Description: Putative methyltransferase
  misc_feature (10)..(498): Homolog of NCBI NO: 30689679 NR Description: dehydration-induced protein family [Arabidopsis
  misc_feature (10)..(607): Homolog of NCBI NO: 37535962 NR Description: unknown protein [Oryza sativa (japonica
  misc_feature (2)..(603): Homolog of NCBI NO: 24413975 NR Description: hypothetical protein~similar to Oryza sativa
  misc_feature (5)..(618): Homolog of NCBI NO: 15235080 NR Description: putative protein; protein id: At4g10440.1
  misc_feature (525)..(604): Homolog of NCBI NO: 25372106 NR Description: T2P11.4 protein - Arabidopsis thaliana
  misc_feature (10)..(512): Homolog of NCBI NO: 25372106 NR Description: T2P11.4 protein - Arabidopsis thaliana
  misc_feature (33)..(612): Homolog of NCBI NO: 37537004 NR Description: hypothetical protein [Oryza sativa (japonica
  misc_feature (11)..(604): Homolog of NCBI NO: 18071395 NR Description: hypothetical protein [Oryza sativa]
  misc_feature (10)..(604): Homolog of NCBI NO: 18396075 NR Description: expressed protein
  misc_feature (1)..(604): Homolog of NCBI NO: 6752888 NR Description: unknown [Malus x domestica]
MGSKHNPPGNNRSRSTLSLLVVVGLCCFFYLLGAWQKSGFGKGDSIAMEITKQAQCTDIVTDLDFEPHHNTVKIPHKADPKPVSFKPCDVKLKDYTPCQEQDRAMKFPRENMIYRERHCPPDNEKLRCLVPAPKGYMTPFPWPKSRDYVHYANAPFKSLTVEKAGQNWVQFQGNVFKFPGGGTMFPQGADAYIEELASVIPIKDGSVRTALDTGCGVASWGAYMLKRNVLTMSFAPRDNHEAQVQFALERGVPAIIAVLGSILLPYPARAFDMAQCSRCLIPWTANEGTYLMEVDRVLRPGGYWVLSGPPINWKTWHKTWNRTKAELNAEQKRIEGIAESLCWEKKYEKGDIAIFRKKINDRSCDRSTPVDTCKRKDTDDVWYKEIETCVTPFPKVSNEEEVAGGKLKKFPERLFAVPPSISKGLINGVDEESYQEDINLWKKRVTGYKRINRLIGSTRYRNVMDMNAGLGGFAAALESPKSWVMNVIPTINKNTLSVVYERGLIGIYHDWCEGFSTYPRTYDFIHASGVFSLYQHSCKLEDILLETDRILRPEGIVIFRDEVDVLNDVRKIVDGMRWDTKLMDHEDGPLVPEKILVATKQYWVAGDDGNNSPSSSNSEEE

SEQ ID NO: 45234 - protein, 574 aa, Arabidopsis thaliana
  peptide (1)..(574): Ceres Seq. ID no. 12561856
  misc_feature (47)..(553): Pfam Name: Putative methyltransferase Pfam Description: Putative methyltransferase
  misc_feature (1)..(451): Homolog of NCBI NO: 30689679 NR Description: dehydration-induced protein family [Arabidopsis
  misc_feature (1)..(560): Homolog of NCBI NO: 37535962 NR Description: unknown protein [Oryza sativa (japonica
  misc_feature (1)..(556): Homolog of NCBI NO: 24413975 NR Description: hypothetical protein~similar to Oryza sativa
  misc_feature (1)..(571): Homolog of NCBI NO: 15235080 NR Description: putative protein; protein id: At4g10440.1
  misc_feature (478)..(557): Homolog of NCBI NO: 25372106 NR Description: T2P11.4 protein - Arabidopsis thaliana
  misc_feature (1)..(465): Homolog of NCBI NO: 25372106 NR Description: T2P11.4 protein - Arabidopsis thaliana
  misc_feature (1)..(565): Homolog of NCBI NO: 37537004 NR Description: hypothetical protein [Oryza sativa (japonica
  misc_feature (1)..(557): Homolog of NCBI NO: 18071395 NR Description: hypothetical protein [Oryza sativa]
  misc_feature (1)..(557): Homolog of NCBI NO: 18396075 NR Description: expressed protein
  misc_feature (1)..(557): Homolog of NCBI NO: 6752888 NR Description: unknown [Malus x domestica]
MEITKQAQCTDIVTDLDFEPHHNTVKIPHKADPKPVSFKPCDVKLKDYTPCQEQDRAMKFPRENMIYRERHCPPDNEKLRCLVPAPKGYMTPFPWPKSRDYVHYANAPFKSLTVEKAGQNWVQFQGNVFKFPGGGTMFPQGADAYIEELASVIPIKDGSVRTALDTGCGVASWGAYMLKRNVLTMSFAPRDNHEAQVQFALERGVPAIIAVLGSILLPYPARAFDMAQCSRCLIPWTANEGTYLMEVDRVLRPGGYWVLSGPPINWKTWHKTWNRTKAELNAEQKRIEGIAESLCWEKKYEKGDIAIFRKKINDRSCDRSTPVDTCKRKDTDDVWYKEIETCVTPFPKVSNEEEVAGGKLKKFPERLFAVPPSISKGLINGVDEESYQEDINLWKKRVTGYKRINRLIGSTRYRNVMDMNAGLGGFAAALESPKSWVMNVIPTINKNTLSVVYERGLIGIYHDWCEGFSTYPRTYDFIHASGVFSLYQHSCKLEDILLETDRILRPEGIVIFRDEVDVLNDVRKIVDGMRWDTKLMDHEDGPLVPEKILVATKQYWVAGDDGNNSPSSSNSEEE

SEQ ID NO: 45235 - protein, 517 aa, Arabidopsis thaliana
  peptide (1)..(517): Ceres Seq. ID no. 12561857
  misc_feature (1)..(496): Pfam Name: Putative methyltransferase Pfam Description: Putative methyltransferase
  misc_feature (1)..(394): Homolog of NCBI NO: 30689679 NR Description: dehydration-induced protein family [Arabidopsis
  misc_feature (1)..(503): Homolog of NCBI NO: 37535962 NR Description: unknown protein [Oryza sativa (japonica
  misc_feature (1)..(499): Homolog of NCBI NO: 24413975 NR Description: hypothetical protein~similar to Oryza sativa
  misc_feature (1)..(514): Homolog of NCBI NO: 15235080 NR Description: putative protein; protein id: At4g10440.1
  misc_feature (421)..(500): Homolog of NCBI NO: 25372106 NR Description: T2P11.4 protein - Arabidopsis thaliana
  misc_feature (1)..(408): Homolog of NCBI NO: 25372106 NR Description: T2P11.4 protein - Arabidopsis thaliana
  misc_feature (1)..(508): Homolog of NCBI NO: 37537004 NR Description: hypothetical protein [Oryza sativa (japonica
  misc_feature (1)..(500): Homolog of NCBI NO: 18071395 NR Description: hypothetical protein [Oryza sativa]
  misc_feature (1)..(500): Homolog of NCBI NO: 18396075 NR Description: expressed protein
  misc_feature (1)..(500): Homolog of NCBI NO: 6752888 NR Description: unknown [Malus x domestica]
MKFPRENMIYRERHCPPDNEKLRCLVPAPKGYMTPFPWPKSRDYVHYANAPFKSLTVEKAGQNWVQFQGNVFKFPGGGTMFPQGADAYIEELASVIPIKDGSVRTALDTGCGVASWGAYMLKRNVLTMSFAPRDNHEAQVQFALERGVPAIIAVLGSILLPYPARAFDMAQCSRCLIPWTANEGTYLMEVDRVLRPGGYWVLSGPPINWKTWHKTWNRTKAELNAEQKRIEGIAESLCWEKKYEKGDIAIFRKKINDRSCDRSTPVDTCKRKDTDDVWYKEIETCVTPFPKVSNEEEVAGGKLKKFPERLFAVPPSISKGLINGVDEESYQEDINLWKKRVTGYKRINRLIGSTRYRNVMDMNAGLGGFAAALESPKSWVMNVIPTINKNTLSVVYERGLIGIYHDWCEGFSTYPRTYDFIHASGVFSLYQHSCKLEDILLETDRILRPEGIVIFRDEVDVLNDVRKIVDGMRWDTKLMDHEDGPLVPEKILVATKQYWVAGDDGNNSPSSSNSEEE

SEQ ID NO: 45236 - DNA, 1986 bp, Arabidopsis thaliana
  misc_feature (1)..(1986): Ceres Seq. ID no. 12560555
  misc_feature: MA Experiment ID: 20000180 Result: Down-regulated in Transcription
  misc_feature: MA Experiment 20000180 PARAMETER Experiment Name: At_Germinating_Seeds_P Parameter: Age (hr) Value: 24 vs. 0
  misc_feature: MA Experiment 20000180 PARAMETER Experiment Name: At_Germinating_Seeds_P Parameter: Tissue Value: Germinating Seeds
  misc_feature: MA Experiment ID: 20000227 Result: Up-regulated in Transcription
  misc_feature: MA Experiment 20000227 PARAMETER Experiment Name: At_Root-Tips-vs-Tops_P Parameter: Tissue Value: Root Tips vs. Root Tops
  misc_feature: MA Experiment ID: 20000234 Result: Up-regulated in Transcription
  misc_feature: MA Experiment 20000234 PARAMETER Experiment Name: At_Siliques_P Parameter: Age (day) Value: 21
  misc_feature: MA Experiment 20000234 PARAMETER Experiment Name: At_Siliques_P Parameter: Organism Value: A. thaliana
  misc_feature: MA Experiment 20000234 PARAMETER Experiment Name: At_Siliques_P Parameter: Plant Line Value: WS
  misc_feature: MA Experiment 20000234 PARAMETER Experiment Name: At_Siliques_P Parameter: Tissue Value: Less Than 5mm Siliques vs. Whole Plant
  misc_feature: MA Experiment ID: 20000264 Result: Up-regulated in Transcription
  misc_feature: MA Experiment 20000264 PARAMETER Experiment Name: At_Open_Flower_P Parameter: Age (day) Value: 21
  misc_feature: MA Experiment 20000264 PARAMETER Experiment Name: At_Open_Flower_P Parameter: Plant Line Value: WS
  misc_feature: MA Experiment 20000264 PARAMETER Experiment Name: At_Open_Flower_P Parameter: Tissue Value: Open Flower vs. Whole Plant
  misc_feature: MA Experiment ID: 20000265 Result: Up-regulated in Transcription
  misc_feature: MA Experiment 20000265 PARAMETER Experiment Name: At_Open_Flower_P Parameter: Age (day) Value: 21
  misc_feature: MA Experiment 20000265 PARAMETER Experiment Name: At_Open_Flower_P Parameter: Plant Line Value: WS
  misc_feature: MA Experiment 20000265 PARAMETER Experiment Name: At_Open_Flower_P Parameter: Tissue Value: Closed Flower vs. Whole Plant
  misc_feature: MA Experiment ID: 20000286 Result: Up-regulated in Transcription
  misc_feature: MA Experiment 20000286 PARAMETER Experiment Name: At_Open_Flower_P Parameter: Age (day) Value: 21
  misc_feature: MA Experiment 20000286 PARAMETER Experiment Name: At_Open_Flower_P Parameter: Plant Line Value: WS
  misc_feature: MA Experiment 20000286 PARAMETER Experiment Name: At_Open_Flower_P Parameter: Tissue Value: Half Open vs. Whole Plant
  misc_feature: MA Experiment ID: 20000437 Result: Down-regulated in Transcription
  misc_feature: MA Experiment 20000437 PARAMETER Experiment Name: At_Drought_P Parameter: Age (day) Value: 8
  misc_feature: MA Experiment 20000437 PARAMETER Experiment Name: At_Drought_P Parameter: Organism Value: A. thaliana
  misc_feature: MA Experiment 20000437 PARAMETER Experiment Name: At_Drought_P Parameter: Plant Line Value: WS
  misc_feature: MA Experiment 20000437 PARAMETER Experiment Name: At_Drought_P Parameter: Timepoint (hr) Value: 24
  misc_feature: MA Experiment 20000437 PARAMETER Experiment Name: At_Drought_P Parameter: Tissue Value: Whole Plant
  misc_feature: MA Experiment 20000437 PARAMETER Experiment Name: At_Drought_P Parameter: Treatment Value: Drought vs. No Drought
  misc_feature: MA Experiment ID: 20001451 Result: Down-regulated in Transcription
  misc_feature: MA Experiment 20001451 PARAMETER Experiment Name: At_Far-red-induction_P Parameter: Age (day) Value: 7
  misc_feature: MA Experiment 20001451 PARAMETER Experiment Name: At_Far-red-induction_P Parameter: Light Value: Far-red vs. White
  misc_feature: MA Experiment 20001451 PARAMETER Experiment Name: At_Far-red-induction_P Parameter: Organism Value: A. thaliana
  misc_feature: MA Experiment 20001451 PARAMETER Experiment Name: At_Far-red-induction_P Parameter: Plant Line Value: Columbia
  misc_feature: MA Experiment 20001451 PARAMETER Experiment Name: At_Far-red-induction_P Parameter: Timepoint (hr) Value: 24
  misc_feature: MA Experiment 20001451 PARAMETER Experiment Name: At_Far-red-induction_P Parameter: Tissue Value: Whole Plant
  misc_feature: MA Experiment ID: 20001557 Result: Up-regulated in Transcription
  misc_feature: MA Experiment 20001557 PARAMETER Experiment Name: At_Drought_Soil_Dry_P Parameter: Age (day) Value: 27
  misc_feature: MA Experiment 20001557 PARAMETER Experiment Name: At_Drought_Soil_Dry_P Parameter: Organism Value: A. thaliana
  misc_feature: MA Experiment 20001557 PARAMETER Experiment Name: At_Drought_Soil_Dry_P Parameter: Plant Line Value: WS
  misc_feature: MA Experiment 20001557 PARAMETER Experiment Name: At_Drought_Soil_Dry_P Parameter: Post Timepoint (hr) Value: 3
  misc_feature: MA Experiment 20001557 PARAMETER Experiment Name: At_Drought_Soil_Dry_P Parameter: Post-Treatment Value: Re-Water vs. No Drought
  misc_feature: MA Experiment 20001557 PARAMETER Experiment Name: At_Drought_Soil_Dry_P Parameter: Timepoint (day) Value: 13
  misc_feature: MA Experiment 20001557 PARAMETER Experiment Name: At_Drought_Soil_Dry_P Parameter: Treatment Value: Drought vs. No Drought
  misc_feature: MA Experiment ID: 20001558 Result: Up-regulated in Transcription
  misc_feature: MA Experiment 20001558 PARAMETER Experiment Name: At_Drought_Soil_Dry_P Parameter: Age (day) Value: 27
  misc_feature: MA Experiment 20001558 PARAMETER Experiment Name: At_Drought_Soil_Dry_P Parameter: Organism Value: A. thaliana
  misc_feature: MA Experiment 20001558 PARAMETER Experiment Name: At_Drought_Soil_Dry_P Parameter: Plant Line Value: WS
  misc_feature: MA Experiment 20001558 PARAMETER Experiment Name: At_Drought_Soil_Dry_P Parameter: Post Timepoint (hr) Value: 6
  misc_feature: MA Experiment 20001558 PARAMETER Experiment Name: At_Drought_Soil_Dry_P Parameter: Post-Treatment Value: Re-Water vs. No Drought
  misc_feature: MA Experiment 20001558 PARAMETER Experiment Name: At_Drought_Soil_Dry_P Parameter: Timepoint (day) Value: 13
  misc_feature: MA Experiment 20001558 PARAMETER Experiment Name: At_Drought_Soil_Dry_P Parameter: Treatment Value: Drought vs. No Drought
  misc_feature: MA Experiment ID: 20001757 Result: Up-regulated in Transcription
  misc_feature: MA Experiment 20001757 PARAMETER Experiment Name: At_50mM_NH4NO3_L-to-H_P Parameter: Timepoint (hr) Value: 6
  misc_feature: MA Experiment 20001757 PARAMETER Experiment Name: At_50mM_NH4NO3_L-to-H_P Parameter: Tissue Value: Leaf
  misc_feature: MA Experiment 20001757 PARAMETER Experiment Name: At_50mM_NH4NO3_L-to-H_P Parameter: Treatment Value: 50mM NH4NO3 vs 100mM Mannitol
ggtgtttgtagtctctctactctctagatcccatcccatttcttgatcagcctcgcgcattgtgtgcttacacgtaatcctctagcttctttcctcggtaatttccagagagattttcaacagaggaagcatgttcgctctttccaaggttttacgaagaacgcagagactccgactgggagcttgttctgctgtgttttcaaaagatatacaattaggaggagaaaggagctttgattccaattcgattgcttctactaaacgtgaagctgtgccaagattttacgagatctcctctttgagtaatcgtgctctttcctccagtgctggcactaaaagtgatcaagaggaagacgacctcgaagacggtttctcagaactggaaggttcaaagtctggccaaggttcaactagtagtgatgaagatgagggaaagctctccgctgatgaagaagaagaagaagaactagacctcattgaaaccgacgttagtagaaaaacagttgaaaagaaacaatctgagctatttaagaccattgtctccgcacccggtctgtctataggtagtgctcttgataaatgggtggaagaaggaaatgagatcactcgagttgagattgctaaggcaatgctccagctgcgcaggcgtcgcatgtatggaagagcgttacagatgtcagaatggttggaagcaaataagaaaattgaaatgactgagagagattatgcttctcggttagatctgacagttaagattcgtggtttagaaaagggagaagcttgtatgcagaagatcccaaaatcttttaaaggggaagtgctttaccgtaccctcttggcgaattgtgttgctgctggcaatgtgaagaaatccgaactggtgtttaacaaaatgaaggacttgggattccctctctctggatttacttgtgatcagatgcttctgctccacaagaggatcgacaggaagaaaattgctgatgtactattgctcatggagaaagaaaatatcaagccaagtcttctcacttacaaaatcctgattgatgtcaaaggtgcaacaaatgacataagtggtatggagcaaattctggagacaatgaaagatgaaggtgttgaactggacttccagacgcaagctctcactgctagacactattcgggagctggccttaaagataaagccgagaaagtcttgaaagagatggaaggtgaaagcttagaggcaaatcgccgggcattcaaagatttgctctccatctatgcctctcttgggagagaagatgaagtgaaaagaatatggaagatctgtgaatcaaagccctactttgaggaatcccttgctgcaatccaagcttttggaaagctcaataaagtgcaagaagcagaggcgatttttgagaagattgtgaagatggacagaagagcttcttctagtacttactccgttctcttgagggtttacgtagatcacaagatgctctcaaagggtaaggatctggttaaacgaatggctgagagcggttgcaggatcgaggcaacgacatgggatgcactcatcaagctctatgtggaagctggagaagttgaaaaggctgattctttgctggacaaggcatcaaaacagagccatacaaaactgatgatgaactccttcatgtatatcatggacgagtactcaaaacggggagatgttcataacacagagaagatattcctaaaaatgagggaagctgggtatacatctcggcttaggcagttccaagccctcatgcaggcttacataaacgccaaatctcctgcatatggaatgcgagatagattgaaggcggataatatctttccaaacaaatccatggctgcacagttggctcaaggtgatccatttaagaagacagctatctctgatattctggattgagtagtctctctccctacacttttcttctatctgcttgcaagaagtatctcatttgtcgtcctaac

SEQ ID NO: 45237 - protein, 596 aa, Arabidopsis thaliana
  peptide (1)..(596): Ceres Seq. ID no. 12560556
  misc_feature (507)..(541): Pfam Name: PPR repeat Pfam Description: PPR repeat
  misc_feature (140)..(539): Homolog of NCBI NO: 15225409 NR Description: hypothetical protein; protein id: At2g20710.1
  misc_feature (119)..(575): Homolog of NCBI NO: 15219808 NR Description: hypothetical protein; protein id: At1g60770.1
  misc_feature (143)..(555): Homolog of NCBI NO: 34905294 NR Description: putative DNA-binding protein
  misc_feature (227)..(580): Homolog of NCBI NO: 34394024 NR Description: putative DNA-binding protein
  misc_feature (51)..(580): Homolog of NCBI NO: 34900334 NR Description: P0592C06.16 [Oryza sativa (japonica
  misc_feature (1)..(596): Homolog of NCBI NO: 22331104 NR Description: DNA-binding protein, putative
  misc_feature (66)..(596): Homolog of NCBI NO: 34903362 NR Description: unnamed protein product [Oryza sativa (japonica
  misc_feature (24)..(596): Homolog of NCBI NO: 6958202 NR Description: DNA-binding protein [Triticum aestivum]
  misc_feature (12)..(596): Homolog of NCBI NO: 15218196 NR Description: hypothetical protein; protein id: At1g15480.1
  misc_feature (1)..(596): Homolog of NCBI NO: 15220095 NR Description: hypothetical protein
MFALSKVLRRTQRLRLGACSAVFSKDIQLGGERSFDSNSIASTKREAVPRFYEISSLSNRALSSSAGTKSDQEEDDLEDGFSELEGSKSGQGSTSSDEDEGKLSADEEEEEELDLIETDVSRKTVEKKQSELFKTIVSAPGLSIGSALDKWVEEGNEITRVEIAKAMLQLRRRRMYGRALQMSEWLEANKKIEMTERDYASRLDLTVKIRGLEKGEACMQKIPKSFKGEVLYRTLLANCVAAGNVKKSELVFNKMKDLGFPLSGFTCDQMLLLHKRIDRKKIADVLLLMEKENIKPSLLTYKILIDVKGATNDISGMEQILETMKDEGVELDFQTQALTARHYSGAGLKDKAEKVLKEMEGESLEANRRAFKDLLSIYASLGREDEVKRIWKICESKPYFEESLAAIQAFGKLNKVQEAEAIFEKIVKMDRRASSSTYSVLLRVYVDHKMLSKGKDLVKRMAESGCRIEATTWDALIKLYVEAGEVEKADSLLDKASKQSHTKLMMNSFMYIMDEYSKRGDVHNTEKIFLKMREAGYTSRLRQFQALMQAYINAKSPAYGMRDRLKADNIFPNKSMAAQLAQGDPFKKTAISDILD

SEQ ID NO: 45238 - protein, 430 aa, Arabidopsis thaliana
  peptide (1)..(430): Ceres Seq. ID no. 12560557
  misc_feature (341)..(375): Pfam Name: PPR repeat Pfam Description: PPR repeat
  misc_feature (1)..(373): Homolog of NCBI NO: 15225409 NR Description: hypothetical protein; protein id: At2g20710.1
  misc_feature (1)..(409): Homolog of NCBI NO: 15219808 NR Description: hypothetical protein; protein id: At1g60770.1
  misc_feature (1)..(389): Homolog of NCBI NO: 34905294 NR Description: putative DNA-binding protein
  misc_feature (61)..(414): Homolog of NCBI NO: 34394024 NR Description: putative DNA-binding protein
  misc_feature (1)..(414): Homolog of NCBI NO: 34900334 NR Description: P0592C06.16 [Oryza sativa (japonica
  misc_feature (1)..(430): Homolog of NCBI NO: 22331104 NR Description: DNA-binding protein, putative
  misc_feature (1)..(430): Homolog of NCBI NO: 34903362 NR Description: unnamed protein product [Oryza sativa (japonica
  misc_feature (1)..(430): Homolog of NCBI NO: 6958202 NR Description: DNA-binding protein [Triticum aestivum]
  misc_feature (1)..(430): Homolog of NCBI NO: 15218196 NR Description: hypothetical protein; protein id: At1g15480.1
  misc_feature (1)..(430): Homolog of NCBI NO: 15220095 NR Description: hypothetical protein
MLQLRRRRMYGRALQMSEWLEANKKIEMTERDYASRLDLTVKIRGLEKGEACMQKIPKSFKGEVLYRTLLANCVAAGNVKKSELVFNKMKDLGFPLSGFTCDQMLLLHKRIDRKKIADVLLLMEKENIKPSLLTYKILIDVKGATNDISGMEQILETMKDEGVELDFQTQALTARHYSGAGLKDKAEKVLKEMEGESLEANRRAFKDLLSIYASLGREDEVKRIWKICESKPYFEESLAAIQAFGKLNKVQEAEAIFEKIVKMDRRASSSTYSVLLRVYVDHKMLSKGKDLVKRMAESGCRIEATTWDALIKLYVEAGEVEKADSLLDKASKQSHTKLMMNSFMYIMDEYSKRGDVHNTEKIFLKMREAGYTSRLRQFQALMQAYINAKSPAYGMRDRLKADNIFPNKSMAAQLAQGDPFKKTAISDILD

SEQ ID NO: 45239 - protein, 422 aa, Arabidopsis thaliana
  peptide (1)..(422): Ceres Seq. ID no. 12560558
  misc_feature (333)..(367): Pfam Name: PPR repeat Pfam Description: PPR repeat
  misc_feature (1)..(365): Homolog of NCBI NO: 15225409 NR Description: hypothetical protein; protein id: At2g20710.1
  misc_feature (1)..(401): Homolog of NCBI NO: 15219808 NR Description: hypothetical protein; protein id: At1g60770.1
  misc_feature (1)..(381): Homolog of NCBI NO: 34905294 NR Description: putative DNA-binding protein
  misc_feature (53)..(406): Homolog of NCBI NO: 34394024 NR Description: putative DNA-binding protein
  misc_feature (1)..(406): Homolog of NCBI NO: 34900334 NR Description: P0592C06.16 [Oryza sativa (japonica
  misc_feature (1)..(422): Homolog of NCBI NO: 22331104 NR Description: DNA-binding protein, putative
  misc_feature (1)..(422): Homolog of NCBI NO: 34903362 NR Description: unnamed protein product [Oryza sativa (japonica
  misc_feature (1)..(422): Homolog of NCBI NO: 6958202 NR Description: DNA-binding protein [Triticum aestivum]
  misc_feature (1)..(422): Homolog of NCBI NO: 15218196 NR Description: hypothetical protein; protein id: At1g15480.1
  misc_feature (1)..(422): Homolog of NCBI NO: 15220095 NR Description: hypothetical protein
MYGRALQMSEWLEANKKIEMTERDYASRLDLTVKIRGLEKGEACMQKIPKSFKGEVLYRTLLANCVAAGNVKKSELVFNKMKDLGFPLSGFTCDQMLLLHKRIDRKKIADVLLLMEKENIKPSLLTYKILIDVKGATNDISGMEQILETMKDEGVELDFQTQALTARHYSGAGLKDKAEKVLKEMEGESLEANRRAFKDLLSIYASLGREDEVKRIWKICESKPYFEESLAAIQAFGKLNKVQEAEAIFEKIVKMDRRASSSTYSVLLRVYVDHKMLSKGKDLVKRMAESGCRIEATTWDALIKLYVEAGEVEKADSLLDKASKQSHTKLMMNSFMYIMDEYSKRGDVHNTEKIFLKMREAGYTSRLRQFQALMQAYINAKSPAYGMRDRLKADNIFPNKSMAAQLAQGDPFKKTAISDILD

SEQ ID NO: 45240 - DNA, 1000 bp, Arabidopsis thaliana
  misc_feature (1)..(1000): Ceres Seq. ID no. 12604056
  misc_feature: MA Experiment ID: 108464 Result: Up-regulated in Transcription
  misc_feature: MA Experiment 108464 PARAMETER Experiment Name: At_Germinating_Seeds_cDNA_P Parameter: Age (day) Value: 4 vs. 0
  misc_feature: MA Experiment 108464 PARAMETER Experiment Name: At_Germinating_Seeds_cDNA_P Parameter: Tissue Value: Germinating Seeds
  misc_feature: MA Experiment ID: 108573 Result: Up-regulated in Transcription
  misc_feature: MA Experiment 108573 PARAMETER Experiment Name: At_Drought_cDNA_P Parameter: Timepoint (hr) Value: 6
  misc_feature: MA Experiment 108573 PARAMETER Experiment Name: At_Drought_cDNA_P Parameter: Tissue Value: Aerial
  misc_feature: MA Experiment 108573 PARAMETER Experiment Name: At_Drought_cDNA_P Parameter: Treatment Value: Drought vs. No Drought
  misc_feature: MA Experiment ID: 20000087 Result: Up-regulated in Transcription
  misc_feature: MA Experiment 20000087 PARAMETER Experiment Name: At_100uM_ABA_Mutants_cDNA_P Parameter: Plant Line Value: WS
  misc_feature: MA Experiment 20000087 PARAMETER Experiment Name: At_100uM_ABA_Mutants_cDNA_P Parameter: Timepoint (hr) Value: 6
  misc_feature: MA Experiment 20000087 PARAMETER Experiment Name: At_100uM_ABA_Mutants_cDNA_P Parameter: Tissue Value: Aerial
  misc_feature: MA Experiment 20000087 PARAMETER Experiment Name: At_100uM_ABA_Mutants_cDNA_P Parameter: Treatment Value: 100uM ABA vs. No Treatment
  misc_feature: MA Experiment ID: 20000112 Result: Up-regulated in Transcription
  misc_feature: MA Experiment 20000112 PARAMETER Experiment Name: At_42deg_Heat_cDNA_P Parameter: Temperature (deg C) Value: 42 vs. 22
  misc_feature: MA Experiment 20000112 PARAMETER Experiment Name: At_42deg_Heat_cDNA_P Parameter: Timepoint (hr) Value: 2
  misc_feature: MA Experiment 20000112 PARAMETER Experiment Name: At_42deg_Heat_cDNA_P Parameter: Tissue Value: Aerial
  misc_feature: MA Experiment ID: 20000113 Result: Up-regulated in Transcription
  misc_feature: MA Experiment 20000113 PARAMETER Experiment Name: At_42deg_Heat_cDNA_P Parameter: Temperature (deg C) Value: 42 vs. 22
  misc_feature: MA Experiment 20000113 PARAMETER Experiment Name: At_42deg_Heat_cDNA_P Parameter: Timepoint (hr) Value: 8
  misc_feature: MA Experiment 20000113 PARAMETER Experiment Name: At_42deg_Heat_cDNA_P Parameter: Tissue Value: Aerial
  misc_feature: MA Experiment ID: 20000234 Result: Down-regulated in Transcription
  misc_feature: MA Experiment 20000234 PARAMETER Experiment Name: At_Siliques_P Parameter: Age (day) Value: 21
  misc_feature: MA Experiment 20000234 PARAMETER Experiment Name: At_Siliques_P Parameter: Organism Value: A. thaliana
  misc_feature: MA Experiment 20000234 PARAMETER Experiment Name: At_Siliques_P Parameter: Plant Line Value: WS
  misc_feature: MA Experiment 20000234 PARAMETER Experiment Name: At_Siliques_P Parameter: Tissue Value: Less Than 5mm Siliques vs. Whole Plant
  misc_feature: MA Experiment ID: 20000264 Result: Down-regulated in Transcription
  misc_feature: MA Experiment 20000264 PARAMETER Experiment Name: At_Open_Flower_P Parameter: Age (day) Value: 21
  misc_feature: MA Experiment 20000264 PARAMETER Experiment Name: At_Open_Flower_P Parameter: Plant Line Value: WS
  misc_feature: MA Experiment 20000264 PARAMETER Experiment Name: At_Open_Flower_P Parameter: Tissue Value: Open Flower vs. Whole Plant
  misc_feature: MA Experiment ID: 20000265 Result: Down-regulated in Transcription
  misc_feature: MA Experiment 20000265 PARAMETER Experiment Name: At_Open_Flower_P Parameter: Age (day) Value: 21
  misc_feature: MA Experiment 20000265 PARAMETER Experiment Name: At_Open_Flower_P Parameter: Plant Line Value: WS
  misc_feature: MA Experiment 20000265 PARAMETER Experiment Name: At_Open_Flower_P Parameter: Tissue Value: Closed Flower vs. Whole Plant
  misc_feature: MA Experiment ID: 20000286 Result: Down-regulated in Transcription
  misc_feature: MA Experiment 20000286 PARAMETER Experiment Name: At_Open_Flower_P Parameter: Age (day) Value: 21
  misc_feature: MA Experiment 20000286 PARAMETER Experiment Name: At_Open_Flower_P Parameter: Plant Line Value: WS
  misc_feature: MA Experiment 20000286 PARAMETER Experiment Name: At_Open_Flower_P Parameter: Tissue Value: Half Open vs. Whole Plant
  misc_feature: MA Experiment ID: 20000495 Result: Up-regulated in Transcription
  misc_feature: MA Experiment 20000495 PARAMETER Experiment Name: At_Guard_Cells_P Parameter: Harvest Date Value: 8/2/2002
  misc_feature: MA Experiment 20000495 PARAMETER Experiment Name: At_Guard_Cells_P Parameter: Organism Value: A. thaliana
  misc_feature: MA Experiment 20000495 PARAMETER Experiment Name: At_Guard_Cells_P Parameter: Tissue Value: Guard Cells vs. Leaves
  misc_feature: MA Experiment ID: 20001557 Result: Down-regulated in Transcription
  misc_feature: MA Experiment 20001557 PARAMETER Experiment Name: At_Drought_Soil_Dry_P Parameter: Age (day) Value: 27
  misc_feature: MA Experiment 20001557 PARAMETER Experiment Name: At_Drought_Soil_Dry_P Parameter: Organism Value: A. thaliana
  misc_feature: MA Experiment 20001557 PARAMETER Experiment Name: At_Drought_Soil_Dry_P Parameter: Plant Line Value: WS
  misc_feature: MA Experiment 20001557 PARAMETER Experiment Name: At_Drought_Soil_Dry_P Parameter: Post Timepoint (hr) Value: 3
  misc_feature: MA Experiment 20001557 PARAMETER Experiment Name: At_Drought_Soil_Dry_P Parameter: Post-Treatment Value: Re-Water vs. No Drought
  misc_feature: MA Experiment 20001557 PARAMETER Experiment Name: At_Drought_Soil_Dry_P Parameter: Timepoint (day) Value: 13
  misc_feature: MA Experiment 20001557 PARAMETER Experiment Name: At_Drought_Soil_Dry_P Parameter: Treatment Value: Drought vs. No Drought
  misc_feature: MA Experiment ID: 20001558 Result: Down-regulated in Transcription
  misc_feature: MA Experiment 20001558 PARAMETER Experiment Name: At_Drought_Soil_Dry_P Parameter: Age (day) Value: 27
  misc_feature: MA Experiment 20001558 PARAMETER Experiment Name: At_Drought_Soil_Dry_P Parameter: Organism Value: A. thaliana
  misc_feature: MA Experiment 20001558 PARAMETER Experiment Name: At_Drought_Soil_Dry_P Parameter: Plant Line Value: WS
  misc_feature: MA Experiment 20001558 PARAMETER Experiment Name: At_Drought_Soil_Dry_P Parameter: Post Timepoint (hr) Value: 6
  misc_feature: MA Experiment 20001558 PARAMETER Experiment Name: At_Drought_Soil_Dry_P Parameter: Post-Treatment Value: Re-Water vs. No Drought
  misc_feature: MA Experiment 20001558 PARAMETER Experiment Name: At_Drought_Soil_Dry_P Parameter: Timepoint (day) Value: 13
  misc_feature: MA Experiment 20001558 PARAMETER Experiment Name: At_Drought_Soil_Dry_P Parameter: Treatment Value: Drought vs. No Drought
  misc_feature: MA Experiment ID: 20001559 Result: Up-regulated in Transcription
  misc_feature: MA Experiment 20001559 PARAMETER Experiment Name: At_Drought_Soil_Dry_P Parameter: Age (day) Value: 28
  misc_feature: MA Experiment 20001559 PARAMETER Experiment Name: At_Drought_Soil_Dry_P Parameter: Organism Value: A. thaliana
  misc_feature: MA Experiment 20001559 PARAMETER Experiment Name: At_Drought_Soil_Dry_P Parameter: Plant Line Value: WS
  misc_feature: MA Experiment 20001559 PARAMETER Experiment Name: At_Drought_Soil_Dry_P Parameter: Post Timepoint (hr) Value: 29
  misc_feature: MA Experiment 20001559 PARAMETER Experiment Name: At_Drought_Soil_Dry_P Parameter: Post-Treatment Value: Re-Water vs. No Drought
  misc_feature: MA Experiment 20001559 PARAMETER Experiment Name: At_Drought_Soil_Dry_P Parameter: Timepoint (day) Value: 14
  misc_feature: MA Experiment 20001559 PARAMETER Experiment Name: At_Drought_Soil_Dry_P Parameter: Treatment Value: Drought vs. No Drought
  misc_feature: MA Experiment ID: 20001560 Result: Down-regulated in Transcription
  misc_feature: MA Experiment 20001560 PARAMETER Experiment Name: At_Drought_Soil_Dry_P Parameter: Age (day) Value: 28
  misc_feature: MA Experiment 20001560 PARAMETER Experiment Name: At_Drought_Soil_Dry_P Parameter: Organism Value: A. thaliana
  misc_feature: MA Experiment 20001560 PARAMETER Experiment Name: At_Drought_Soil_Dry_P Parameter: Plant Line Value: WS
  misc_feature: MA Experiment 20001560 PARAMETER Experiment Name: At_Drought_Soil_Dry_P Parameter: Post Timepoint (hr) Value: None
  misc_feature: MA Experiment 20001560 PARAMETER Experiment Name: At_Drought_Soil_Dry_P Parameter: Post-Treatment Value: None
  misc_feature: MA Experiment 20001560 PARAMETER Experiment Name: At_Drought_Soil_Dry_P Parameter: Timepoint (day) Value: 14
  misc_feature: MA Experiment 20001560 PARAMETER Experiment Name: At_Drought_Soil_Dry_P Parameter: Treatment Value: Drought vs. No Drought
  misc_feature: MA Experiment ID: 20001911 Result: Up-regulated in Transcription
  misc_feature: MA Experiment 20001911 PARAMETER Experiment Name: At_Drought_Reproduction_P Parameter: Age (day) Value: 40
  misc_feature: MA Experiment 20001911 PARAMETER Experiment Name: At_Drought_Reproduction_P Parameter: Organism Value: A. thaliana
  misc_feature: MA Experiment 20001911 PARAMETER Experiment Name: At_Drought_Reproduction_P Parameter: Plant Line Value: WS
  misc_feature: MA Experiment 20001911 PARAMETER Experiment Name: At_Drought_Reproduction_P Parameter: Timepoint (day) Value: 10
  misc_feature: MA Experiment 20001911 PARAMETER Experiment Name: At_Drought_Reproduction_P Parameter: Tissue Value: Flowers
  misc_feature: MA Experiment 20001911 PARAMETER Experiment Name: At_Drought_Reproduction_P Parameter: Treatment Value: Drought vs. No Drought
tctctcctcctaccaagaaatcatcgtcttcttcttcatctattcaggatcgatccggcttgagatttattacaaattcgtccttctatttgctccaaaagttcgacaatttcgtaggggcaaagatggacgctgattccaagagatttctagctacgcttcgatcccgatctgaaatgttaatgggctttgaagaaatagatggagatgatgatttccaggaggagtttgcttgcccgttctgtgcagaatcgtatgatatcatcgggttgtgctgtcacatagatgatgaacatactttagagtcgaagaacgcggtatgccctgtttgttctcttaaagtgggagttgatatcgtagcacacaaacgcttcaccatgggattttacttgcagcgaaagagaaagtcacgaaaaagcggtaccaattcgacactttcacttcttcggaaagaactaagagaaggagatctacaaaggttgttaggatttacttctcgtaatggttctgttgcgtcaagtgtaactcctgatcctctcctgtcgtcatttatctcacctacacgatcacagagttctcctgcgccacgccaaaccaaaaacgtatccgaggataaacagatagagcgcaagagacaagtgttcatctcaccggtctcgttaaaagatcgggaagagaggaggcacaaatcagagtttgttcagaggctcttgtcatcagccattttcgatgaagtctaatgcacatacaaagattgagaacatggaggaactaattcgaatcagacttgagagaatctggtttcgagaaaaacaatggttgggatgagaagaagacggagaagagcgagatgcagctatgttatcaatatctatatctatctatgtattgtgtctgtttggtgctactaaatacattgcgtagaaatgtgttttcttaagtttattaagcaattgaaaagtaagatataggaagaagaataagtcctcttgtctgtagc

SEQ ID NO: 45241 - protein, 245 aa, Arabidopsis thaliana
  peptide (1)..(245): Ceres Seq. ID no. 12604057
  misc_feature (42)..(241): Pfam Name: Drought induced 19 protein (Di19) Pfam Description: Drought induced 19 protein (Di19)
  misc_feature (54)..(244): Homolog of NCBI NO: 15239827 NR Description: drought-induced protein Di19-like protein
  misc_feature (54)..(244): Homolog of NCBI NO: 15230782 NR Description: unknown protein; protein id: At3g06760.1
  misc_feature (54)..(244): Homolog of NCBI NO: 18377875 NR Description: AT3g06760/F3E22_10 [Arabidopsis thaliana]
  misc_feature (41)..(244): Homolog of NCBI NO: 15240426 NR Description: drought-induced protein - like; protein id:
  misc_feature (41)..(244): Homolog of NCBI NO: 28393233 NR Description: unknown protein [Arabidopsis thaliana]
  misc_feature (41)..(245): Homolog of NCBI NO: 25992529 NR Description: fiber protein Fb2 [Gossypium barbadense]
  misc_feature (42)..(138): Homolog of NCBI NO: 30696097 NR Description: drought-induced protein -related [Arabidopsis
  misc_feature (42)..(245): Homolog of NCBI NO: 1076316 NR Description: drought-induced protein Di19 - Arabidopsis
  misc_feature (42)..(245): Homolog of NCBI NO: 15028023 NR Description: unknown protein [Arabidopsis thaliana]
  misc_feature (42)..(245): Homolog of NCBI NO: 30696095 NR Description: drought-induced protein -related [Arabidopsis
SPPTKKSSSSSSSIQDRSGLRFITNSSFYLLQKFDNFVGAKMDADSKRFLATLRSRSEMLMGFEEIDGDDDFQEEFACPFCAESYDIIGLCCHIDDEHTLESKNAVCPVCSLKVGVDIVAHKRFTMGFYLQRKRKSRKSGTNSTLSLLRKELREGDLQRLLGFTSRNGSVASSVTPDPLLSSFISPTRSQSSPAPRQTKNVSEDKQIERKRQVFISPVSLKDREERRHKSEFVQRLLSSAIFDEV

SEQ ID NO: 45242 - protein, 204 aa, Arabidopsis thaliana
  peptide (1)..(204): Ceres Seq. ID no. 12604058
  misc_feature (1)..(200): Pfam Name: Drought induced 19 protein (Di19) Pfam Description: Drought induced 19 protein (Di19)
  misc_feature (13)..(203): Homolog of NCBI NO: 15239827 NR Description: drought-induced protein Di19-like protein
  misc_feature (13)..(203): Homolog of NCBI NO: 15230782 NR Description: unknown protein; protein id: At3g06760.1
  misc_feature (13)..(203): Homolog of NCBI NO: 18377875 NR Description: AT3g06760/F3E22_10 [Arabidopsis thaliana]
  misc_feature (1)..(203): Homolog of NCBI NO: 15240426 NR Description: drought-induced protein - like; protein id:
  misc_feature (1)..(203): Homolog of NCBI NO: 28393233 NR Description: unknown protein [Arabidopsis thaliana]
  misc_feature (1)..(204): Homolog of NCBI NO: 25992529 NR Description: fiber protein Fb2 [Gossypium barbadense]
  misc_feature (1)..(97): Homolog of NCBI NO: 30696097 NR Description: drought-induced protein -related [Arabidopsis
  misc_feature (1)..(204): Homolog of NCBI NO: 1076316 NR Description: drought-induced protein Di19 - Arabidopsis
  misc_feature (1)..(204): Homolog of NCBI NO: 15028023 NR Description: unknown protein [Arabidopsis thaliana]
  misc_feature (1)..(204): Homolog of NCBI NO: 30696095 NR Description: drought-induced protein -related [Arabidopsis
MDADSKRFLATLRSRSEMLMGFEEIDGDDDFQEEFACPFCAESYDIIGLCCHIDDEHTLESKNAVCPVCSLKVGVDIVAHKRFTMGFYLQRKRKSRKSGTNSTLSLLRKELREGDLQRLLGFTSRNGSVASSVTPDPLLSSFISPTRSQSSPAPRQTKNVSEDKQIERKRQVFISPVSLKDREERRHKSEFVQRLLSSAIFDEV

SEQ ID NO: 45243 - protein, 187 aa, Arabidopsis thaliana
  peptide (1)..(187): Ceres Seq. ID no. 12604059
  misc_feature (1)..(183): Pfam Name: Drought induced 19 protein (Di19) Pfam Description: Drought induced 19 protein (Di19)
  misc_feature (1)..(186): Homolog of NCBI NO: 15239827 NR Description: drought-induced protein Di19-like protein
  misc_feature (1)..(186): Homolog of NCBI NO: 15230782 NR Description: unknown protein; protein id: At3g06760.1
  misc_feature (1)..(186): Homolog of NCBI NO: 18377875 NR Description: AT3g06760/F3E22_10 [Arabidopsis thaliana]
  misc_feature (1)..(186): Homolog of NCBI NO: 15240426 NR Description: drought-induced protein - like; protein id:
  misc_feature (1)..(186): Homolog of NCBI NO: 28393233 NR Description: unknown protein [Arabidopsis thaliana]
  misc_feature (1)..(187): Homolog of NCBI NO: 25992529 NR Description: fiber protein Fb2 [Gossypium barbadense]
  misc_feature (1)..(80): Homolog of NCBI NO: 30696097 NR Description: drought-induced protein -related [Arabidopsis
  misc_feature (1)..(187): Homolog of NCBI NO: 1076316 NR Description: drought-induced protein Di19 - Arabidopsis
  misc_feature (1)..(187): Homolog of NCBI NO: 15028023 NR Description: unknown protein [Arabidopsis thaliana]
  misc_feature (1)..(187): Homolog of NCBI NO: 30696095 NR Description: drought-induced protein -related [Arabidopsis
MLMGFEEIDGDDDFQEEFACPFCAESYDIIGLCCHIDDEHTLESKNAVCPVCSLKVGVDIVAHKRFTMGFYLQRKRKSRKSGTNSTLSLLRKELREGDLQRLLGFTSRNGSVASSVTPDPLLSSFISPTRSQSSPAPRQTKNVSEDKQIERKRQVFISPVSLKDREERRHKSEFVQRLLSSAIFDEV

SEQ ID NO: 45244 - DNA, 2301 bp, Arabidopsis thaliana
  misc_feature (1)..(2301): Ceres Seq. ID no. 12560567
  misc_feature: MA Experiment ID: 20000171 Result: Down-regulated in Transcription
  misc_feature: MA Experiment 20000171 PARAMETER Experiment Name: At_42deg_Heat_P Parameter: Age (day) Value: 14
  misc_feature: MA Experiment 20000171 PARAMETER Experiment Name: At_42deg_Heat_P Parameter: Organism Value: A. thaliana
  misc_feature: MA Experiment 20000171 PARAMETER Experiment Name: At_42deg_Heat_P Parameter: Plant Line Value: WS
  misc_feature: MA Experiment 20000171 PARAMETER Experiment Name: At_42deg_Heat_P Parameter: Temperature (deg C) Value: 42 vs. 22
  misc_feature: MA Experiment 20000171 PARAMETER Experiment Name: At_42deg_Heat_P Parameter: Timepoint (hr) Value: 1
  misc_feature: MA Experiment 20000171 PARAMETER Experiment Name: At_42deg_Heat_P Parameter: Tissue Value: Aerial
  misc_feature: MA Experiment ID: 20000173 Result: Down-regulated in Transcription
  misc_feature: MA Experiment 20000173 PARAMETER Experiment Name: At_42deg_Heat_P Parameter: Age (day) Value: 14
  misc_feature: MA Experiment 20000173 PARAMETER Experiment Name: At_42deg_Heat_P Parameter: Organism Value: A. thaliana
  misc_feature: MA Experiment 20000173 PARAMETER Experiment Name: At_42deg_Heat_P Parameter: Plant Line Value: WS
  misc_feature: MA Experiment 20000173 PARAMETER Experiment Name: At_42deg_Heat_P Parameter: Temperature (deg C) Value: 42 vs. 22
  misc_feature: MA Experiment 20000173 PARAMETER Experiment Name: At_42deg_Heat_P Parameter: Timepoint (hr) Value: 6
  misc_feature: MA Experiment 20000173 PARAMETER Experiment Name: At_42deg_Heat_P Parameter: Tissue Value: Aerial
  misc_feature: MA Experiment ID: 20000439 Result: Up-regulated in Transcription
  misc_feature: MA Experiment 20000439 PARAMETER Experiment Name: At_Roots__P Parameter: Age (day) Value: 14 vs. 21
  misc_feature: MA Experiment 20000439 PARAMETER Experiment Name: At_Roots__P Parameter: Organism Value: A. thaliana
  misc_feature: MA Experiment 20000439 PARAMETER Experiment Name: At_Roots__P Parameter: Tissue Value: Roots vs. Whole Plant
  misc_feature: MA Experiment ID: 20000495 Result: Up-regulated in Transcription
  misc_feature: MA Experiment 20000495 PARAMETER Experiment Name: At_Guard_Cells_P Parameter: Harvest Date Value: 8/2/2002
  misc_feature: MA Experiment 20000495 PARAMETER Experiment Name: At_Guard_Cells_P Parameter: Organism Value: A. thaliana
  misc_feature: MA Experiment 20000495 PARAMETER Experiment Name: At_Guard_Cells_P Parameter: Tissue Value: Guard Cells vs. Leaves
  misc_feature: MA Experiment ID: 20001248 Result: Up-regulated in Transcription
  misc_feature: MA Experiment 20001248 PARAMETER Experiment Name: At_Far-red-induction_P Parameter: Age (day) Value: 7
  misc_feature: MA Experiment 20001248 PARAMETER Experiment Name: At_Far-red-induction_P Parameter: Light Value: Far-red vs. White
  misc_feature: MA Experiment 20001248 PARAMETER Experiment Name: At_Far-red-induction_P Parameter: Organism Value: A. thaliana
  misc_feature: MA Experiment 20001248 PARAMETER Experiment Name: At_Far-red-induction_P Parameter: Plant Line Value: Columbia
  misc_feature: MA Experiment 20001248 PARAMETER Experiment Name: At_Far-red-induction_P Parameter: Timepoint (hr) Value: 4
  misc_feature: MA Experiment 20001248 PARAMETER Experiment Name: At_Far-red-induction_P Parameter: Tissue Value: Whole Plant
  misc_feature: MA Experiment ID: 20001450 Result: Up-regulated in Transcription
  misc_feature: MA Experiment 20001450 PARAMETER Experiment Name: At_Far-red-induction_P Parameter: Age (day) Value: 7
  misc_feature: MA Experiment 20001450 PARAMETER Experiment Name: At_Far-red-induction_P Parameter: Light Value: Far-red vs. White
  misc_feature: MA Experiment 20001450 PARAMETER Experiment Name: At_Far-red-induction_P Parameter: Organism Value: A. thaliana
  misc_feature: MA Experiment 20001450 PARAMETER Experiment Name: At_Far-red-induction_P Parameter: Plant Line Value: Columbia
  misc_feature: MA Experiment 20001450 PARAMETER Experiment Name: At_Far-red-induction_P Parameter: Timepoint (hr) Value: 8
  misc_feature: MA Experiment 20001450 PARAMETER Experiment Name: At_Far-red-induction_P Parameter: Tissue Value: Whole Plant
atcaaaaacttttacctctcattggtttcttctttatcacactgttacgcttggattctcatttcttcaagttcataacgctcggatcaatcaggaagacgaacttgaactttctttttttcatcattacccaaagctatgaggctcacaccaccaatagctccgccgtcatgaatccttctcttccaggtcaacacaagtcagagctccaaaaatggagtcatgcgattgttttgagacgcatgtgaatcaagatgatctgttagtgaagtaccaatacatctcagatgcgttgattgctcttgcatacttctcaatcccactcgagcttatctatttcgtgcaaaagtctgctttcttcccttacaaatgggtgcttatgcagtttggagcctttatcattctctgtggagctacgcatttcatcaacctatggatgttcttcatgcattccaaagccgttgccattgtcatgactattgctaaagtctcttgcgcggttgtgtcgtgtgctaccgcgttgatgttggttcatattattcctgatcttctcagtgttaagaacagggaattgtttctcaagaagaaagctgatgagttagatagagaaatgggtcttattttaacacaagaggagactggtaggcatgttaggatgcttactcatggaattagaagaactcttgataggcatactattttaagaaccactcttgttgagcttggtaaaactctttgtcttgaggaatgtgcgttgtggatgccttctcaaagtggtttatatttgcagctttctcatactttgagtcataaaatacaagttggaagcagtgtgccgataaatctcccgattattaatgaactcttcaatagcgctcaagctatgcacatacctcattcttgtcctttggctaagattgggcctccggttgggagatattcacctcctgaggttgtttctgtccgtgttcctcttttacatctctctaatttccaaggcagtgactggtcggatctctctggcaaaggttacgctatcatggtcctgattctcccaaccgatggtgcaagaaaatggagagaccatgagttagagcttgtagaaaacgtggcggatcaggtggctgtggctctctcacatgctgcaattttggaagaatccatgcacgctcgtgaccagcttatggagcagaattttgctttagacaaggctcgtcaagaggctgagatggcagtacatgctcgaaatgatttcctagctgttatgaaccacgagatgaggacaccgatgcatgccatcatctctctttcttctcttctccttgagactgagctgtctccagagcaaagagttatgatcgagacaatactgaaaagcagcaatcttgtggctacactaatcagcgacgttctggatctttcgagattggaagatgggagcttactcttggaaaatgaaccattcagtctacaagcgatctttgaagaggtcatctctttgataaagccaatcgcatcagtgaagaaactatcaacgaatctgattctgtctgcagacttaccaacttatgctattggtgatgagaaacgtctgatgcaaacaattcttaacatcatgggcaacgctgtgaaatttactaaggaaggctacatctccataatagcctctatcatgaaacccgagtccttacaagaattaccatctccagaattttttccagttctcagtgacagtcacttctacctatgtgtgcaggtgaaggacacagggtgtggaattcacacacaagacattcctttgctctttaccaaatttgtacagcctcggaccggaactcagaggaaccattccggtggaggactcgggctagctctctgtaaacggtttgtcgggctaatgggaggatacatgtggatagaaagtgaaggcctagagaaaggctgcacagcttcgttcatcatcaggcttggtatctgcaacggtccaagcagtagcagtggttcaatggcgctacatcttgcagctaaatcacaaaccagaccgtggaactggtgatacattacgttggaaagacttgtattgaggtgagactttttaactacacagcagcaagagaaagaagaaaatacatgaccggacggtgtgatctaacttattggattttgttggatgtaatatgtaaaataaaaatcctatatacggggagaggtaccttatctgttctcactatattttattgaacattactttagagaatatgttttggaattcactactaaataaacgatataaatcttcac

SEQ ID NO: 45245 - protein, 613 aa, Arabidopsis thaliana
  peptide (1)..(613): Ceres Seq. ID no. 12560568
  misc_feature (158)..(307): Pfam Name: GAF domain Pfam Description: GAF domain
  misc_feature (158)..(307): Pfam Name: GAF domain Pfam Description: GAF domain
  misc_feature (1)..(586): Homolog of NCBI NO: 18252341 NR Description: putative ethylene receptor [Pyrus communis]
  misc_feature (1)..(595): Homolog of NCBI NO: 18539222 NR Description: ethylene receptor [Delphinium 'MagicFountains
  misc_feature (1)..(600): Homolog of NCBI NO: 4092526 NR Description: putative ethylene receptor [Citrus sinensis]
  misc_feature (1)..(595): Homolog of NCBI NO: 4164161 NR Description: ethylene response sensor [Passiflora edulis]
  misc_feature (1)..(610): Homolog of NCBI NO: 22036194 NR Description: ethylene-responsive sensor [Prunus persica]
  misc_feature (1)..(586): Homolog of NCBI NO: 18252341 NR Description: putative ethylene receptor [Pyrus communis]
  misc_feature (1)..(600): Homolog of NCBI NO: 4092526 NR Description: putative ethylene receptor [Citrus sinensis]
  misc_feature (1)..(610): Homolog of NCBI NO: 22036194 NR Description: ethylene-responsive sensor [Prunus persica]
  misc_feature (1)..(613): Homolog of NCBI NO: 7488578 NR Description: probable ethylene receptor, ERS-type - wild
  misc_feature (1)..(595): Homolog of NCBI NO: 11935116 NR Description: ethylene receptor [Carica papaya]
  misc_feature (1)..(594): Homolog of NCBI NO: 2745902 NR Description: ERS-like ethylene receptor [Pisum sativum]
  misc_feature (1)..(594): Homolog of NCBI NO: 7488803 NR Description: ethylene receptor - garden pea
  misc_feature (1)..(594): Homolog of NCBI NO: 4138853 NR Description: ethylene response sensor [Vigna radiata]
  misc_feature (1)..(595): Homolog of NCBI NO: 4164161 NR Description: ethylene response sensor [Passiflora edulis]
  misc_feature (1)..(595): Homolog of NCBI NO: 18539222 NR Description: ethylene receptor [Delphinium 'MagicFountains
  misc_feature (1)..(594): Homolog of NCBI NO: 4138853 NR Description: ethylene response sensor [Vigna radiata]
  misc_feature (1)..(594): Homolog of NCBI NO: 7488803 NR Description: ethylene receptor - garden pea
  misc_feature (1)..(594): Homolog of NCBI NO: 2745902 NR Description: ERS-like ethylene receptor [Pisum sativum]
  misc_feature (1)..(595): Homolog of NCBI NO: 11935116 NR Description: ethylene receptor [Carica papaya]
  misc_feature (1)..(613): Homolog of NCBI NO: 7488578 NR Description: probable ethylene receptor, ERS-type - wild
MESCDCFETHVNQDDLLVKYQYISDALIALAYFSIPLELIYFVQKSAFFPYKWVLMQFGAFIILCGATHFINLWMFFMHSKAVAIVMTIAKVSCAVVSCATALMLVHIIPDLLSVKNRELFLKKKADELDREMGLILTQEETGRHVRMLTHGIRRTLDRHTILRTTLVELGKTLCLEECALWMPSQSGLYLQLSHTLSHKIQVGSSVPINLPIINELFNSAQAMHIPHSCPLAKIGPPVGRYSPPEVVSVRVPLLHLSNFQGSDWSDLSGKGYAIMVLILPTDGARKWRDHELELVENVADQVAVALSHAAILEESMHARDQLMEQNFALDKARQEAEMAVHARNDFLAVMNHEMRTPMHAIISLSSLLLETELSPEQRVMIETILKSSNLVATLISDVLDLSRLEDGSLLLENEPFSLQAIFEEVISLIKPIASVKKLSTNLILSADLPTYAIGDEKRLMQTILNIMGNAVKFTKEGYISIIASIMKPESLQELPSPEFFPVLSDSHFYLCVQVKDTGCGIHTQDIPLLFTKFVQPRTGTQRNHSGGGLGLALCKRFVGLMGGYMWIESEGLEKGCTASFIIRLGICNGPSSSSGSMALHLAAKSQTRPWNW

SEQ ID NO: 45246 - protein, 558 aa, Arabidopsis thaliana
  peptide (1)..(558): Ceres Seq. ID no. 12560569
  misc_feature (103)..(252): Pfam Name: GAF domain Pfam Description: GAF domain
  misc_feature (103)..(252): Pfam Name: GAF domain Pfam Description: GAF domain
  misc_feature (1)..(531): Homolog of NCBI NO: 18252341 NR Description: putative ethylene receptor [Pyrus communis]
  misc_feature (1)..(540): Homolog of NCBI NO: 18539222 NR Description: ethylene receptor [Delphinium 'MagicFountains
  misc_feature (1)..(545): Homolog of NCBI NO: 4092526 NR Description: putative ethylene receptor [Citrus sinensis]
  misc_feature (1)..(540): Homolog of NCBI NO: 4164161 NR Description: ethylene response sensor [Passiflora edulis]
  misc_feature (1)..(555): Homolog of NCBI NO: 22036194 NR Description: ethylene-responsive sensor [Prunus persica]
  misc_feature (1)..(531): Homolog of NCBI NO: 18252341 NR Description: putative ethylene receptor [Pyrus communis]
  misc_feature (1)..(545): Homolog of NCBI NO: 4092526 NR Description: putative ethylene receptor [Citrus sinensis]
  misc_feature (1)..(555): Homolog of NCBI NO: 22036194 NR Description: ethylene-responsive sensor [Prunus persica]
  misc_feature (1)..(558): Homolog of NCBI NO: 7488578 NR Description: probable ethylene receptor, ERS-type - wild
  misc_feature (1)..(540): Homolog of NCBI NO: 11935116 NR Description: ethylene receptor [Carica papaya]
  misc_feature (1)..(539): Homolog of NCBI NO: 2745902 NR Description: ERS-like ethylene receptor [Pisum sativum]
  misc_feature (1)..(539): Homolog of NCBI NO: 7488803 NR Description: ethylene receptor - garden pea
  misc_feature (1)..(539): Homolog of NCBI NO: 4138853 NR Description: ethylene response sensor [Vigna radiata]
  misc_feature (1)..(540): Homolog of NCBI NO: 4164161 NR Description: ethylene response sensor [Passiflora edulis]
  misc_feature (1)..(540): Homolog of NCBI NO: 18539222 NR Description: ethylene receptor [Delphinium 'MagicFountains
  misc_feature (1)..(539): Homolog of NCBI NO: 4138853 NR Description: ethylene response sensor [Vigna radiata]
  misc_feature (1)..(539): Homolog of NCBI NO: 7488803 NR Description: ethylene receptor - garden pea
  misc_feature (1)..(539): Homolog of NCBI NO: 2745902 NR Description: ERS-like ethylene receptor [Pisum sativum]
  misc_feature (1)..(540): Homolog of NCBI NO: 11935116 NR Description: ethylene receptor [Carica papaya]
  misc_feature (1)..(558): Homolog of NCBI NO: 7488578 NR Description: probable ethylene receptor, ERS-type - wild
MQFGAFIILCGATHFINLWMFFMHSKAVAIVMTIAKVSCAVVSCATALMLVHIIPDLLSVKNRELFLKKKADELDREMGLILTQEETGRHVRMLTHGIRRTLDRHTILRTTLVELGKTLCLEECALWMPSQSGLYLQLSHTLSHKIQVGSSVPINLPIINELFNSAQAMHIPHSCPLAKIGPPVGRYSPPEVVSVRVPLLHLSNFQGSDWSDLSGKGYAIMVLILPTDGARKWRDHELELVENVADQVAVALSHAAILEESMHARDQLMEQNFALDKARQEAEMAVHARNDFLAVMNHEMRTPMHAIISLSSLLLETELSPEQRVMIETILKSSNLVATLISDVLDLSRLEDGSLLLENEPFSLQAIFEEVISLIKPIASVKKLSTNLILSADLPTYAIGDEKRLMQTILNIMGNAVKFTKEGYISIIASIMKPESLQELPSPEFFPVLSDSHFYLCVQVKDTGCGIHTQDIPLLFTKFVQPRTGTQRNHSGGGLGLALCKRFVGLMGGYMWIESEGLEKGCTASFIIRLGICNGPSSSSGSMALHLAAKSQTRPWNW

SEQ ID NO: 45247 - protein, 539 aa, Arabidopsis thaliana
  peptide (1)..(539): Ceres Seq. ID no. 12560570
  misc_feature (84)..(233): Pfam Name: GAF domain Pfam Description: GAF domain
  misc_feature (84)..(233): Pfam Name: GAF domain Pfam Description: GAF domain
  misc_feature (1)..(512): Homolog of NCBI NO: 18252341 NR Description: putative ethylene receptor [Pyrus communis]
  misc_feature (1)..(521): Homolog of NCBI NO: 18539222 NR Description: ethylene receptor [Delphinium 'MagicFountains
  misc_feature (1)..(526): Homolog of NCBI NO: 4092526 NR Description: putative ethylene receptor [Citrus sinensis]
  misc_feature (1)..(521): Homolog of NCBI NO: 4164161 NR Description: ethylene response sensor [Passiflora edulis]
  misc_feature (1)..(536): Homolog of NCBI NO: 22036194 NR Description: ethylene-responsive sensor [Prunus persica]
  misc_feature (1)..(512): Homolog of NCBI NO: 18252341 NR Description: putative ethylene receptor [Pyrus communis]
  misc_feature (1)..(526): Homolog of NCBI NO: 4092526 NR Description: putative ethylene receptor [Citrus sinensis]
  misc_feature (1)..(536): Homolog of NCBI NO: 22036194 NR Description: ethylene-responsive sensor [Prunus persica]
  misc_feature (1)..(539): Homolog of NCBI NO: 7488578 NR Description: probable ethylene receptor, ERS-type - wild
  misc_feature (1)..(521): Homolog of NCBI NO: 11935116 NR Description: ethylene receptor [Carica papaya]
  misc_feature (1)..(520): Homolog of NCBI NO: 2745902 NR Description: ERS-like ethylene receptor [Pisum sativum]
  misc_feature (1)..(520): Homolog of NCBI NO: 7488803 NR Description: ethylene receptor - garden pea
  misc_feature (1)..(520): Homolog of NCBI NO: 4138853 NR Description: ethylene response sensor [Vigna radiata]
  misc_feature (1)..(521): Homolog of NCBI NO: 4164161 NR Description: ethylene response sensor [Passiflora edulis]
  misc_feature (1)..(521): Homolog of NCBI NO: 18539222 NR Description: ethylene receptor [Delphinium 'MagicFountains
  misc_feature (1)..(520): Homolog of NCBI NO: 4138853 NR Description: ethylene response sensor [Vigna radiata]
  misc_feature (1)..(520): Homolog of NCBI NO: 7488803 NR Description: ethylene receptor - garden pea
  misc_feature (1)..(520): Homolog of NCBI NO: 2745902 NR Description: ERS-like ethylene receptor [Pisum sativum]
  misc_feature (1)..(521): Homolog of NCBI NO: 11935116 NR Description: ethylene receptor [Carica papaya]
  misc_feature (1)..(539): Homolog of NCBI NO: 7488578 NR Description: probable ethylene receptor, ERS-type - wild
MFFMHSKAVAIVMTIAKVSCAVVSCATALMLVHIIPDLLSVKNRELFLKKKADELDREMGLILTQEETGRHVRMLTHGIRRTLDRHTILRTTLVELGKTLCLEECALWMPSQSGLYLQLSHTLSHKIQVGSSVPINLPIINELFNSAQAMHIPHSCPLAKIGPPVGRYSPPEVVSVRVPLLHLSNFQGSDWSDLSGKGYAIMVLILPTDGARKWRDHELELVENVADQVAVALSHAAILEESMHARDQLMEQNFALDKARQEAEMAVHARNDFLAVMNHEMRTPMHAIISLSSLLLETELSPEQRVMIETILKSSNLVATLISDVLDLSRLEDGSLLLENEPFSLQAIFEEVISLIKPIASVKKLSTNLILSADLPTYAIGDEKRLMQTILNIMGNAVKFTKEGYISIIASIMKPESLQELPSPEFFPVLSDSHFYLCVQVKDTGCGIHTQDIPLLFTKFVQPRTGTQRNHSGGGLGLALCKRFVGLMGGYMWIESEGLEKGCTASFIIRLGICNGPSSSSGSMALHLAAKSQTRPWNW

SEQ ID NO: 45248 - DNA, 1211 bp, Arabidopsis thaliana; identical to SEQ ID NO: 43816
  misc_feature (1)..(1211): Ceres Seq. ID no. 13576059
  misc_feature: MA Experiment ID: 20000307 Result: Up-regulated in Transcription
  misc_feature: MA Experiment 20000307 PARAMETER Experiment Name: At_Germinating_Seeds_Sub_P Parameter: Age (hr) Value: 24 vs. 0
  misc_feature: MA Experiment 20000307 PARAMETER Experiment Name: At_Germinating_Seeds_Sub_P Parameter: Organism Value: A. thaliana
  misc_feature: MA Experiment 20000307 PARAMETER Experiment Name: At_Germinating_Seeds_Sub_P Parameter: Plant Line Value: WS
  misc_feature: MA Experiment 20000307 PARAMETER Experiment Name: At_Germinating_Seeds_Sub_P Parameter: Tissue Value: Germinating Seeds
  misc_feature: MA Experiment ID: 20000328 Result: Up-regulated in Transcription
  misc_feature: MA Experiment 20000328 PARAMETER Experiment Name: At_42deg_Heat_Sub_P Parameter: Age (day) Value: 14
  misc_feature: MA Experiment 20000328 PARAMETER Experiment Name: At_42deg_Heat_Sub_P Parameter: Organism Value: A. thaliana
  misc_feature: MA Experiment 20000328 PARAMETER Experiment Name: At_42deg_Heat_Sub_P Parameter: Plant Line Value: WS
  misc_feature: MA Experiment 20000328 PARAMETER Experiment Name: At_42deg_Heat_Sub_P Parameter: Temperature (deg C) Value: 42 vs. 22
  misc_feature: MA Experiment 20000328 PARAMETER Experiment Name: At_42deg_Heat_Sub_P Parameter: Timepoint (hr) Value: 6
  misc_feature: MA Experiment 20000328 PARAMETER Experiment Name: At_42deg_Heat_Sub_P Parameter: Tissue Value: Aerial
  misc_feature: MA Experiment ID: 20000355 Result: Down-regulated in Transcription
  misc_feature: MA Experiment 20000355 PARAMETER Experiment Name: At_Siliques_Sub_P Parameter: Age (day) Value: 21
  misc_feature: MA Experiment 20000355 PARAMETER Experiment Name: At_Siliques_Sub_P Parameter: Organism Value: A. thaliana
  misc_feature: MA Experiment 20000355 PARAMETER Experiment Name: At_Siliques_Sub_P Parameter: Plant Line Value: WS
  misc_feature: MA Experiment 20000355 PARAMETER Experiment Name: At_Siliques_Sub_P Parameter: Tissue Value: Less Than 5mm Siliques vs. Whole Plant
  misc_feature: MA Experiment ID: 20000440 Result: Down-regulated in Transcription
  misc_feature: MA Experiment 20000440 PARAMETER Experiment Name: At_Closed-Flower__Sub_P Parameter: Tissue Value: Closed Flower vs. Whole Plant
  misc_feature: MA Experiment ID: 20001807 Result: Up-regulated in Transcription
  misc_feature: MA Experiment 20001807 PARAMETER Experiment Name: At_50mM_NH4NO3_L-to-H_Sub_P Parameter: Timepoint (hr) Value: 6
  misc_feature: MA Experiment 20001807 PARAMETER Experiment Name: At_50mM_NH4NO3_L-to-H_Sub_P Parameter: Tissue Value: Leaf
  misc_feature: MA Experiment 20001807 PARAMETER Experiment Name: At_50mM_NH4NO3_L-to-H_Sub_P Parameter: Treatment Value: 50mM NH4NO3 vs 100mM Mannitol

SEQ ID NO: 45249 - protein, 289 aa, Arabidopsis thaliana; identical to SEQ ID NO: 43817
  peptide (1)..(289): Ceres Seq. ID no. 13576060
  misc_feature (30)..(265): Pfam Name: Major intrinsic protein Pfam Description: Major intrinsic protein
  misc_feature (30)..(265): Pfam Name: Major intrinsic protein Pfam Description: Major intrinsic protein
  misc_feature (30)..(265): Pfam Name: Major intrinsic protein Pfam Description: Major intrinsic protein
  misc_feature (1)..(282): Homolog of NCBI NO: 5081423 NR Description: plasma membrane intrinsic protein 2 [Brassica
  misc_feature (1)..(282): Homolog of NCBI NO: 15228095 NR Description: plasma membrane intrinsic protein 2B, putative
  misc_feature (1)..(285): Homolog of NCBI NO: 28395420 NR Description: plasma intrinsic protein 2,2 [Juglans regia]
  misc_feature (1)..(285): Homolog of NCBI NO: 13486942 NR Description: plasma membrane intrinsic protein 2-2 [Pyrus
  misc_feature (1)..(285): Homolog of NCBI NO: 15233102 NR Description: plasma membrane aquaporin, putative [Arabidopsis
  misc_feature (1)..(282): Homolog of NCBI NO: 5081423 NR Description: plasma membrane intrinsic protein 2 [Brassica
  misc_feature (1)..(285): Homolog of NCBI NO: 28395420 NR Description: plasma intrinsic protein 2,2 [Juglans regia]
  misc_feature (1)..(285): Homolog of NCBI NO: 15233102 NR Description: plasma membrane aquaporin, putative [Arabidopsis
  misc_feature (1)..(285): Homolog of NCBI NO: 13486942 NR Description: plasma membrane intrinsic protein 2-2 [Pyrus
  misc_feature (1)..(285): Homolog of NCBI NO: 28395420 NR Description: plasma intrinsic protein 2,2 [Juglans regia]
  misc_feature (1)..(282): Homolog of NCBI NO: 15228095 NR Description: plasma membrane intrinsic protein 2B, putative
  misc_feature (1)..(282): Homolog of NCBI NO: 5081423 NR Description: plasma membrane intrinsic protein 2 [Brassica
  misc_feature (1)..(289): Homolog of NCBI NO: 15224999 NR Description: major intrinsic protein aquaporin, putative
  misc_feature (1)..(282): Homolog of NCBI NO: 3158476 NR Description: aquaporin 2 [Samanea saman]
  misc_feature (1)..(282): Homolog of NCBI NO: 8071620 NR Description: putative aquaporin PIP2-1 [Vitis berlandieri x
  misc_feature (1)..(282): Homolog of NCBI NO: 7441275 NR Description: mipC protein - common ice plant
  misc_feature (1)..(282): Homolog of NCBI NO: 7441251 NR Description: plasma membrane intrinsic protein 1 - soybean
  misc_feature (1)..(289): Homolog of NCBI NO: 15224999 NR Description: major intrinsic protein aquaporin, putative
  misc_feature (1)..(282): Homolog of NCBI NO: 3158476 NR Description: aquaporin 2 [Samanea saman]
  misc_feature (1)..(282): Homolog of NCBI NO: 8071620 NR Description: putative aquaporin PIP2-1 [Vitis berlandieri x
  misc_feature (1)..(282): Homolog of NCBI NO: 7441275 NR Description: mipC protein - common ice plant
  misc_feature (1)..(282): Homolog of NCBI NO: 7441251 NR Description: plasma membrane intrinsic protein 1 - soybean
  misc_feature (1)..(285): Homolog of NCBI NO: 15233102 NR Description: plasma membrane aquaporin, putative [Arabidopsis
  misc_feature (1)..(285): Homolog of NCBI NO: 13486942 NR Description: plasma membrane intrinsic protein 2-2 [Pyrus
  misc_feature (1)..(282): Homolog of NCBI NO: 15228095 NR Description: plasma membrane intrinsic protein 2B, putative
  misc_feature (1)..(282): Homolog of NCBI NO: 7441251 NR Description: plasma membrane intrinsic protein 1 - soybean
  misc_feature (1)..(282): Homolog of NCBI NO: 7441275 NR Description: mipC protein - common ice plant
  misc_feature (1)..(282): Homolog of NCBI NO: 8071620 NR Description: putative aquaporin PIP2-1 [Vitis berlandieri x
  misc_feature (1)..(282): Homolog of NCBI NO: 3158476 NR Description: aquaporin 2 [Samanea saman]
  misc_feature (1)..(289): Homolog of NCBI NO: 15224999 NR Description: major intrinsic protein aquaporin, putative

SEQ ID NO: 45250 - protein, 201 aa, Arabidopsis thaliana; identical to SEQ ID NO: 43818
  peptide (1)..(201): Ceres Seq. ID no. 13576061
  misc_feature (1)..(177): Pfam Name: Major intrinsic protein Pfam Description: Major intrinsic protein
  misc_feature (1)..(177): Pfam Name: Major intrinsic protein Pfam Description: Major intrinsic protein
  misc_feature (1)..(177): Pfam Name: Major intrinsic protein Pfam Description: Major intrinsic protein
  misc_feature (1)..(194): Homolog of NCBI NO: 5081423 NR Description: plasma membrane intrinsic protein 2 [Brassica
  misc_feature (1)..(194): Homolog of NCBI NO: 15228095 NR Description: plasma membrane intrinsic protein 2B, putative
  misc_feature (1)..(197): Homolog of NCBI NO: 28395420 NR Description: plasma intrinsic protein 2,2 [Juglans regia]
  misc_feature (1)..(197): Homolog of NCBI NO: 13486942 NR Description: plasma membrane intrinsic protein 2-2 [Pyrus
  misc_feature (1)..(197): Homolog of NCBI NO: 15233102 NR Description: plasma membrane aquaporin, putative [Arabidopsis
  misc_feature (1)..(194): Homolog of NCBI NO: 5081423 NR Description: plasma membrane intrinsic protein 2 [Brassica
  misc_feature (1)..(197): Homolog of NCBI NO: 28395420 NR Description: plasma intrinsic protein 2,2 [Juglans regia]
  misc_feature (1)..(197): Homolog of NCBI NO: 15233102 NR Description: plasma membrane aquaporin, putative [Arabidopsis
  misc_feature (1)..(197): Homolog of NCBI NO: 13486942 NR Description: plasma membrane intrinsic protein 2-2 [Pyrus
  misc_feature (1)..(197): Homolog of NCBI NO: 28395420 NR Description: plasma intrinsic protein 2,2 [Juglans regia]
  misc_feature (1)..(194): Homolog of NCBI NO: 15228095 NR Description: plasma membrane intrinsic protein 2B, putative
  misc_feature (1)..(194): Homolog of NCBI NO: 5081423 NR Description: plasma membrane intrinsic protein 2 [Brassica
  misc_feature (1)..(201): Homolog of NCBI NO: 15224999 NR Description: major intrinsic protein aquaporin, putative
  misc_feature (1)..(194): Homolog of NCBI NO: 3158476 NR Description: aquaporin 2 [Samanea saman]
  misc_feature (1)..(194): Homolog of NCBI NO: 8071620 NR Description: putative aquaporin PIP2-1 [Vitis berlandieri x
  misc_feature (1)..(194): Homolog of NCBI NO: 7441275 NR Description: mipC protein - common ice plant
  misc_feature (1)..(194): Homolog of NCBI NO: 7441251 NR Description: plasma membrane intrinsic protein 1 - soybean
  misc_feature (1)..(201): Homolog of NCBI NO: 15224999 NR Description: major intrinsic protein aquaporin, putative
  misc_feature (1)..(194): Homolog of NCBI NO: 3158476 NR Description: aquaporin 2 [Samanea saman]
  misc_feature (1)..(194): Homolog of NCBI NO: 8071620 NR Description: putative aquaporin PIP2-1 [Vitis berlandieri x
  misc_feature (1)..(194): Homolog of NCBI NO: 7441275 NR Description: mipC protein - common ice plant
  misc_feature (1)..(194): Homolog of NCBI NO: 7441251 NR Description: plasma membrane intrinsic protein 1 - soybean
  misc_feature (1)..(197): Homolog of NCBI NO: 15233102 NR Description: plasma membrane aquaporin, putative [Arabidopsis
  misc_feature (1)..(197): Homolog of NCBI NO: 13486942 NR Description: plasma membrane intrinsic protein 2-2 [Pyrus
  misc_feature (1)..(194): Homolog of NCBI NO: 15228095 NR Description: plasma membrane intrinsic protein 2B, putative
  misc_feature (1)..(194): Homolog of NCBI NO: 7441251 NR Description: plasma membrane intrinsic protein 1 - soybean
  misc_feature (1)..(194): Homolog of NCBI NO: 7441275 NR Description: mipC protein - common ice plant
  misc_feature (1)..(194): Homolog of NCBI NO: 8071620 NR Description: putative aquaporin PIP2-1 [Vitis berlandieri x
  misc_feature (1)..(194): Homolog of NCBI NO: 3158476 NR Description: aquaporin 2 [Samanea saman]
  misc_feature (1)..(201): Homolog of NCBI NO: 15224999 NR Description: major intrinsic protein aquaporin, putative

SEQ ID NO: 45251 - protein, 162 aa, Arabidopsis thaliana; identical to SEQ ID NO: 43819
  peptide (1)..(162): Ceres Seq. ID no. 13576062
  misc_feature (1)..(138): Pfam Name: Major intrinsic protein Pfam Description: Major intrinsic protein
  misc_feature (1)..(138): Pfam Name: Major intrinsic protein Pfam Description: Major intrinsic protein
  misc_feature (1)..(138): Pfam Name: Major intrinsic protein Pfam Description: Major intrinsic protein
  misc_feature (1)..(155): Homolog of NCBI NO: 5081423 NR Description: plasma membrane intrinsic protein 2 [Brassica
  misc_feature (1)..(155): Homolog of NCBI NO: 15228095 NR Description: plasma membrane intrinsic protein 2B, putative
  misc_feature (1)..(158): Homolog of NCBI NO: 28395420 NR Description: plasma intrinsic protein 2,2 [Juglans regia]
  misc_feature (1)..(158): Homolog of NCBI NO: 13486942 NR Description: plasma membrane intrinsic protein 2-2 [Pyrus
  misc_feature (1)..(158): Homolog of NCBI NO: 15233102 NR Description: plasma membrane aquaporin, putative [Arabidopsis
  misc_feature (1)..(155): Homolog of NCBI NO: 5081423 NR Description: plasma membrane intrinsic protein 2 [Brassica
  misc_feature (1)..(158): Homolog of NCBI NO: 28395420 NR Description: plasma intrinsic protein 2,2 [Juglans regia]
  misc_feature (1)..(158): Homolog of NCBI NO: 15233102 NR Description: plasma membrane aquaporin, putative [Arabidopsis
  misc_feature (1)..(158): Homolog of NCBI NO: 13486942 NR Description: plasma membrane intrinsic protein 2-2 [Pyrus
  misc_feature (1)..(158): Homolog of NCBI NO: 28395420 NR Description: plasma intrinsic protein 2,2 [Juglans regia]
  misc_feature (1)..(155): Homolog of NCBI NO: 15228095 NR Description: plasma membrane intrinsic protein 2B, putative
  misc_feature (1)..(155): Homolog of NCBI NO: 5081423 NR Description: plasma membrane intrinsic protein 2 [Brassica
  misc_feature (1)..(162): Homolog of NCBI NO: 15224999 NR Description: major intrinsic protein aquaporin, putative
  misc_feature (1)..(155): Homolog of NCBI NO: 3158476 NR Description: aquaporin 2 [Samanea saman]
  misc_feature (1)..(155): Homolog of NCBI NO: 8071620 NR Description: putative aquaporin PIP2-1 [Vitis berlandieri x
  misc_feature (1)..(155): Homolog of NCBI NO: 7441275 NR Description: mipC protein - common ice plant
  misc_feature (1)..(155): Homolog of NCBI NO: 7441251 NR Description: plasma membrane intrinsic protein 1 - soybean
  misc_feature (1)..(162): Homolog of NCBI NO: 15224999 NR Description: major intrinsic protein aquaporin, putative
  misc_feature (1)..(155): Homolog of NCBI NO: 3158476 NR Description: aquaporin 2 [Samanea saman]
  misc_feature (1)..(155): Homolog of NCBI NO: 8071620 NR Description: putative aquaporin PIP2-1 [Vitis berlandieri x
  misc_feature (1)..(155): Homolog of NCBI NO: 7441275 NR Description: mipC protein - common ice plant
  misc_feature (1)..(155): Homolog of NCBI NO: 7441251 NR Description: plasma membrane intrinsic protein 1 - soybean
  misc_feature (1)..(158): Homolog of NCBI NO: 15233102 NR Description: plasma membrane aquaporin, putative [Arabidopsis
  misc_feature (1)..(158): Homolog of NCBI NO: 13486942 NR Description: plasma membrane intrinsic protein 2-2 [Pyrus
  misc_feature (1)..(155): Homolog of NCBI NO: 15228095 NR Description: plasma membrane intrinsic protein 2B, putative
  misc_feature (1)..(155): Homolog of NCBI NO: 7441251 NR Description: plasma membrane intrinsic protein 1 - soybean
  misc_feature (1)..(155): Homolog of NCBI NO: 7441275 NR Description: mipC protein - common ice plant
  misc_feature (1)..(155): Homolog of NCBI NO: 8071620 NR Description: putative aquaporin PIP2-1 [Vitis berlandieri x
  misc_feature (1)..(155): Homolog of NCBI NO: 3158476 NR Description: aquaporin 2 [Samanea saman]
  misc_feature (1)..(162): Homolog of NCBI NO: 15224999 NR Description: major intrinsic protein aquaporin, putative

SEQ ID NO: 45252 - DNA, 2145 bp, Arabidopsis thaliana
  misc_feature (1)..(2145): Ceres Seq. ID no. 13575983
  misc_feature: MA Experiment ID: 20000307 Result: Up-regulated in Transcription
  misc_feature: MA Experiment 20000307 PARAMETER Experiment Name: At_Germinating_Seeds_Sub_P Parameter: Age (hr) Value: 24 vs. 0
  misc_feature: MA Experiment 20000307 PARAMETER Experiment Name: At_Germinating_Seeds_Sub_P Parameter: Organism Value: A. thaliana
  misc_feature: MA Experiment 20000307 PARAMETER Experiment Name: At_Germinating_Seeds_Sub_P Parameter: Plant Line Value: WS
  misc_feature: MA Experiment 20000307 PARAMETER Experiment Name: At_Germinating_Seeds_Sub_P Parameter: Tissue Value: Germinating Seeds
  misc_feature: MA Experiment ID: 20000355 Result: Up-regulated in Transcription
  misc_feature: MA Experiment 20000355 PARAMETER Experiment Name: At_Siliques_Sub_P Parameter: Age (day) Value: 21
  misc_feature: MA Experiment 20000355 PARAMETER Experiment Name: At_Siliques_Sub_P Parameter: Organism Value: A. thaliana
  misc_feature: MA Experiment 20000355 PARAMETER Experiment Name: At_Siliques_Sub_P Parameter: Plant Line Value: WS
  misc_feature: MA Experiment 20000355 PARAMETER Experiment Name: At_Siliques_Sub_P Parameter: Tissue Value: Less Than 5mm Siliques vs. Whole Plant
gacaaagacaagtgttggggtcaccttttgtggtctctgttggatttggtttggactatcttcacgagattatcctcatcttcccgcttcttctctcctttgaatctttcttcgttgttctttcactttcttaaagaggatgtgagattgtttttggtagttagaaaatggatacaccggaaaagagtgaaacccagatcggtactccagtttctaaactcaaagtcgaggattcaccagtgtttagttacatatgcaatctctcaccaattaagactatcaaaccaattccaatcacttgtcctttaagctctctcaattacgcatctccaccttctgttttcacttctcctcacgcggtttctcataaagagtctcgtttcagaagtcaaaaagatgtgtctgcttctaaagaagttggagaagaagaagctttagtcggtagcgaaccggaacaaagctacaagaatgactgcaatactcctagagttaccaatgatgtgaaagacaatggttgtgggaaggatttgcaggtgatgatggacaatgtcaagaagaaaagtgatactccggattgggaaactttgattgctgctacaacagaactgatttatggctcaccgagagagtcagaggcttttagttgcttgttgaagaaaacttcaaactctgaagcacgtctacgtggtagtataactgcaacatcggtggctgttacgaataccgatgtagtcaacaatgaatctgaatctgttgatgctctttcgatattgcaccgtggtgtgagaagacggtgtttagactttgaggttaaggggaataatcagcaaacattaggagaatcttcatctagttgtgtagtacctagcattggtctgcatcttaacaccattgcaatgtcctctaaggacaagaatgttgctaatgagtattcattttccggtaacataaaagtcggtgtgcaaagttctctgactccggtgcttcattcgcagcacgacatcgtgagagaaaatgaaagcgggaaagattcaggacaaattatagaagtggttccaaagtctttagcttcagtagacttgactccaataagccccaagaagaaaaggcgtaagtccgaacaatcaggagaaggcgactcgtcatgtaaacggtgcaactgcaaaaaatccaagtgtttgaagctttactgtgaatgctttgctgctggattttattgcatagagccatgttcatgtataaattgcttcaacaaacctatccataaagatgttgtcctggctactcgcaaacagattgaatcccgcaatccacttgcatttgctcctaaagtcatcagaaactcagattccatcattgaagttggtgaggatgcaagtaaaactccagcttcagcgcgacacaaacgaggctgtaactgcaagaaatcaaactgtctgaagaaatactgtgaatgctatcagggcggagttggttgttctataaactgtagatgtgaaggatgtaaaaatgcatttggcagaaaagatgggtctttgttcgaacaagatgaggagaatgaaacatctggcacacccggaacaaagaaaacacaacagaatgtcgagttgttcaaacctgcagctccaccttcaacaccaattccatttagacaaccactggcgcaacttccaatctcatccaacaacagactgctacctccacagtctcattttcatcatggagctattggatcatcttcctcagggatatacaacatcagaaaaccagacatgagtttgttgtctcattcaagaatcgagacaatcacagaggatattgatgatatgtctgagaatctaatccattctccaataactactctatctcccaacagcaaaagggtttcgttgtctcatcttgattcaccagagtcgactccatggagaagaaatggtggggggaggaatctgatacgttcgttcccaacgtttccttctctcactccacaccattaaaattctttgaatgtcaacttctagttggtagttttaacttacacagacaacatacgcaaacatttacaagtttagtagcagtattgcgttagtttttacaatggttgtgtaataaaaatgttaagtcatttatcaatatcttgacaac

SEQ ID NO: 45253 - protein, 609 aa, Arabidopsis thaliana
  peptide (1)..(609): Ceres Seq. ID no. 13575984
  misc_feature (411)..(452): Pfam Name: Tesmin/TSO1-like CXC domain Pfam Description: Tesmin/TSO1-like CXC domain
  misc_feature (202)..(608): Homolog of NCBI NO: 15028139 NR Description: putative DNA binding protein [Arabidopsis
  misc_feature (121)..(229): Homolog of NCBI NO: 23297130 NR Description: putative DNA binding protein [Arabidopsis
  misc_feature (202)..(608): Homolog of NCBI NO: 23297130 NR Description: putative DNA binding protein [Arabidopsis
  misc_feature (114)..(229): Homolog of NCBI NO: 30686784 NR Description: DNA binding protein -related [Arabidopsis
  misc_feature (1)..(141): Homolog of NCBI NO: 30686784 NR Description: DNA binding protein -related [Arabidopsis
  misc_feature (202)..(608): Homolog of NCBI NO: 30686784 NR Description: DNA binding protein -related [Arabidopsis
  misc_feature (1)..(93): Homolog of NCBI NO: 6739821 NR Description: putative DNA binding protein [Arabidopsis
  misc_feature (114)..(229): Homolog of NCBI NO: 6739821 NR Description: putative DNA binding protein [Arabidopsis
  misc_feature (202)..(608): Homolog of NCBI NO: 6739821 NR Description: putative DNA binding protein [Arabidopsis
  misc_feature (1)..(609): Homolog of NCBI NO: 9279694 NR Description: DNA binding protein-like [Arabidopsis thaliana]
MDTPEKSETQIGTPVSKLKVEDSPVFSYICNLSPIKTIKPIPITCPLSSLNYASPPSVFTSPHAVSHKESRFRSQKDVSASKEVGEEEALVGSEPEQSYKNDCNTPRVTNDVKDNGCGKDLQVMMDNVKKKSDTPDWETLIAATTELIYGSPRESEAFSCLLKKTSNSEARLRGSITATSVAVTNTDVVNNESESVDALSILHRGVRRRCLDFEVKGNNQQTLGESSSSCVVPSIGLHLNTIAMSSKDKNVANEYSFSGNIKVGVQSSLTPVLHSQHDIVRENESGKDSGQIIEVVPKSLASVDLTPISPKKKRRKSEQSGEGDSSCKRCNCKKSKCLKLYCECFAAGFYCIEPCSCINCFNKPIHKDVVLATRKQIESRNPLAFAPKVIRNSDSIIEVGEDASKTPASARHKRGCNCKKSNCLKKYCECYQGGVGCSINCRCEGCKNAFGRKDGSLFEQDEENETSGTPGTKKTQQNVELFKPAAPPSTPIPFRQPLAQLPISSNNRLLPPQSHFHHGAIGSSSSGIYNIRKPDMSLLSHSRIETITEDIDDMSENLIHSPITTLSPNSKRVSLSHLDSPESTPWRRNGGGRNLIRSFPTFPSLTPHH

SEQ ID NO: 45254 - protein, 486 aa, Arabidopsis thaliana
  peptide (1)..(486): Ceres Seq. ID no. 13575985
  misc_feature (288)..(329): Pfam Name: Tesmin/TSO1-like CXC domain Pfam Description: Tesmin/TSO1-like CXC domain
  misc_feature (1)..(106): Homolog of NCBI NO: 15028139 NR Description: putative DNA binding protein [Arabidopsis
  misc_feature (79)..(485): Homolog of NCBI NO: 15028139 NR Description: putative DNA binding protein [Arabidopsis
  misc_feature (1)..(106): Homolog of NCBI NO: 23297130 NR Description: putative DNA binding protein [Arabidopsis
  misc_feature (79)..(485): Homolog of NCBI NO: 23297130 NR Description: putative DNA binding protein [Arabidopsis
  misc_feature (1)..(106): Homolog of NCBI NO: 30686784 NR Description: DNA binding protein -related [Arabidopsis
  misc_feature (1)..(18): Homolog of NCBI NO: 30686784 NR Description: DNA binding protein -related [Arabidopsis
  misc_feature (79)..(485): Homolog of NCBI NO: 30686784 NR Description: DNA binding protein -related [Arabidopsis
  misc_feature (1)..(106): Homolog of NCBI NO: 6739821 NR Description: putative DNA binding protein [Arabidopsis
  misc_feature (79)..(485): Homolog of NCBI NO: 6739821 NR Description: putative DNA binding protein [Arabidopsis
  misc_feature (1)..(486): Homolog of NCBI NO: 9279694 NR Description: DNA binding protein-like [Arabidopsis thaliana]
MMDNVKKKSDTPDWETLIAATTELIYGSPRESEAFSCLLKKTSNSEARLRGSITATSVAVTNTDVVNNESESVDALSILHRGVRRRCLDFEVKGNNQQTLGESSSSCVVPSIGLHLNTIAMSSKDKNVANEYSFSGNIKVGVQSSLTPVLHSQHDIVRENESGKDSGQIIEVVPKSLASVDLTPISPKKKRRKSEQSGEGDSSCKRCNCKKSKCLKLYCECFAAGFYCIEPCSCINCFNKPIHKDVVLATRKQIESRNPLAFAPKVIRNSDSIIEVGEDASKTPASARHKRGCNCKKSNCLKKYCECYQGGVGCSINCRCEGCKNAFGRKDGSLFEQDEENETSGTPGTKKTQQNVELFKPAAPPSTPIPFRQPLAQLPISSNNRLLPPQSHFHHGAIGSSSSGIYNIRKPDMSLLSHSRIETITEDIDDMSENLIHSPITTLSPNSKRVSLSHLDSPESTPWRRNGGGRNLIRSFPTFPSLTPHH

SEQ ID NO: 45255 - protein, 485 aa, Arabidopsis thaliana
  peptide (1)..(485): Ceres Seq. ID no. 13575986
  misc_feature (287)..(328): Pfam Name: Tesmin/TSO1-like CXC domain Pfam Description: Tesmin/TSO1-like CXC domain
  misc_feature (1)..(105): Homolog of NCBI NO: 15028139 NR Description: putative DNA binding protein [Arabidopsis
  misc_feature (78)..(484): Homolog of NCBI NO: 15028139 NR Description: putative DNA binding protein [Arabidopsis
  misc_feature (1)..(105): Homolog of NCBI NO: 23297130 NR Description: putative DNA binding protein [Arabidopsis
  misc_feature (78)..(484): Homolog of NCBI NO: 23297130 NR Description: putative DNA binding protein [Arabidopsis
  misc_feature (1)..(105): Homolog of NCBI NO: 30686784 NR Description: DNA binding protein -related [Arabidopsis
  misc_feature (1)..(17): Homolog of NCBI NO: 30686784 NR Description: DNA binding protein -related [Arabidopsis
  misc_feature (78)..(484): Homolog of NCBI NO: 30686784 NR Description: DNA binding protein -related [Arabidopsis
  misc_feature (1)..(105): Homolog of NCBI NO: 6739821 NR Description: putative DNA binding protein [Arabidopsis
  misc_feature (78)..(484): Homolog of NCBI NO: 6739821 NR Description: putative DNA binding protein [Arabidopsis
  misc_feature (1)..(485): Homolog of NCBI NO: 9279694 NR Description: DNA binding protein-like [Arabidopsis thaliana]
MDNVKKKSDTPDWETLIAATTELIYGSPRESEAFSCLLKKTSNSEARLRGSITATSVAVTNTDVVNNESESVDALSILHRGVRRRCLDFEVKGNNQQTLGESSSSCVVPSIGLHLNTIAMSSKDKNVANEYSFSGNIKVGVQSSLTPVLHSQHDIVRENESGKDSGQIIEVVPKSLASVDLTPISPKKKRRKSEQSGEGDSSCKRCNCKKSKCLKLYCECFAAGFYCIEPCSCINCFNKPIHKDVVLATRKQIESRNPLAFAPKVIRNSDSIIEVGEDASKTPASARHKRGCNCKKSNCLKKYCECYQGGVGCSINCRCEGCKNAFGRKDGSLFEQDEENETSGTPGTKKTQQNVELFKPAAPPSTPIPFRQPLAQLPISSNNRLLPPQSHFHHGAIGSSSSGIYNIRKPDMSLLSHSRIETITEDIDDMSENLIHSPITTLSPNSKRVSLSHLDSPESTPWRRNGGGRNLIRSFPTFPSLTPHH

SEQ ID NO: 45256 - DNA, 2616 bp, Arabidopsis thaliana
  misc_feature (1)..(2616): Ceres Seq. ID no. 12560150
  misc_feature: MA Experiment ID: 20000173 Result: Down-regulated in Transcription
  misc_feature: MA Experiment 20000173 PARAMETER Experiment Name: At_42deg_Heat_P Parameter: Age (day) Value: 14
  misc_feature: MA Experiment 20000173 PARAMETER Experiment Name: At_42deg_Heat_P Parameter: Organism Value: A. thaliana
  misc_feature: MA Experiment 20000173 PARAMETER Experiment Name: At_42deg_Heat_P Parameter: Plant Line Value: WS
  misc_feature: MA Experiment 20000173 PARAMETER Experiment Name: At_42deg_Heat_P Parameter: Temperature (deg C) Value: 42 vs. 22
  misc_feature: MA Experiment 20000173 PARAMETER Experiment Name: At_42deg_Heat_P Parameter: Timepoint (hr) Value: 6
  misc_feature: MA Experiment 20000173 PARAMETER Experiment Name: At_42deg_Heat_P Parameter: Tissue Value: Aerial
  misc_feature: MA Experiment ID: 20000227 Result: Down-regulated in Transcription
  misc_feature: MA Experiment 20000227 PARAMETER Experiment Name: At_Root-Tips-vs-Tops_P Parameter: Tissue Value: Root Tips vs. Root Tops
  misc_feature: MA Experiment ID: 20000573 Result: Up-regulated in Transcription
  misc_feature: MA Experiment 20000573 PARAMETER Experiment Name: At_100uM_ABA_Mutants__P Parameter: Organism Value: A. thaliana
  misc_feature: MA Experiment 20000573 PARAMETER Experiment Name: At_100uM_ABA_Mutants__P Parameter: Plant Line Value: CS22 vs. Ler wt
  misc_feature: MA Experiment 20000573 PARAMETER Experiment Name: At_100uM_ABA_Mutants__P Parameter: Timepoint (hr) Value: N/A
  misc_feature: MA Experiment 20000573 PARAMETER Experiment Name: At_100uM_ABA_Mutants__P Parameter: Tissue Value: Whole Plant
  misc_feature: MA Experiment 20000573 PARAMETER Experiment Name: At_100uM_ABA_Mutants__P Parameter: Treatment Value: None
  misc_feature: MA Experiment ID: 20000574 Result: Up-regulated in Transcription
  misc_feature: MA Experiment 20000574 PARAMETER Experiment Name: At_100uM_ABA_Mutants__P Parameter: Organism Value: A. thaliana
  misc_feature: MA Experiment 20000574 PARAMETER Experiment Name: At_100uM_ABA_Mutants__P Parameter: Plant Line Value: CS23 vs. Ler wt
  misc_feature: MA Experiment 20000574 PARAMETER Experiment Name: At_100uM_ABA_Mutants__P Parameter: Timepoint (hr) Value: N/A
  misc_feature: MA Experiment 20000574 PARAMETER Experiment Name: At_100uM_ABA_Mutants__P Parameter: Tissue Value: Whole Plant
  misc_feature: MA Experiment 20000574 PARAMETER Experiment Name: At_100uM_ABA_Mutants__P Parameter: Treatment Value: None
  misc_feature: MA Experiment ID: 20000794 Result: Up-regulated in Transcription
  misc_feature: MA Experiment 20000794 PARAMETER Experiment Name: At_Petals_P Parameter: Age (day) Value: 23-25 days
  misc_feature: MA Experiment 20000794 PARAMETER Experiment Name: At_Petals_P Parameter: Plant Line Value: WS
  misc_feature: MA Experiment 20000794 PARAMETER Experiment Name: At_Petals_P Parameter: Tissue Value: Petals vs. Whole plant
  misc_feature: MA Experiment ID: 20001450 Result: Up-regulated in Transcription
  misc_feature: MA Experiment 20001450 PARAMETER Experiment Name: At_Far-red-induction_P Parameter: Age (day) Value: 7
  misc_feature: MA Experiment 20001450 PARAMETER Experiment Name: At_Far-red-induction_P Parameter: Light Value: Far-red vs. White
  misc_feature: MA Experiment 20001450 PARAMETER Experiment Name: At_Far-red-induction_P Parameter: Organism Value: A. thaliana
  misc_feature: MA Experiment 20001450 PARAMETER Experiment Name: At_Far-red-induction_P Parameter: Plant Line Value: Columbia
  misc_feature: MA Experiment 20001450 PARAMETER Experiment Name: At_Far-red-induction_P Parameter: Timepoint (hr) Value: 8
  misc_feature: MA Experiment 20001450 PARAMETER Experiment Name: At_Far-red-induction_P Parameter: Tissue Value: Whole Plant
  misc_feature: MA Experiment ID: 20001557 Result: Down-regulated in Transcription
  misc_feature: MA Experiment 20001557 PARAMETER Experiment Name: At_Drought_Soil_Dry_P Parameter: Age (day) Value: 27
  misc_feature: MA Experiment 20001557 PARAMETER Experiment Name: At_Drought_Soil_Dry_P Parameter: Organism Value: A. thaliana
  misc_feature: MA Experiment 20001557 PARAMETER Experiment Name: At_Drought_Soil_Dry_P Parameter: Plant Line Value: WS
  misc_feature: MA Experiment 20001557 PARAMETER Experiment Name: At_Drought_Soil_Dry_P Parameter: Post Timepoint (hr) Value: 3
  misc_feature: MA Experiment 20001557 PARAMETER Experiment Name: At_Drought_Soil_Dry_P Parameter: Post-Treatment Value: Re-Water vs. No Drought
  misc_feature: MA Experiment 20001557 PARAMETER Experiment Name: At_Drought_Soil_Dry_P Parameter: Timepoint (day) Value: 13
  misc_feature: MA Experiment 20001557 PARAMETER Experiment Name: At_Drought_Soil_Dry_P Parameter: Treatment Value: Drought vs. No Drought
  misc_feature: MA Experiment ID: 20001558 Result: Down-regulated in Transcription
  misc_feature: MA Experiment 20001558 PARAMETER Experiment Name: At_Drought_Soil_Dry_P Parameter: Age (day) Value: 27
  misc_feature: MA Experiment 20001558 PARAMETER Experiment Name: At_Drought_Soil_Dry_P Parameter: Organism Value: A. thaliana
  misc_feature: MA Experiment 20001558 PARAMETER Experiment Name: At_Drought_Soil_Dry_P Parameter: Plant Line Value: WS
  misc_feature: MA Experiment 20001558 PARAMETER Experiment Name: At_Drought_Soil_Dry_P Parameter: Post Timepoint (hr) Value: 6
  misc_feature: MA Experiment 20001558 PARAMETER Experiment Name: At_Drought_Soil_Dry_P Parameter: Post-Treatment Value: Re-Water vs. No Drought
  misc_feature: MA Experiment 20001558 PARAMETER Experiment Name: At_Drought_Soil_Dry_P Parameter: Timepoint (day) Value: 13
  misc_feature: MA Experiment 20001558 PARAMETER Experiment Name: At_Drought_Soil_Dry_P Parameter: Treatment Value: Drought vs. No Drought
  misc_feature: MA Experiment ID: 20001560 Result: Down-regulated in Transcription
  misc_feature: MA Experiment 20001560 PARAMETER Experiment Name: At_Drought_Soil_Dry_P Parameter: Age (day) Value: 28
  misc_feature: MA Experiment 20001560 PARAMETER Experiment Name: At_Drought_Soil_Dry_P Parameter: Organism Value: A. thaliana
  misc_feature: MA Experiment 20001560 PARAMETER Experiment Name: At_Drought_Soil_Dry_P Parameter: Plant Line Value: WS
  misc_feature: MA Experiment 20001560 PARAMETER Experiment Name: At_Drought_Soil_Dry_P Parameter: Post Timepoint (hr) Value: None
  misc_feature: MA Experiment 20001560 PARAMETER Experiment Name: At_Drought_Soil_Dry_P Parameter: Post-Treatment Value: None
  misc_feature: MA Experiment 20001560 PARAMETER Experiment Name: At_Drought_Soil_Dry_P Parameter: Timepoint (day) Value: 14
  misc_feature: MA Experiment 20001560 PARAMETER Experiment Name: At_Drought_Soil_Dry_P Parameter: Treatment Value: Drought vs. No Drought
  misc_feature: MA Experiment ID: 20001771 Result: Up-regulated in Transcription
  misc_feature: MA Experiment 20001771 PARAMETER Experiment Name: At_Far-red-enriched-adult_P Parameter: Age (day) Value: 28
  misc_feature: MA Experiment 20001771 PARAMETER Experiment Name: At_Far-red-enriched-adult_P Parameter: Light Value: Far-red enriched vs. White
  misc_feature: MA Experiment 20001771 PARAMETER Experiment Name: At_Far-red-enriched-adult_P Parameter: Organism Value: A. thaliana
  misc_feature: MA Experiment 20001771 PARAMETER Experiment Name: At_Far-red-enriched-adult_P Parameter: Plant Line Value: Columbia
  misc_feature: MA Experiment 20001771 PARAMETER Experiment Name: At_Far-red-enriched-adult_P Parameter: Timepoint (hr) Value: 16
  misc_feature: MA Experiment 20001771 PARAMETER Experiment Name: At_Far-red-enriched-adult_P Parameter: Tissue Value: Aerial
  misc_feature: MA Experiment ID: 20001904 Result: Down-regulated in Transcription
  misc_feature: MA Experiment 20001904 PARAMETER Experiment Name: At_Drought_Reproduction_P Parameter: Age (day) Value: 37
  misc_feature: MA Experiment 20001904 PARAMETER Experiment Name: At_Drought_Reproduction_P Parameter: Organism Value: A. thaliana
  misc_feature: MA Experiment 20001904 PARAMETER Experiment Name: At_Drought_Reproduction_P Parameter: Plant Line Value: WS
  misc_feature: MA Experiment 20001904 PARAMETER Experiment Name: At_Drought_Reproduction_P Parameter: Timepoint (day) Value: 7
  misc_feature: MA Experiment 20001904 PARAMETER Experiment Name: At_Drought_Reproduction_P Parameter: Tissue Value: Rosettes
  misc_feature: MA Experiment 20001904 PARAMETER Experiment Name: At_Drought_Reproduction_P Parameter: Treatment Value: Drought vs. No Drought
  misc_feature: MA Experiment ID: 20001905 Result: Down-regulated in Transcription
  misc_feature: MA Experiment 20001905 PARAMETER Experiment Name: At_Drought_Reproduction_P Parameter: Age (day) Value: 40
  misc_feature: MA Experiment 20001905 PARAMETER Experiment Name: At_Drought_Reproduction_P Parameter: Organism Value: A. thaliana
  misc_feature: MA Experiment 20001905 PARAMETER Experiment Name: At_Drought_Reproduction_P Parameter: Plant Line Value: WS
  misc_feature: MA Experiment 20001905 PARAMETER Experiment Name: At_Drought_Reproduction_P Parameter: Timepoint (day) Value: 10
  misc_feature: MA Experiment 20001905 PARAMETER Experiment Name: At_Drought_Reproduction_P Parameter: Tissue Value: Rosettes
  misc_feature: MA Experiment 20001905 PARAMETER Experiment Name: At_Drought_Reproduction_P Parameter: Treatment Value: Drought vs. No Drought
gtggcttatggtcgtctccgatttccactctctgggagacagaaaaacctcataatctcaaaaattgttcactgtgtttatcttccttctaaagttctaagaagcttcgattcttaattctgtttatcgatttgaattccttgtttctatttcccaaccgttagctgattgtgctagatccatttttctggtgattgatgcaacttctggagctcgattcttcgttctagtatttgattattcgaagcagagttggtgtgatgaatgctaatgaggagggggagggttcacgttacccaatcactgatcgaaagaccggagagacgaaattcgatagggttgagagtcggacagagaagcatagtgaagaagagaaaactaatggaattactatggatgtgagaaatgggagttcaggtggactgcaaattccattgtcgcaacaaacagcggcaactgtctgttgggaaaggtttcttcatgtgagaaccattagagttctgcttgtcgaaaatgacgactgcactcgttatatcgttactgcacttcttcgcaattgtagctatgaagttgttgaggcgtcaaatgggatacaagcttggaaggtgttagaagatctaaacaatcatattgatattgtgctaacagaggtgatcatgccttacttatctggtatcggtctcttgtgcaagattttgaaccacaaatctcgtcggaacatccctgtcatcatgatgtcatctcatgactcaatggggctggtctttaagtgcttatcgaaaggagctgttgactttcttgttaagccaataagaaaaaatgagcttaagatcctttggcagcatgtttggagaagatgccaaagttctagtggtagtggaagtgagagcggaacgcatcaaactcaaaagtctgtgaaatcgaaaagtattaaaaaatctgatcaagattcaggaagcagtgatgagaatgaaaatgggagcattggcctgaatgctagtgatggaagtagtgatgggagtggcgctcagagctcttggacgaaaaaagctgtggatgttgatgacagtccacgagcggtatctctatgggaccgagttgatagcacttgcgcccaagtggtacattctaaccctgagtttccaagtaatcagttggttgcaccacctgctgagaaggagactcaagaacatgatgataaatttgaagatgtcacaatgggtagagacttggagattagcattcgtagaaactgtgatctggccctggagccaaaagatgaacccctatctaaaactactggcattatgagacaggataattcgtttgaaaagagctctagtaaatggaaaatgaaagttggaaaaggaccattggacctcagtagcgaaagtccttcaagtaaacaaatgcatgaagatggaggctcgagtttcaaagctatgtctagccaccttcaagataacagagaacctgaggcgcctaacactcacttgaaaactttagatacaaatgaagcttctgttaaaatttctgaagagctaatgcacgtggaacatagttcaaagaggcatagaggaactaaagatgatgggacactagttagggatgatcggaatgtgctgaggcgttcagagggctcagctttctcaaggtataatccagcctcaaatgccaataagatttctggtgggaacttaggaagcacttcgcttcaggataataatagtcaggatcttataaaaaagactgaagcagcatatgattgtcactcgaacatgaatgagagtctcccccataatcatcgctcacatgtcggtagcaataactttgatatgagttccacgactgagaacaacgctttcacaaaaccaggagctccaaaagtaagctcagcaggatcttcatcagtgaagcattcatcgtttcagcctttaccctgtgatcatcataataatcatgcctcctataaccttgtccatgtcgctgagaggaagaagctaccgccacaatgtggatcctcaaatgtgtacaacgaaacgattgaaggtaacaacaacacagtgaattacagtgtgaatggaagtgtatcaggtagtggtcatggaagtaatgggccatatggaagcagtaacggtatgaatgctggaggaatgaatatgggaagtgataatggtgctggcaaaaatggaaatggcgatggtagtggaagcggaagtggaagtggtagcggaaacttggcggatgaaaataagatctctcaaagggaagctgctttgacaaagttccgtcagaagagaaaagagaggtgcttccgaaagaaggtacgataccaaagccggaaaaaactagcagaacaacgccctcgagtgcgaggccaatttgtgcgtaaaacagccgctgcaactgatgataacgacataaaaaacattgaggatagctaacggaaaatcaacaaaacccactatttctcagcccaaaaacatgagtaatgtgctcatatctatcttatatatatatatctatcacatgttttaacattttcccttcaaagtctgattctttgataatactactactattcacgaaacaaagacactacgacatttgattgtt

SEQ ID NO: 45257 - protein, 727 aa, Arabidopsis thaliana
  peptide (1)..(727): Ceres Seq. ID no. 12560151
  misc_feature (78)..(201): Pfam Name: Response regulator receiver domain Pfam Description: Response regulator receiver domain
  misc_feature (67)..(305): Homolog of NCBI NO: 18420797 NR Description: putative protein
  misc_feature (574)..(710): Homolog of NCBI NO: 18407171 NR Description: expressed protein
  misc_feature (51)..(252): Homolog of NCBI NO: 18407171 NR Description: expressed protein
  misc_feature (668)..(711): Homolog of NCBI NO: 9758535 NR Description: contains similarity to two-component response
  misc_feature (67)..(305): Homolog of NCBI NO: 9758535 NR Description: contains similarity to two-component response
  misc_feature (652)..(719): Homolog of NCBI NO: 18424319 NR Description: pseudo-response regulator - like
  misc_feature (25)..(387): Homolog of NCBI NO: 18424319 NR Description: pseudo-response regulator - like
  misc_feature (58)..(664): Homolog of NCBI NO: 34394035 NR Description: putative pseudo-response regulator
  misc_feature (339)..(712): Homolog of NCBI NO: 24796813 NR Description: putative pseudo-response regulator
  misc_feature (9)..(386): Homolog of NCBI NO: 24796813 NR Description: putative pseudo-response regulator
MNANEEGEGSRYPITDRKTGETKFDRVESRTEKHSEEEKTNGITMDVRNGSSGGLQIPLSQQTAATVCWERFLHVRTIRVLLVENDDCTRYIVTALLRNCSYEVVEASNGIQAWKVLEDLNNHIDIVLTEVIMPYLSGIGLLCKILNHKSRRNIPVIMMSSHDSMGLVFKCLSKGAVDFLVKPIRKNELKILWQHVWRRCQSSSGSGSESGTHQTQKSVKSKSIKKSDQDSGSSDENENGSIGLNASDGSSDGSGAQSSWTKKAVDVDDSPRAVSLWDRVDSTCAQVVHSNPEFPSNQLVAPPAEKETQEHDDKFEDVTMGRDLEISIRRNCDLALEPKDEPLSKTTGIMRQDNSFEKSSSKWKMKVGKGPLDLSSESPSSKQMHEDGGSSFKAMSSHLQDNREPEAPNTHLKTLDTNEASVKISEELMHVEHSSKRHRGTKDDGTLVRDDRNVLRRSEGSAFSRYNPASNANKISGGNLGSTSLQDNNSQDLIKKTEAAYDCHSNMNESLPHNHRSHVGSNNFDMSSTTENNAFTKPGAPKVSSAGSSSVKHSSFQPLPCDHHNNHASYNLVHVAERKKLPPQCGSSNVYNETIEGNNNTVNYSVNGSVSGSGHGSNGPYGSSNGMNAGGMNMGSDNGAGKNGNGDGSGSGSGSGSGNLADENKISQREAALTKFRQKRKERCFRKKVRYQSRKKLAEQRPRVRGQFVRKTAAATDDNDIKNIEDS

SEQ ID NO: 45258 - protein, 683 aa, Arabidopsis thaliana
  peptide (1)..(683): Ceres Seq. ID no. 12560152
  misc_feature (34)..(157): Pfam Name: Response regulator receiver domain Pfam Description: Response regulator receiver domain
  misc_feature (23)..(261): Homolog of NCBI NO: 18420797 NR Description: putative protein
  misc_feature (530)..(666): Homolog of NCBI NO: 18407171 NR Description: expressed protein
  misc_feature (7)..(208): Homolog of NCBI NO: 18407171 NR Description: expressed protein
  misc_feature (624)..(667): Homolog of NCBI NO: 9758535 NR Description: contains similarity to two-component response
  misc_feature (23)..(261): Homolog of NCBI NO: 9758535 NR Description: contains similarity to two-component response
  misc_feature (608)..(675): Homolog of NCBI NO: 18424319 NR Description: pseudo-response regulator - like
  misc_feature (1)..(343): Homolog of NCBI NO: 18424319 NR Description: pseudo-response regulator - like
  misc_feature (14)..(620): Homolog of NCBI NO: 34394035 NR Description: putative pseudo-response regulator
  misc_feature (295)..(668): Homolog of NCBI NO: 24796813 NR Description: putative pseudo-response regulator
  misc_feature (1)..(342): Homolog of NCBI NO: 24796813 NR Description: putative pseudo-response regulator
MDVRNGSSGGLQIPLSQQTAATVCWERFLHVRTIRVLLVENDDCTRYIVTALLRNCSYEVVEASNGIQAWKVLEDLNNHIDIVLTEVIMPYLSGIGLLCKILNHKSRRNIPVIMMSSHDSMGLVFKCLSKGAVDFLVKPIRKNELKILWQHVWRRCQSSSGSGSESGTHQTQKSVKSKSIKKSDQDSGSSDENENGSIGLNASDGSSDGSGAQSSWTKKAVDVDDSPRAVSLWDRVDSTCAQVVHSNPEFPSNQLVAPPAEKETQEHDDKFEDVTMGRDLEISIRRNCDLALEPKDEPLSKTTGIMRQDNSFEKSSSKWKMKVGKGPLDLSSESPSSKQMHEDGGSSFKAMSSHLQDNREPEAPNTHLKTLDTNEASVKISEELMHVEHSSKRHRGTKDDGTLVRDDRNVLRRSEGSAFSRYNPASNANKISGGNLGSTSLQDNNSQDLIKKTEAAYDCHSNMNESLPHNHRSHVGSNNFDMSSTTENNAFTKPGAPKVSSAGSSSVKHSSFQPLPCDHHNNHASYNLVHVAERKKLPPQCGSSNVYNETIEGNNNTVNYSVNGSVSGSGHGSNGPYGSSNGMNAGGMNMGSDNGAGKNGNGDGSGSGSGSGSGNLADENKISQREAALTKFRQKRKERCFRKKVRYQSRKKLAEQRPRVRGQFVRKTAAATDDNDIKNIEDS

SEQ ID NO: 45259 - protein, 595 aa, Arabidopsis thaliana
  peptide (1)..(595): Ceres Seq. ID no. 12560153
  misc_feature (1)..(69): Pfam Name: Response regulator receiver domain Pfam Description: Response regulator receiver domain
  misc_feature (1)..(173): Homolog of NCBI NO: 18420797 NR Description: putative protein
  misc_feature (442)..(578): Homolog of NCBI NO: 18407171 NR Description: expressed protein
  misc_feature (1)..(120): Homolog of NCBI NO: 18407171 NR Description: expressed protein
  misc_feature (536)..(579): Homolog of NCBI NO: 9758535 NR Description: contains similarity to two-component response
  misc_feature (1)..(173): Homolog of NCBI NO: 9758535 NR Description: contains similarity to two-component response
  misc_feature (520)..(587): Homolog of NCBI NO: 18424319 NR Description: pseudo-response regulator - like
  misc_feature (1)..(255): Homolog of NCBI NO: 18424319 NR Description: pseudo-response regulator - like
  misc_feature (1)..(532): Homolog of NCBI NO: 34394035 NR Description: putative pseudo-response regulator
  misc_feature (207)..(580): Homolog of NCBI NO: 24796813 NR Description: putative pseudo-response regulator
  misc_feature (1)..(254): Homolog of NCBI NO: 24796813 NR Description: putative pseudo-response regulator
MPYLSGIGLLCKILNHKSRRNIPVIMMSSHDSMGLVFKCLSKGAVDFLVKPIRKNELKILWQHVWRRCQSSSGSGSESGTHQTQKSVKSKSIKKSDQDSGSSDENENGSIGLNASDGSSDGSGAQSSWTKKAVDVDDSPRAVSLWDRVDSTCAQVVHSNPEFPSNQLVAPPAEKETQEHDDKFEDVTMGRDLEISIRRNCDLALEPKDEPLSKTTGIMRQDNSFEKSSSKWKMKVGKGPLDLSSESPSSKQMHEDGGSSFKAMSSHLQDNREPEAPNTHLKTLDTNEASVKISEELMHVEHSSKRHRGTKDDGTLVRDDRNVLRRSEGSAFSRYNPASNANKISGGNLGSTSLQDNNSQDLIKKTEAAYDCHSNMNESLPHNHRSHVGSNNFDMSSTTENNAFTKPGAPKVSSAGSSSVKHSSFQPLPCDHHNNHASYNLVHVAERKKLPPQCGSSNVYNETIEGNNNTVNYSVNGSVSGSGHGSNGPYGSSNGMNAGGMNMGSDNGAGKNGNGDGSGSGSGSGSGNLADENKISQREAALTKFRQKRKERCFRKKVRYQSRKKLAEQRPRVRGQFVRKTAAATDDNDIKNIEDS

SEQ ID NO: 45260 - DNA, 1878 bp, Arabidopsis thaliana; identical to SEQ ID NO: 30703
  misc_feature (1)..(1878): Ceres Seq. ID no. 12639121
  misc_feature: MA Experiment ID: 108434 Result: Down-regulated in Transcription
  misc_feature: MA Experiment 108434 PARAMETER Experiment Name: At_Root_Tips_cDNA_P Parameter: Tissue Value: Root Tips
  misc_feature: MA Experiment ID: 108463 Result: Up-regulated in Transcription
  misc_feature: MA Experiment 108463 PARAMETER Experiment Name: At_Germinating_Seeds_cDNA_P Parameter: Age (day) Value: 3 vs. 0
  misc_feature: MA Experiment 108463 PARAMETER Experiment Name: At_Germinating_Seeds_cDNA_P Parameter: Tissue Value: Germinating Seeds
  misc_feature: MA Experiment ID: 108464 Result: Up-regulated in Transcription
  misc_feature: MA Experiment 108464 PARAMETER Experiment Name: At_Germinating_Seeds_cDNA_P Parameter: Age (day) Value: 4 vs. 0
  misc_feature: MA Experiment 108464 PARAMETER Experiment Name: At_Germinating_Seeds_cDNA_P Parameter: Tissue Value: Germinating Seeds
  misc_feature: MA Experiment ID: 108473 Result: Up-regulated in Transcription
  misc_feature: MA Experiment 108473 PARAMETER Experiment Name: At_Drought_Flowers_cDNA_P Parameter: Timepoint (hr) Value: 7 d
  misc_feature: MA Experiment 108473 PARAMETER Experiment Name: At_Drought_Flowers_cDNA_P Parameter: Tissue Value: Flower
  misc_feature: MA Experiment 108473 PARAMETER Experiment Name: At_Drought_Flowers_cDNA_P Parameter: Treatment Value: Drought vs. No Drought
  misc_feature: MA Experiment ID: 108561 Result: Up-regulated in Transcription
  misc_feature: MA Experiment 108561 PARAMETER Experiment Name: At_100uM_ABA_cDNA_P Parameter: Timepoint (hr) Value: 6
  misc_feature: MA Experiment 108561 PARAMETER Experiment Name: At_100uM_ABA_cDNA_P Parameter: Tissue Value: Aerial
  misc_feature: MA Experiment 108561 PARAMETER Experiment Name: At_100uM_ABA_cDNA_P Parameter: Treatment Value: 100uM ABA vs. No Treatment
  misc_feature: MA Experiment ID: 108572 Result: Up-regulated in Transcription
  misc_feature: MA Experiment 108572 PARAMETER Experiment Name: At_Drought_cDNA_P Parameter: Timepoint (hr) Value: 1
  misc_feature: MA Experiment 108572 PARAMETER Experiment Name: At_Drought_cDNA_P Parameter: Tissue Value: Aerial
  misc_feature: MA Experiment 108572 PARAMETER Experiment Name: At_Drought_cDNA_P Parameter: Treatment Value: Drought vs. No Drought
  misc_feature: MA Experiment ID: 108573 Result: Up-regulated in Transcription
  misc_feature: MA Experiment 108573 PARAMETER Experiment Name: At_Drought_cDNA_P Parameter: Timepoint (hr) Value: 6
  misc_feature: MA Experiment 108573 PARAMETER Experiment Name: At_Drought_cDNA_P Parameter: Tissue Value: Aerial
  misc_feature: MA Experiment 108573 PARAMETER Experiment Name: At_Drought_cDNA_P Parameter: Treatment Value: Drought vs. No Drought
  misc_feature: MA Experiment ID: 108574 Result: Up-regulated in Transcription
  misc_feature: MA Experiment 108574 PARAMETER Experiment Name: At_Wounding__cDNA_P Parameter: Timepoint (hr) Value: 1
  misc_feature: MA Experiment 108574 PARAMETER Experiment Name: At_Wounding__cDNA_P Parameter: Tissue Value: Aerial
  misc_feature: MA Experiment 108574 PARAMETER Experiment Name: At_Wounding__cDNA_P Parameter: Treatment Value: Wounding vs. No Wounding
  misc_feature: MA Experiment ID: 108585 Result: Up-regulated in Transcription
  misc_feature: MA Experiment 108585 PARAMETER Experiment Name: At_5mM_NaNP_cDNA_P Parameter: Timepoint (hr) Value: 6
  misc_feature: MA Experiment 108585 PARAMETER Experiment Name: At_5mM_NaNP_cDNA_P Parameter: Tissue Value: Aerial
  misc_feature: MA Experiment 108585 PARAMETER Experiment Name: At_5mM_NaNP_cDNA_P Parameter: Treatment Value: null
  misc_feature: MA Experiment ID: 108595 Result: Up-regulated in Transcription
  misc_feature: MA Experiment 108595 PARAMETER Experiment Name: At_Ler-pi_Ovule_cDNA_P Parameter: Plant Line Value: null
  misc_feature: MA Experiment ID: 108605 Result: Up-regulated in Transcription
  misc_feature: MA Experiment 108605 PARAMETER Experiment Name: At_100uM_ABA_cDNA_P Parameter: Timepoint (hr) Value: 6
  misc_feature: MA Experiment 108605 PARAMETER Experiment Name: At_100uM_ABA_cDNA_P Parameter: Tissue Value: Aerial
  misc_feature: MA Experiment 108605 PARAMETER Experiment Name: At_100uM_ABA_cDNA_P Parameter: Treatment Value: 100uM ABA vs. No Treatment
  misc_feature: MA Experiment ID: 108607 Result: Up-regulated in Transcription
  misc_feature: MA Experiment 108607 PARAMETER Experiment Name: At_100uM_ABA_cDNA_P Parameter: Timepoint (hr) Value: 4
  misc_feature: MA Experiment 108607 PARAMETER Experiment Name: At_100uM_ABA_cDNA_P Parameter: Tissue Value: Aerial
  misc_feature: MA Experiment 108607 PARAMETER Experiment Name: At_100uM_ABA_cDNA_P Parameter: Treatment Value: 100uM ABA vs. No Treatment
  misc_feature: MA Experiment ID: 108608 Result: Up-regulated in Transcription
  misc_feature: MA Experiment 108608 PARAMETER Experiment Name: At_100uM_ABA_cDNA_P Parameter: Timepoint (hr) Value: 1
  misc_feature: MA Experiment 108608 PARAMETER Experiment Name: At_100uM_ABA_cDNA_P Parameter: Tissue Value: Aerial
  misc_feature: MA Experiment 108608 PARAMETER Experiment Name: At_100uM_ABA_cDNA_P Parameter: Treatment Value: 100uM ABA vs. No Treatment
  misc_feature: MA Experiment ID: 108609 Result: Up-regulated in Transcription
  misc_feature: MA Experiment 108609 PARAMETER Experiment Name: At_100uM_ABA_cDNA_P Parameter: Timepoint (hr) Value: 24
  misc_feature: MA Experiment 108609 PARAMETER Experiment Name: At_100uM_ABA_cDNA_P Parameter: Tissue Value: Aerial
  misc_feature: MA Experiment 108609 PARAMETER Experiment Name: At_100uM_ABA_cDNA_P Parameter: Treatment Value: 100uM ABA vs. No Treatment
  misc_feature: MA Experiment ID: 108668 Result: Up-regulated in Transcription
  misc_feature: MA Experiment 108668 PARAMETER Experiment Name: At_2mM_SA_cDNA_P Parameter: Plant Line Value: WS
  misc_feature: MA Experiment 108668 PARAMETER Experiment Name: At_2mM_SA_cDNA_P Parameter: Timepoint (hr) Value: 6
  misc_feature: MA Experiment 108668 PARAMETER Experiment Name: At_2mM_SA_cDNA_P Parameter: Treatment Value: 2mM SA vs. No Treatment
  misc_feature: MA Experiment ID: 20000069 Result: Up-regulated in Transcription
  misc_feature: MA Experiment 20000069 PARAMETER Experiment Name: At_100uM_ABA_Mutants_cDNA_P Parameter: Plant Line Value: CS23
  misc_feature: MA Experiment 20000069 PARAMETER Experiment Name: At_100uM_ABA_Mutants_cDNA_P Parameter: Timepoint (hr) Value: 6
  misc_feature: MA Experiment 20000069 PARAMETER Experiment Name: At_100uM_ABA_Mutants_cDNA_P Parameter: Tissue Value: Aerial
  misc_feature: MA Experiment 20000069 PARAMETER Experiment Name: At_100uM_ABA_Mutants_cDNA_P Parameter: Treatment Value: 100uM ABA vs. No Treatment
  misc_feature: MA Experiment ID: 20000070 Result: Up-regulated in Transcription
  misc_feature: MA Experiment 20000070 PARAMETER Experiment Name: At_100uM_ABA_Mutants_cDNA_P Parameter: Plant Line Value: CS24
  misc_feature: MA Experiment 20000070 PARAMETER Experiment Name: At_100uM_ABA_Mutants_cDNA_P Parameter: Timepoint (hr) Value: 6
  misc_feature: MA Experiment 20000070 PARAMETER Experiment Name: At_100uM_ABA_Mutants_cDNA_P Parameter: Tissue Value: Aerial
  misc_feature: MA Experiment 20000070 PARAMETER Experiment Name: At_100uM_ABA_Mutants_cDNA_P Parameter: Treatment Value: 100uM ABA vs. No Treatment
  misc_feature: MA Experiment ID: 20000072 Result: Up-regulated in Transcription
  misc_feature: MA Experiment 20000072 PARAMETER Experiment Name: At_100uM_ABA_Mutants_cDNA_P Parameter: Plant Line Value: CS8105
  misc_feature: MA Experiment 20000072 PARAMETER Experiment Name: At_100uM_ABA_Mutants_cDNA_P Parameter: Timepoint (hr) Value: 6
  misc_feature: MA Experiment 20000072 PARAMETER Experiment Name: At_100uM_ABA_Mutants_cDNA_P Parameter: Tissue Value: Aerial
  misc_feature: MA Experiment 20000072 PARAMETER Experiment Name: At_100uM_ABA_Mutants_cDNA_P Parameter: Treatment Value: 100uM ABA vs. No Treatment
  misc_feature: MA Experiment ID: 20000086 Result: Up-regulated in Transcription
  misc_feature: MA Experiment 20000086 PARAMETER Experiment Name: At_100uM_ABA_Mutants_cDNA_P Parameter: Plant Line Value: CS22
  misc_feature: MA Experiment 20000086 PARAMETER Experiment Name: At_100uM_ABA_Mutants_cDNA_P Parameter: Timepoint (hr) Value: 6
  misc_feature: MA Experiment 20000086 PARAMETER Experiment Name: At_100uM_ABA_Mutants_cDNA_P Parameter: Tissue Value: Aerial
  misc_feature: MA Experiment 20000086 PARAMETER Experiment Name: At_100uM_ABA_Mutants_cDNA_P Parameter: Treatment Value: 100uM ABA vs. No Treatment
  misc_feature: MA Experiment ID: 20000087 Result: Up-regulated in Transcription
  misc_feature: MA Experiment 20000087 PARAMETER Experiment Name: At_100uM_ABA_Mutants_cDNA_P Parameter: Plant Line Value: WS
  misc_feature: MA Experiment 20000087 PARAMETER Experiment Name: At_100uM_ABA_Mutants_cDNA_P Parameter: Timepoint (hr) Value: 6
  misc_feature: MA Experiment 20000087 PARAMETER Experiment Name: At_100uM_ABA_Mutants_cDNA_P Parameter: Tissue Value: Aerial
  misc_feature: MA Experiment 20000087 PARAMETER Experiment Name: At_100uM_ABA_Mutants_cDNA_P Parameter: Treatment Value: 100uM ABA vs. No Treatment
  misc_feature: MA Experiment ID: 20000088 Result: Up-regulated in Transcription
  misc_feature: MA Experiment 20000088 PARAMETER Experiment Name: At_100uM_ABA_Mutants_cDNA_P Parameter: Plant Line Value: Landsberg
  misc_feature: MA Experiment 20000088 PARAMETER Experiment Name: At_100uM_ABA_Mutants_cDNA_P Parameter: Timepoint (hr) Value: 6
  misc_feature: MA Experiment 20000088 PARAMETER Experiment Name: At_100uM_ABA_Mutants_cDNA_P Parameter: Tissue Value: Aerial
  misc_feature: MA Experiment 20000088 PARAMETER Experiment Name: At_100uM_ABA_Mutants_cDNA_P Parameter: Treatment Value: 100uM ABA vs. No Treatment
  misc_feature: MA Experiment ID: 20000117 Result: Up-regulated in Transcription
  misc_feature: MA Experiment 20000117 PARAMETER Experiment Name: At_100uM_ABA_Mutants_cDNA_P Parameter: Plant Line Value: Columbia
  misc_feature: MA Experiment 20000117 PARAMETER Experiment Name: At_100uM_ABA_Mutants_cDNA_P Parameter: Timepoint (hr) Value: 6
  misc_feature: MA Experiment 20000117 PARAMETER Experiment Name: At_100uM_ABA_Mutants_cDNA_P Parameter: Tissue Value: Aerial
  misc_feature: MA Experiment 20000117 PARAMETER Experiment Name: At_100uM_ABA_Mutants_cDNA_P Parameter: Treatment Value: 100uM ABA vs. No Treatment
  misc_feature: MA Experiment ID: 20000144 Result: Down-regulated in Transcription
  misc_feature: MA Experiment 20000144 PARAMETER Experiment Name: At_42deg_Heat_cDNA_P Parameter: Temperature (deg C) Value: 42 vs. 22
  misc_feature: MA Experiment 20000144 PARAMETER Experiment Name: At_42deg_Heat_cDNA_P Parameter: Timepoint (hr) Value: 1
  misc_feature: MA Experiment 20000144 PARAMETER Experiment Name: At_42deg_Heat_cDNA_P Parameter: Tissue Value: Aerial
  misc_feature: MA Experiment ID: 20000166 Result: Up-regulated in Transcription
  misc_feature: MA Experiment 20000166 PARAMETER Experiment Name: At_100uM_ABA_P Parameter: Age (day) Value: 14
  misc_feature: MA Experiment 20000166 PARAMETER Experiment Name: At_100uM_ABA_P Parameter: Organism Value: A. thaliana
  misc_feature: MA Experiment 20000166 PARAMETER Experiment Name: At_100uM_ABA_P Parameter: Plant Line Value: WS
  misc_feature: MA Experiment 20000166 PARAMETER Experiment Name: At_100uM_ABA_P Parameter: Timepoint (hr) Value: 1
  misc_feature: MA Experiment 20000166 PARAMETER Experiment Name: At_100uM_ABA_P Parameter: Tissue Value: Aerial
  misc_feature: MA Experiment 20000166 PARAMETER Experiment Name: At_100uM_ABA_P Parameter: Treatment Value: 100uM ABA vs. No Treatment
  misc_feature: MA Experiment ID: 20000169 Result: Up-regulated in Transcription
  misc_feature: MA Experiment 20000169 PARAMETER Experiment Name: At_100uM_ABA_P Parameter: Age (day) Value: 14
  misc_feature: MA Experiment 20000169 PARAMETER Experiment Name: At_100uM_ABA_P Parameter: Organism Value: A. thaliana
  misc_feature: MA Experiment 20000169 PARAMETER Experiment Name: At_100uM_ABA_P Parameter: Plant Line Value: WS
  misc_feature: MA Experiment 20000169 PARAMETER Experiment Name: At_100uM_ABA_P Parameter: Timepoint (hr) Value: 6
  misc_feature: MA Experiment 20000169 PARAMETER Experiment Name: At_100uM_ABA_P Parameter: Tissue Value: Aerial
  misc_feature: MA Experiment 20000169 PARAMETER Experiment Name: At_100uM_ABA_P Parameter: Treatment Value: 100uM ABA vs. No Treatment
  misc_feature: MA Experiment ID: 20000171 Result: Down-regulated in Transcription
  misc_feature: MA Experiment 20000171 PARAMETER Experiment Name: At_42deg_Heat_P Parameter: Age (day) Value: 14
  misc_feature: MA Experiment 20000171 PARAMETER Experiment Name: At_42deg_Heat_P Parameter: Organism Value: A. thaliana
  misc_feature: MA Experiment 20000171 PARAMETER Experiment Name: At_42deg_Heat_P Parameter: Plant Line Value: WS
  misc_feature: MA Experiment 20000171 PARAMETER Experiment Name: At_42deg_Heat_P Parameter: Temperature (deg C) Value: 42 vs. 22
  misc_feature: MA Experiment 20000171 PARAMETER Experiment Name: At_42deg_Heat_P Parameter: Timepoint (hr) Value: 1
  misc_feature: MA Experiment 20000171 PARAMETER Experiment Name: At_42deg_Heat_P Parameter: Tissue Value: Aerial
  misc_feature: MA Experiment ID: 20000173 Result: Down-regulated in Transcription
  misc_feature: MA Experiment 20000173 PARAMETER Experiment Name: At_42deg_Heat_P Parameter: Age (day) Value: 14
  misc_feature: MA Experiment 20000173 PARAMETER Experiment Name: At_42deg_Heat_P Parameter: Organism Value: A. thaliana
  misc_feature: MA Experiment 20000173 PARAMETER Experiment Name: At_42deg_Heat_P Parameter: Plant Line Value: WS
  misc_feature: MA Experiment 20000173 PARAMETER Experiment Name: At_42deg_Heat_P Parameter: Temperature (deg C) Value: 42 vs. 22
  misc_feature: MA Experiment 20000173 PARAMETER Experiment Name: At_42deg_Heat_P Parameter: Timepoint (hr) Value: 6
  misc_feature: MA Experiment 20000173 PARAMETER Experiment Name: At_42deg_Heat_P Parameter: Tissue Value: Aerial
  misc_feature: MA Experiment ID: 20000180 Result: Up-regulated in Transcription
  misc_feature: MA Experiment 20000180 PARAMETER Experiment Name: At_Germinating_Seeds_P Parameter: Age (hr) Value: 24 vs. 0
  misc_feature: MA Experiment 20000180 PARAMETER Experiment Name: At_Germinating_Seeds_P Parameter: Tissue Value: Germinating Seeds
  misc_feature: MA Experiment ID: 20000182 Result: Up-regulated in Transcription
  misc_feature: MA Experiment 20000182 PARAMETER Experiment Name: At_2mM_SA_P Parameter: Age (day) Value: 14
  misc_feature: MA Experiment 20000182 PARAMETER Experiment Name: At_2mM_SA_P Parameter: Organism Value: A. thaliana
  misc_feature: MA Experiment 20000182 PARAMETER Experiment Name: At_2mM_SA_P Parameter: Plant Line Value: WS
  misc_feature: MA Experiment 20000182 PARAMETER Experiment Name: At_2mM_SA_P Parameter: Timepoint (hr) Value: 6
  misc_feature: MA Experiment 20000182 PARAMETER Experiment Name: At_2mM_SA_P Parameter: Tissue Value: Aerial
  misc_feature: MA Experiment 20000182 PARAMETER Experiment Name: At_2mM_SA_P Parameter: Treatment Value: 2mM SA vs. No Treatment
  misc_feature: MA Experiment ID: 20000184 Result: Down-regulated in Transcription
  misc_feature: MA Experiment 20000184 PARAMETER Experiment Name: At_Shoots__P Parameter: Age (day) Value: 7
  misc_feature: MA Experiment 20000184 PARAMETER Experiment Name: At_Shoots__P Parameter: Tissue Value: Shoots vs. Whole Plant
  misc_feature: MA Experiment ID: 20000185 Result: Up-regulated in Transcription
  misc_feature: MA Experiment 20000185 PARAMETER Experiment Name: At_Roots__P Parameter: Age (day) Value: 7 vs. 21
  misc_feature: MA Experiment 20000185 PARAMETER Experiment Name: At_Roots__P Parameter: Organism Value: A. thaliana
  misc_feature: MA Experiment 20000185 PARAMETER Experiment Name: At_Roots__P Parameter: Tissue Value: Roots vs. Whole Plant
  misc_feature: MA Experiment ID: 20000213 Result: Up-regulated in Transcription
  misc_feature: MA Experiment 20000213 PARAMETER Experiment Name: At_4deg_Cold_P Parameter: Timepoint (hr) Value: 2
  misc_feature: MA Experiment ID: 20000267 Result: Up-regulated in Transcription
  misc_feature: MA Experiment 20000267 PARAMETER Experiment Name: At_Drought_P Parameter: Age (day) Value: 7
  misc_feature: MA Experiment 20000267 PARAMETER Experiment Name: At_Drought_P Parameter: Organism Value: A. thaliana
  misc_feature: MA Experiment 20000267 PARAMETER Experiment Name: At_Drought_P Parameter: Plant Line Value: WS
  misc_feature: MA Experiment 20000267 PARAMETER Experiment Name: At_Drought_P Parameter: Timepoint (hr) Value: 6
  misc_feature: MA Experiment 20000267 PARAMETER Experiment Name: At_Drought_P Parameter: Tissue Value: Whole Plant
  misc_feature: MA Experiment 20000267 PARAMETER Experiment Name: At_Drought_P Parameter: Treatment Value: Drought vs. No Drought
  misc_feature: MA Experiment ID: 20000436 Result: Up-regulated in Transcription
  misc_feature: MA Experiment 20000436 PARAMETER Experiment Name: At_Drought_P Parameter: Age (day) Value: 7
  misc_feature: MA Experiment 20000436 PARAMETER Experiment Name: At_Drought_P Parameter: Organism Value: A. thaliana
  misc_feature: MA Experiment 20000436 PARAMETER Experiment Name: At_Drought_P Parameter: Plant Line Value: WS
  misc_feature: MA Experiment 20000436 PARAMETER Experiment Name: At_Drought_P Parameter: Timepoint (hr) Value: 12
  misc_feature: MA Experiment 20000436 PARAMETER Experiment Name: At_Drought_P Parameter: Tissue Value: Whole Plant
  misc_feature: MA Experiment 20000436 PARAMETER Experiment Name: At_Drought_P Parameter: Treatment Value: Drought vs. No Drought
  misc_feature: MA Experiment ID: 20000437 Result: Up-regulated in Transcription
  misc_feature: MA Experiment 20000437 PARAMETER Experiment Name: At_Drought_P Parameter: Age (day) Value: 8
  misc_feature: MA Experiment 20000437 PARAMETER Experiment Name: At_Drought_P Parameter: Organism Value: A. thaliana
  misc_feature: MA Experiment 20000437 PARAMETER Experiment Name: At_Drought_P Parameter: Plant Line Value: WS
  misc_feature: MA Experiment 20000437 PARAMETER Experiment Name: At_Drought_P Parameter: Timepoint (hr) Value: 24
  misc_feature: MA Experiment 20000437 PARAMETER Experiment Name: At_Drought_P Parameter: Tissue Value: Whole Plant
  misc_feature: MA Experiment 20000437 PARAMETER Experiment Name: At_Drought_P Parameter: Treatment Value: Drought vs. No Drought
  misc_feature: MA Experiment ID: 20000439 Result: Up-regulated in Transcription
  misc_feature: MA Experiment 20000439 PARAMETER Experiment Name: At_Roots__P Parameter: Age (day) Value: 14 vs. 21
  misc_feature: MA Experiment 20000439 PARAMETER Experiment Name: At_Roots__P Parameter: Organism Value: A. thaliana
  misc_feature: MA Experiment 20000439 PARAMETER Experiment Name: At_Roots__P Parameter: Tissue Value: Roots vs. Whole Plant
  misc_feature: MA Experiment ID: 20000453 Result: Up-regulated in Transcription
  misc_feature: MA Experiment 20000453 PARAMETER Experiment Name: At_100uM_ABA_P Parameter: Age (day) Value: 15
  misc_feature: MA Experiment 20000453 PARAMETER Experiment Name: At_100uM_ABA_P Parameter: Organism Value: A. thaliana
  misc_feature: MA Experiment 20000453 PARAMETER Experiment Name: At_100uM_ABA_P Parameter: Plant Line Value: WS
  misc_feature: MA Experiment 20000453 PARAMETER Experiment Name: At_100uM_ABA_P Parameter: Timepoint (hr) Value: 24
  misc_feature: MA Experiment 20000453 PARAMETER Experiment Name: At_100uM_ABA_P Parameter: Tissue Value: Aerial
  misc_feature: MA Experiment 20000453 PARAMETER Experiment Name: At_100uM_ABA_P Parameter: Treatment Value: 100uM ABA vs. No Treatment
  misc_feature: MA Experiment ID: 20000455 Result: Up-regulated in Transcription
  misc_feature: MA Experiment 20000455 PARAMETER Experiment Name: At_100uM_ABA_P Parameter: Age (day) Value: 16
  misc_feature: MA Experiment 20000455 PARAMETER Experiment Name: At_100uM_ABA_P Parameter: Organism Value: A. thaliana
  misc_feature: MA Experiment 20000455 PARAMETER Experiment Name: At_100uM_ABA_P Parameter: Plant Line Value: WS
  misc_feature: MA Experiment 20000455 PARAMETER Experiment Name: At_100uM_ABA_P Parameter: Timepoint (hr) Value: 48
  misc_feature: MA Experiment 20000455 PARAMETER Experiment Name: At_100uM_ABA_P Parameter: Tissue Value: Aerial
  misc_feature: MA Experiment 20000455 PARAMETER Experiment Name: At_100uM_ABA_P Parameter: Treatment Value: 100uM ABA vs. No Treatment
  misc_feature: MA Experiment ID: 20000794 Result: Up-regulated in Transcription
  misc_feature: MA Experiment 20000794 PARAMETER Experiment Name: At_Petals_P Parameter: Age (day) Value: 23-25 days
  misc_feature: MA Experiment 20000794 PARAMETER Experiment Name: At_Petals_P Parameter: Plant Line Value: WS
  misc_feature: MA Experiment 20000794 PARAMETER Experiment Name: At_Petals_P Parameter: Tissue Value: Petals vs. Whole plant
  misc_feature: MA Experiment ID: 20001247 Result: Up-regulated in Transcription
  misc_feature: MA Experiment 20001247 PARAMETER Experiment Name: At_Far-red-induction_P Parameter: Age (day) Value: 7
  misc_feature: MA Experiment 20001247 PARAMETER Experiment Name: At_Far-red-induction_P Parameter: Light Value: Far-red vs. White
  misc_feature: MA Experiment 20001247 PARAMETER Experiment Name: At_Far-red-induction_P Parameter: Organism Value: A. thaliana
  misc_feature: MA Experiment 20001247 PARAMETER Experiment Name: At_Far-red-induction_P Parameter: Plant Line Value: Columbia
  misc_feature: MA Experiment 20001247 PARAMETER Experiment Name: At_Far-red-induction_P Parameter: Timepoint (hr) Value: 1
  misc_feature: MA Experiment 20001247 PARAMETER Experiment Name: At_Far-red-induction_P Parameter: Tissue Value: Whole Plant
  misc_feature: MA Experiment ID: 20001451 Result: Up-regulated in Transcription
  misc_feature: MA Experiment 20001451 PARAMETER Experiment Name: At_Far-red-induction_P Parameter: Age (day) Value: 7
  misc_feature: MA Experiment 20001451 PARAMETER Experiment Name: At_Far-red-induction_P Parameter: Light Value: Far-red vs. White
  misc_feature: MA Experiment 20001451 PARAMETER Experiment Name: At_Far-red-induction_P Parameter: Organism Value: A. thaliana
  misc_feature: MA Experiment 20001451 PARAMETER Experiment Name: At_Far-red-induction_P Parameter: Plant Line Value: Columbia
  misc_feature: MA Experiment 20001451 PARAMETER Experiment Name: At_Far-red-induction_P Parameter: Timepoint (hr) Value: 24
  misc_feature: MA Experiment 20001451 PARAMETER Experiment Name: At_Far-red-induction_P Parameter: Tissue Value: Whole Plant
  misc_feature: MA Experiment ID: 20001554 Result: Up-regulated in Transcription
  misc_feature: MA Experiment 20001554 PARAMETER Experiment Name: At_Drought_Soil_Dry_P Parameter: Age (day) Value: 21
  misc_feature: MA Experiment 20001554 PARAMETER Experiment Name: At_Drought_Soil_Dry_P Parameter: Organism Value: A. thaliana
  misc_feature: MA Experiment 20001554 PARAMETER Experiment Name: At_Drought_Soil_Dry_P Parameter: Plant Line Value: WS
  misc_feature: MA Experiment 20001554 PARAMETER Experiment Name: At_Drought_Soil_Dry_P Parameter: Post Timepoint (hr) Value: None
  misc_feature: MA Experiment 20001554 PARAMETER Experiment Name: At_Drought_Soil_Dry_P Parameter: Post-Treatment Value: None
  misc_feature: MA Experiment 20001554 PARAMETER Experiment Name: At_Drought_Soil_Dry_P Parameter: Timepoint (day) Value: 7
  misc_feature: MA Experiment 20001554 PARAMETER Experiment Name: At_Drought_Soil_Dry_P Parameter: Treatment Value: Drought vs. No Drought
  misc_feature: MA Experiment ID: 20001555 Result: Up-regulated in Transcription
  misc_feature: MA Experiment 20001555 PARAMETER Experiment Name: At_Drought_Soil_Dry_P Parameter: Age (day) Value: 24
  misc_feature: MA Experiment 20001555 PARAMETER Experiment Name: At_Drought_Soil_Dry_P Parameter: Organism Value: A. thaliana
  misc_feature: MA Experiment 20001555 PARAMETER Experiment Name: At_Drought_Soil_Dry_P Parameter: Plant Line Value: WS
  misc_feature: MA Experiment 20001555 PARAMETER Experiment Name: At_Drought_Soil_Dry_P Parameter: Post Timepoint (hr) Value: None
  misc_feature: MA Experiment 20001555 PARAMETER Experiment Name: At_Drought_Soil_Dry_P Parameter: Post-Treatment Value: None
  misc_feature: MA Experiment 20001555 PARAMETER Experiment Name: At_Drought_Soil_Dry_P Parameter: Timepoint (day) Value: 10
  misc_feature: MA Experiment 20001555 PARAMETER Experiment Name: At_Drought_Soil_Dry_P Parameter: Treatment Value: Drought vs. No Drought
  misc_feature: MA Experiment ID: 20001905 Result: Up-regulated in Transcription
  misc_feature: MA Experiment 20001905 PARAMETER Experiment Name: At_Drought_Reproduction_P Parameter: Age (day) Value: 40
  misc_feature: MA Experiment 20001905 PARAMETER Experiment Name: At_Drought_Reproduction_P Parameter: Organism Value: A. thaliana
  misc_feature: MA Experiment 20001905 PARAMETER Experiment Name: At_Drought_Reproduction_P Parameter: Plant Line Value: WS
  misc_feature: MA Experiment 20001905 PARAMETER Experiment Name: At_Drought_Reproduction_P Parameter: Timepoint (day) Value: 10
  misc_feature: MA Experiment 20001905 PARAMETER Experiment Name: At_Drought_Reproduction_P Parameter: Tissue Value: Rosettes
  misc_feature: MA Experiment 20001905 PARAMETER Experiment Name: At_Drought_Reproduction_P Parameter: Treatment Value: Drought vs. No Drought
  misc_feature: MA Experiment ID: 20001906 Result: Up-regulated in Transcription
  misc_feature: MA Experiment 20001906 PARAMETER Experiment Name: At_Drought_Reproduction_P Parameter: Age (day) Value: 35
  misc_feature: MA Experiment 20001906 PARAMETER Experiment Name: At_Drought_Reproduction_P Parameter: Organism Value: A. thaliana
  misc_feature: MA Experiment 20001906 PARAMETER Experiment Name: At_Drought_Reproduction_P Parameter: Plant Line Value: WS
  misc_feature: MA Experiment 20001906 PARAMETER Experiment Name: At_Drought_Reproduction_P Parameter: Timepoint (day) Value: 5
  misc_feature: MA Experiment 20001906 PARAMETER Experiment Name: At_Drought_Reproduction_P Parameter: Tissue Value: Siliques
  misc_feature: MA Experiment 20001906 PARAMETER Experiment Name: At_Drought_Reproduction_P Parameter: Treatment Value: Drought vs. No Drought

SEQ ID NO: 45261 - protein, 505 aa, Arabidopsis thaliana; identical to SEQ ID NO: 30704
  peptide (1)..(505): Ceres Seq. ID no. 12639122
  misc_feature (224)..(478): Pfam Name: Protein of unknown function, DUF604 Pfam Description: Protein of unknown function, DUF604
  misc_feature (224)..(478): Pfam Name: Protein of unknown function, DUF604 Pfam Description: Protein of unknown function, DUF604
  misc_feature (91)..(503): Homolog of NCBI NO: 25336194 NR Description: F22L4.11 protein - Arabidopsis thaliana
  misc_feature (91)..(503): Homolog of NCBI NO: 15223433 NR Description: hypothetical protein; protein id: At1g01570.1
  misc_feature (73)..(483): Homolog of NCBI NO: 15238082 NR Description: putative protein; protein id: At5g41460.1
  misc_feature (91)..(503): Homolog of NCBI NO: 18416156 NR Description: Expressed protein
  misc_feature (91)..(503): Homolog of NCBI NO: 15529153 NR Description: AT4g23490/F16G20_190 [Arabidopsis thaliana]
  misc_feature (91)..(503): Homolog of NCBI NO: 25336194 NR Description: F22L4.11 protein - Arabidopsis thaliana
  misc_feature (73)..(483): Homolog of NCBI NO: 15238082 NR Description: putative protein; protein id: At5g41460.1
  misc_feature (91)..(503): Homolog of NCBI NO: 15529153 NR Description: AT4g23490/F16G20_190 [Arabidopsis thaliana]
  misc_feature (1)..(505): Homolog of NCBI NO: 15229746 NR Description: unknown protein; protein id: At3g11420.1
  misc_feature (27)..(505): Homolog of NCBI NO: 18404516 NR Description: putative zinc finger protein; protein id:
  misc_feature (74)..(292): Homolog of NCBI NO: 34902078 NR Description: unknown protein [Oryza sativa (japonica
  misc_feature (282)..(499): Homolog of NCBI NO: 34902078 NR Description: unknown protein [Oryza sativa (japonica
  misc_feature (85)..(503): Homolog of NCBI NO: 37536418 NR Description: hypothetical protein [Oryza sativa (japonica
  misc_feature (91)..(503): Homolog of NCBI NO: 18416156 NR Description: Expressed protein
  misc_feature (91)..(503): Homolog of NCBI NO: 15223433 NR Description: hypothetical protein; protein id: At1g01570.1
  misc_feature (85)..(503): Homolog of NCBI NO: 37536418 NR Description: hypothetical protein [Oryza sativa (japonica
  misc_feature (282)..(499): Homolog of NCBI NO: 34902078 NR Description: unknown protein [Oryza sativa (japonica
  misc_feature (74)..(292): Homolog of NCBI NO: 34902078 NR Description: unknown protein [Oryza sativa (japonica
  misc_feature (27)..(505): Homolog of NCBI NO: 18404516 NR Description: putative zinc finger protein; protein id:
  misc_feature (1)..(505): Homolog of NCBI NO: 15229746 NR Description: unknown protein; protein id: At3g11420.1

SEQ ID NO: 45262 - protein, 482 aa, Arabidopsis thaliana; identical to SEQ ID NO: 30705
  peptide (1)..(482): Ceres Seq. ID no. 12639123
  misc_feature (201)..(455): Pfam Name: Protein of unknown function, DUF604 Pfam Description: Protein of unknown function, DUF604
  misc_feature (201)..(455): Pfam Name: Protein of unknown function, DUF604 Pfam Description: Protein of unknown function, DUF604
  misc_feature (68)..(480): Homolog of NCBI NO: 25336194 NR Description: F22L4.11 protein - Arabidopsis thaliana
  misc_feature (68)..(480): Homolog of NCBI NO: 15223433 NR Description: hypothetical protein; protein id: At1g01570.1
  misc_feature (50)..(460): Homolog of NCBI NO: 15238082 NR Description: putative protein; protein id: At5g41460.1
  misc_feature (68)..(480): Homolog of NCBI NO: 18416156 NR Description: Expressed protein
  misc_feature (68)..(480): Homolog of NCBI NO: 15529153 NR Description: AT4g23490/F16G20_190 [Arabidopsis thaliana]
  misc_feature (68)..(480): Homolog of NCBI NO: 25336194 NR Description: F22L4.11 protein - Arabidopsis thaliana
  misc_feature (50)..(460): Homolog of NCBI NO: 15238082 NR Description: putative protein; protein id: At5g41460.1
  misc_feature (68)..(480): Homolog of NCBI NO: 15529153 NR Description: AT4g23490/F16G20_190 [Arabidopsis thaliana]
  misc_feature (1)..(482): Homolog of NCBI NO: 15229746 NR Description: unknown protein; protein id: At3g11420.1
  misc_feature (4)..(482): Homolog of NCBI NO: 18404516 NR Description: putative zinc finger protein; protein id:
  misc_feature (51)..(269): Homolog of NCBI NO: 34902078 NR Description: unknown protein [Oryza sativa (japonica
  misc_feature (259)..(476): Homolog of NCBI NO: 34902078 NR Description: unknown protein [Oryza sativa (japonica
  misc_feature (62)..(480): Homolog of NCBI NO: 37536418 NR Description: hypothetical protein [Oryza sativa (japonica
  misc_feature (68)..(480): Homolog of NCBI NO: 18416156 NR Description: Expressed protein
  misc_feature (68)..(480): Homolog of NCBI NO: 15223433 NR Description: hypothetical protein; protein id: At1g01570.1
  misc_feature (62)..(480): Homolog of NCBI NO: 37536418 NR Description: hypothetical protein [Oryza sativa (japonica
  misc_feature (259)..(476): Homolog of NCBI NO: 34902078 NR Description: unknown protein [Oryza sativa (japonica
  misc_feature (51)..(269): Homolog of NCBI NO: 34902078 NR Description: unknown protein [Oryza sativa (japonica
  misc_feature (4)..(482): Homolog of NCBI NO: 18404516 NR Description: putative zinc finger protein; protein id:
  misc_feature (1)..(482): Homolog of NCBI NO: 15229746 NR Description: unknown protein; protein id: At3g11420.1

SEQ ID NO: 45263 - protein, 318 aa, Arabidopsis thaliana; identical to SEQ ID NO: 30706
  peptide (1)..(318): Ceres Seq. ID no. 12639124
  misc_feature (37)..(291): Pfam Name: Protein of unknown function, DUF604 Pfam Description: Protein of unknown function, DUF604
  misc_feature (37)..(291): Pfam Name: Protein of unknown function, DUF604 Pfam Description: Protein of unknown function, DUF604
  misc_feature (1)..(316): Homolog of NCBI NO: 25336194 NR Description: F22L4.11 protein - Arabidopsis thaliana
  misc_feature (1)..(316): Homolog of NCBI NO: 15223433 NR Description: hypothetical protein; protein id: At1g01570.1
  misc_feature (1)..(296): Homolog of NCBI NO: 15238082 NR Description: putative protein; protein id: At5g41460.1
  misc_feature (1)..(316): Homolog of NCBI NO: 18416156 NR Description: Expressed protein
  misc_feature (1)..(316): Homolog of NCBI NO: 15529153 NR Description: AT4g23490/F16G20_190 [Arabidopsis thaliana]
  misc_feature (1)..(316): Homolog of NCBI NO: 25336194 NR Description: F22L4.11 protein - Arabidopsis thaliana
  misc_feature (1)..(296): Homolog of NCBI NO: 15238082 NR Description: putative protein; protein id: At5g41460.1
  misc_feature (1)..(316): Homolog of NCBI NO: 15529153 NR Description: AT4g23490/F16G20_190 [Arabidopsis thaliana]
  misc_feature (1)..(318): Homolog of NCBI NO: 15229746 NR Description: unknown protein; protein id: At3g11420.1
  misc_feature (1)..(318): Homolog of NCBI NO: 18404516 NR Description: putative zinc finger protein; protein id:
  misc_feature (1)..(105): Homolog of NCBI NO: 34902078 NR Description: unknown protein [Oryza sativa (japonica
  misc_feature (95)..(312): Homolog of NCBI NO: 34902078 NR Description: unknown protein [Oryza sativa (japonica
  misc_feature (1)..(316): Homolog of NCBI NO: 37536418 NR Description: hypothetical protein [Oryza sativa (japonica
  misc_feature (1)..(316): Homolog of NCBI NO: 18416156 NR Description: Expressed protein
  misc_feature (1)..(316): Homolog of NCBI NO: 15223433 NR Description: hypothetical protein; protein id: At1g01570.1
  misc_feature (1)..(316): Homolog of NCBI NO: 37536418 NR Description: hypothetical protein [Oryza sativa (japonica
  misc_feature (95)..(312): Homolog of NCBI NO: 34902078 NR Description: unknown protein [Oryza sativa (japonica
  misc_feature (1)..(105): Homolog of NCBI NO: 34902078 NR Description: unknown protein [Oryza sativa (japonica
  misc_feature (1)..(318): Homolog of NCBI NO: 18404516 NR Description: putative zinc finger protein; protein id:
  misc_feature (1)..(318): Homolog of NCBI NO: 15229746 NR Description: unknown protein; protein id: At3g11420.1

SEQ ID NO: 45264 - DNA, 2406 bp, Arabidopsis thaliana
  misc_feature (1)..(2406): Ceres Seq. ID no. 12560579
  misc_feature: MA Experiment ID: 20000307 Result: Up-regulated in Transcription
  misc_feature: MA Experiment 20000307 PARAMETER Experiment Name: At_Germinating_Seeds_Sub_P Parameter: Age (hr) Value: 24 vs. 0
  misc_feature: MA Experiment 20000307 PARAMETER Experiment Name: At_Germinating_Seeds_Sub_P Parameter: Organism Value: A. thaliana
  misc_feature: MA Experiment 20000307 PARAMETER Experiment Name: At_Germinating_Seeds_Sub_P Parameter: Plant Line Value: WS
  misc_feature: MA Experiment 20000307 PARAMETER Experiment Name: At_Germinating_Seeds_Sub_P Parameter: Tissue Value: Germinating Seeds
  misc_feature: MA Experiment ID: 20000315 Result: Down-regulated in Transcription
  misc_feature: MA Experiment 20000315 PARAMETER Experiment Name: At_14day_Shoots-Roots_Sub_P Parameter: Age (day) Value: 14
  misc_feature: MA Experiment 20000315 PARAMETER Experiment Name: At_14day_Shoots-Roots_Sub_P Parameter: Organism Value: A. thaliana
  misc_feature: MA Experiment 20000315 PARAMETER Experiment Name: At_14day_Shoots-Roots_Sub_P Parameter: Plant Line Value: WS
  misc_feature: MA Experiment 20000315 PARAMETER Experiment Name: At_14day_Shoots-Roots_Sub_P Parameter: Tissue Value: Shoots vs. Whole Plant
  misc_feature: MA Experiment ID: 20000355 Result: Up-regulated in Transcription
  misc_feature: MA Experiment 20000355 PARAMETER Experiment Name: At_Siliques_Sub_P Parameter: Age (day) Value: 21
  misc_feature: MA Experiment 20000355 PARAMETER Experiment Name: At_Siliques_Sub_P Parameter: Organism Value: A. thaliana
  misc_feature: MA Experiment 20000355 PARAMETER Experiment Name: At_Siliques_Sub_P Parameter: Plant Line Value: WS
  misc_feature: MA Experiment 20000355 PARAMETER Experiment Name: At_Siliques_Sub_P Parameter: Tissue Value: Less Than 5mm Siliques vs. Whole Plant
  misc_feature: MA Experiment ID: 20000440 Result: Up-regulated in Transcription
  misc_feature: MA Experiment 20000440 PARAMETER Experiment Name: At_Closed-Flower__Sub_P Parameter: Tissue Value: Closed Flower vs. Whole Plant
aatcactcatcatcatctctctctctcaacccaaaacctttttacttcatcgtaacggctctatttctcttctctcttctctctacacacagaaatatctcgatctaggtttctaaaattggattctctatctcaaacgctaatcgaagatttttctctgaatcgtcttcttaaatctactctcgcgaagtttcagngacagattcaatcaaacttcaaaatcatcatcgggtctggaaaatctacgagaaatctcccgtttcaggcttaagcatttgcgaaatggcaagtgttcaaaaagatccgattcttcaagtagagacaacttgtggatctcttttattcgaactccagattatttgggatgaagttggagaaacagaaactgatagagatcaaatgttgcttgagcttgaacgtgaatgtttggaagtttatagaagaaaagttgatcaagctaatcgatgtagagctcagcttagacaagcaatagctgatgctgaagcacaattagctgcaatttgttctgctatgggagagcgtcctgtgcatattagacagtctgatcaaagcgttgggagcttgaagcaagagcttgggaggattcttcctgaactggaagagatgcaaaagaggaaagttgaaagaagaaaccagttcattgttgtcatggagcaaatagatagtattactaatgatattaaaggtcaaggagaacttgttcattccgaacctcttatcgatgagactaacttgtctatgagaaagcttgaagagttacactgccagctgcaagtacttcagaaggagaagattgatcgtgtggagacgattcggaagcacctgtgtactctgtattcccattgttcagtacttggaatggattttaatgaggttgttggccaagtgaatcccacattgagtgatccagaaggaccaagaagtttaagtgatcatacaattgagaaattgggggctgcagttcagaagctgatggaggtcaagatacagagaatgcagaggcttcaagatctagcaacaaccatgttggagctctggaatttgatggatacacccatagaagagcagcaagagtatcagcatattacctgcaatatagctgcatcagaacatgaaataactgaagccaatagtctctctgaagacttcattaaatacgttgaggcagaagttgtccgattggacgaggtaaaagcaagcaaaatgaaagaacttgtgttgaagaaaaggtcagaactagaggagatatgtaggaaaacccacttgttgccagtgtcagacagtgctatagatcagactatcgtggcgatagaatctggtattgtggatgctacaatggtcctggagcatcttgagcaacatatatctaagatcaaagaggaagcactaagccgaaaagagatacttgaaagggttgagaaatggttatctgcctgcgatgaagaaagttggcttgaagaatacaacagggatgataaccgatacaatgctgggcgtggagctcatcttactctcaagcgcgctgaaaaagctcgtaatcttgttaccaagctcccaggtatggttgaagcactggcctcgaagacaatagtttgggaacaagaaaacgggattgaatttctctatgatggtatccgtctcctttctatgcttgaggagtataacatactcaggcaggaaagagaagaagaacaccgtcggcaacgggatcagaaaaagcttcaaggacagctcatagcagaacaagaggcactttacgggtccaaacccagcccatctaaaccccttggtggtaaaaaggctccaagaatgtcgaccggtggtgcatctaacagaagactttccttaggagcagcaatgcatcagactcctaagcctaacaagaaagcagatcaccgacataatgatggagctttatcaaatggaagaagagggcttgacattgcaggactaccctcaaggaaacaatcaatgaatccttctgaaatgttgcaatccccattagttcgcaaaccgttttcccccatatcgaccacggtggttgcatcaaaggccaacatagcaacaacaacaacacaacaacttccgaaaaacaacgcagtgaatgagatctcatcatttgcaactcctatcaagaacaacaacattctcaggaacttggaagaagagaagatgatgactatgatgatgcaaacaccgaaaaatgttgctgcaatgattccaatcccgtcgacaccagcaacagtctctgtcccaatgcacaccgcaccaacaccattcaccaacaatgcaagattgatgtctgaaaagcctgaagttgttgagtactcgtttgaggaacgaagactcgccttcatgctacagtctgaatgtcgtttggtttga

SEQ ID NO: 45265 - protein, 707 aa, Arabidopsis thaliana
  peptide (1)..(707): Ceres Seq. ID no. 12560580
  misc_feature (36)..(624): Pfam Name: Microtubule associated protein (MAP65/ASE1 family) Pfam Description: Microtubule associated protein (MAP65/ASE1
  misc_feature (11)..(557): Homolog of NCBI NO: 25410943 NR Description: hypothetical protein At2g01910 [imported] -
  misc_feature (6)..(531): Homolog of NCBI NO: 18416818 NR Description: putative protein
  misc_feature (11)..(499): Homolog of NCBI NO: 8809638 NR Description: emb|CAB82688.1~gene_id:MMI9.8~similar to unknown
  misc_feature (1)..(554): Homolog of NCBI NO: 11558256 NR Description: microtubule-associated protein MAP65-1c
  misc_feature (1)..(541): Homolog of NCBI NO: 28200790 NR Description: 65kD microtubule associated protein [Daucus
  misc_feature (1)..(554): Homolog of NCBI NO: 11558254 NR Description: microtubule-associated protein MAP65-1b
  misc_feature (8)..(546): Homolog of NCBI NO: 11558252 NR Description: microtubule-associated protein MAP65-1a
  misc_feature (30)..(623): Homolog of NCBI NO: 15232967 NR Description: putative protein; protein id: At3g60840.1
  misc_feature (13)..(546): Homolog of NCBI NO: 15240485 NR Description: putative protein; protein id: At5g55230.1
  misc_feature (11)..(553): Homolog of NCBI NO: 15241762 NR Description: cytokinesis regulating protein - like; protein
MASVQKDPILQVETTCGSLLFELQIIWDEVGETETDRDQMLLELERECLEVYRRKVDQANRCRAQLRQAIADAEAQLAAICSAMGERPVHIRQSDQSVGSLKQELGRILPELEEMQKRKVERRNQFIVVMEQIDSITNDIKGQGELVHSEPLIDETNLSMRKLEELHCQLQVLQKEKIDRVETIRKHLCTLYSHCSVLGMDFNEVVGQVNPTLSDPEGPRSLSDHTIEKLGAAVQKLMEVKIQRMQRLQDLATTMLELWNLMDTPIEEQQEYQHITCNIAASEHEITEANSLSEDFIKYVEAEVVRLDEVKASKMKELVLKKRSELEEICRKTHLLPVSDSAIDQTIVAIESGIVDATMVLEHLEQHISKIKEEALSRKEILERVEKWLSACDEESWLEEYNRDDNRYNAGRGAHLTLKRAEKARNLVTKLPGMVEALASKTIVWEQENGIEFLYDGIRLLSMLEEYNILRQEREEEHRRQRDQKKLQGQLIAEQEALYGSKPSPSKPLGGKKAPRMSTGGASNRRLSLGAAMHQTPKPNKKADHRHNDGALSNGRRGLDIAGLPSRKQSMNPSEMLQSPLVRKPFSPISTTVVASKANIATTTTQQLPKNNAVNEISSFATPIKNNNILRNLEEEKMMTMMMQTPKNVAAMIPIPSTPATVSVPMHTAPTPFTNNARLMSEKPEVVEYSFEERRLAFMLQSECRLV

SEQ ID NO: 45266 - protein, 668 aa, Arabidopsis thaliana
  peptide (1)..(668): Ceres Seq. ID no. 12560581
  misc_feature (1)..(585): Pfam Name: Microtubule associated protein (MAP65/ASE1 family) Pfam Description: Microtubule associated protein (MAP65/ASE1
  misc_feature (1)..(518): Homolog of NCBI NO: 25410943 NR Description: hypothetical protein At2g01910 [imported] -
  misc_feature (1)..(492): Homolog of NCBI NO: 18416818 NR Description: putative protein
  misc_feature (1)..(460): Homolog of NCBI NO: 8809638 NR Description: emb|CAB82688.1~gene_id:MMI9.8~similar to unknown
  misc_feature (1)..(515): Homolog of NCBI NO: 11558256 NR Description: microtubule-associated protein MAP65-1c
  misc_feature (1)..(502): Homolog of NCBI NO: 28200790 NR Description: 65kD microtubule associated protein [Daucus
  misc_feature (1)..(515): Homolog of NCBI NO: 11558254 NR Description: microtubule-associated protein MAP65-1b
  misc_feature (1)..(507): Homolog of NCBI NO: 11558252 NR Description: microtubule-associated protein MAP65-1a
  misc_feature (1)..(584): Homolog of NCBI NO: 15232967 NR Description: putative protein; protein id: At3g60840.1
  misc_feature (1)..(507): Homolog of NCBI NO: 15240485 NR Description: putative protein; protein id: At5g55230.1
  misc_feature (1)..(514): Homolog of NCBI NO: 15241762 NR Description: cytokinesis regulating protein - like; protein
MLLELERECLEVYRRKVDQANRCRAQLRQAIADAEAQLAAICSAMGERPVHIRQSDQSVGSLKQELGRILPELEEMQKRKVERRNQFIVVMEQIDSITNDIKGQGELVHSEPLIDETNLSMRKLEELHCQLQVLQKEKIDRVETIRKHLCTLYSHCSVLGMDFNEVVGQVNPTLSDPEGPRSLSDHTIEKLGAAVQKLMEVKIQRMQRLQDLATTMLELWNLMDTPIEEQQEYQHITCNIAASEHEITEANSLSEDFIKYVEAEVVRLDEVKASKMKELVLKKRSELEEICRKTHLLPVSDSAIDQTIVAIESGIVDATMVLEHLEQHISKIKEEALSRKEILERVEKWLSACDEESWLEEYNRDDNRYNAGRGAHLTLKRAEKARNLVTKLPGMVEALASKTIVWEQENGIEFLYDGIRLLSMLEEYNILRQEREEEHRRQRDQKKLQGQLIAEQEALYGSKPSPSKPLGGKKAPRMSTGGASNRRLSLGAAMHQTPKPNKKADHRHNDGALSNGRRGLDIAGLPSRKQSMNPSEMLQSPLVRKPFSPISTTVVASKANIATTTTQQLPKNNAVNEISSFATPIKNNNILRNLEEEKMMTMMMQTPKNVAAMIPIPSTPATVSVPMHTAPTPFTNNARLMSEKPEVVEYSFEERRLAFMLQSECRLV

SEQ ID NO: 45267 - protein, 624 aa, Arabidopsis thaliana
  peptide (1)..(624): Ceres Seq. ID no. 12560582
  misc_feature (1)..(541): Pfam Name: Microtubule associated protein (MAP65/ASE1 family) Pfam Description: Microtubule associated protein (MAP65/ASE1
  misc_feature (1)..(474): Homolog of NCBI NO: 25410943 NR Description: hypothetical protein At2g01910 [imported] -
  misc_feature (1)..(448): Homolog of NCBI NO: 18416818 NR Description: putative protein
  misc_feature (1)..(416): Homolog of NCBI NO: 8809638 NR Description: emb|CAB82688.1~gene_id:MMI9.8~similar to unknown
  misc_feature (1)..(471): Homolog of NCBI NO: 11558256 NR Description: microtubule-associated protein MAP65-1c
  misc_feature (1)..(458): Homolog of NCBI NO: 28200790 NR Description: 65kD microtubule associated protein [Daucus
  misc_feature (1)..(471): Homolog of NCBI NO: 11558254 NR Description: microtubule-associated protein MAP65-1b
  misc_feature (1)..(463): Homolog of NCBI NO: 11558252 NR Description: microtubule-associated protein MAP65-1a
  misc_feature (1)..(540): Homolog of NCBI NO: 15232967 NR Description: putative protein; protein id: At3g60840.1
  misc_feature (1)..(463): Homolog of NCBI NO: 15240485 NR Description: putative protein; protein id: At5g55230.1
  misc_feature (1)..(470): Homolog of NCBI NO: 15241762 NR Description: cytokinesis regulating protein - like; protein
MGERPVHIRQSDQSVGSLKQELGRILPELEEMQKRKVERRNQFIVVMEQIDSITNDIKGQGELVHSEPLIDETNLSMRKLEELHCQLQVLQKEKIDRVETIRKHLCTLYSHCSVLGMDFNEVVGQVNPTLSDPEGPRSLSDHTIEKLGAAVQKLMEVKIQRMQRLQDLATTMLELWNLMDTPIEEQQEYQHITCNIAASEHEITEANSLSEDFIKYVEAEVVRLDEVKASKMKELVLKKRSELEEICRKTHLLPVSDSAIDQTIVAIESGIVDATMVLEHLEQHISKIKEEALSRKEILERVEKWLSACDEESWLEEYNRDDNRYNAGRGAHLTLKRAEKARNLVTKLPGMVEALASKTIVWEQENGIEFLYDGIRLLSMLEEYNILRQEREEEHRRQRDQKKLQGQLIAEQEALYGSKPSPSKPLGGKKAPRMSTGGASNRRLSLGAAMHQTPKPNKKADHRHNDGALSNGRRGLDIAGLPSRKQSMNPSEMLQSPLVRKPFSPISTTVVASKANIATTTTQQLPKNNAVNEISSFATPIKNNNILRNLEEEKMMTMMMQTPKNVAAMIPIPSTPATVSVPMHTAPTPFTNNARLMSEKPEVVEYSFEERRLAFMLQSECRLV

SEQ ID NO: 45268 - DNA, 3164 bp, Arabidopsis thaliana
  misc_feature (1)..(3164): Ceres Seq. ID no. 13575987
  misc_feature: MA Experiment ID: 20000234 Result: Down-regulated in Transcription
  misc_feature: MA Experiment 20000234 PARAMETER Experiment Name: At_Siliques_P Parameter: Age (day) Value: 21
  misc_feature: MA Experiment 20000234 PARAMETER Experiment Name: At_Siliques_P Parameter: Organism Value: A. thaliana
  misc_feature: MA Experiment 20000234 PARAMETER Experiment Name: At_Siliques_P Parameter: Plant Line Value: WS
  misc_feature: MA Experiment 20000234 PARAMETER Experiment Name: At_Siliques_P Parameter: Tissue Value: Less Than 5mm Siliques vs. Whole Plant
  misc_feature: MA Experiment ID: 20000235 Result: Down-regulated in Transcription
  misc_feature: MA Experiment 20000235 PARAMETER Experiment Name: At_Siliques_P Parameter: Age (day) Value: 21
  misc_feature: MA Experiment 20000235 PARAMETER Experiment Name: At_Siliques_P Parameter: Organism Value: A. thaliana
  misc_feature: MA Experiment 20000235 PARAMETER Experiment Name: At_Siliques_P Parameter: Plant Line Value: WS
  misc_feature: MA Experiment 20000235 PARAMETER Experiment Name: At_Siliques_P Parameter: Tissue Value: 5-10mm Siliques vs. Whole Plant
  misc_feature: MA Experiment ID: 20000264 Result: Down-regulated in Transcription
  misc_feature: MA Experiment 20000264 PARAMETER Experiment Name: At_Open_Flower_P Parameter: Age (day) Value: 21
  misc_feature: MA Experiment 20000264 PARAMETER Experiment Name: At_Open_Flower_P Parameter: Plant Line Value: WS
  misc_feature: MA Experiment 20000264 PARAMETER Experiment Name: At_Open_Flower_P Parameter: Tissue Value: Open Flower vs. Whole Plant
  misc_feature: MA Experiment ID: 20000265 Result: Down-regulated in Transcription
  misc_feature: MA Experiment 20000265 PARAMETER Experiment Name: At_Open_Flower_P Parameter: Age (day) Value: 21
  misc_feature: MA Experiment 20000265 PARAMETER Experiment Name: At_Open_Flower_P Parameter: Plant Line Value: WS
  misc_feature: MA Experiment 20000265 PARAMETER Experiment Name: At_Open_Flower_P Parameter: Tissue Value: Closed Flower vs. Whole Plant
  misc_feature: MA Experiment ID: 20001457 Result: Up-regulated in Transcription
  misc_feature: MA Experiment 20001457 PARAMETER Experiment Name: At_50mM_NH4NO3_L-to-H_P Parameter: Age (day) Value: Undefined
  misc_feature: MA Experiment 20001457 PARAMETER Experiment Name: At_50mM_NH4NO3_L-to-H_P Parameter: Organism Value: Undefined
  misc_feature: MA Experiment 20001457 PARAMETER Experiment Name: At_50mM_NH4NO3_L-to-H_P Parameter: Plant Line Value: Undefined
  misc_feature: MA Experiment 20001457 PARAMETER Experiment Name: At_50mM_NH4NO3_L-to-H_P Parameter: Timepoint (hr) Value: 0.5
  misc_feature: MA Experiment 20001457 PARAMETER Experiment Name: At_50mM_NH4NO3_L-to-H_P Parameter: Tissue Value: Siliques
  misc_feature: MA Experiment 20001457 PARAMETER Experiment Name: At_50mM_NH4NO3_L-to-H_P Parameter: Treatment Value: 50mM NH4NO3 vs. 100mM Manitol
  misc_feature: MA Experiment ID: 20001459 Result: Up-regulated in Transcription
  misc_feature: MA Experiment 20001459 PARAMETER Experiment Name: At_50mM_NH4NO3_L-to-H_P Parameter: Age (day) Value: Undefined
  misc_feature: MA Experiment 20001459 PARAMETER Experiment Name: At_50mM_NH4NO3_L-to-H_P Parameter: Organism Value: Undefined
  misc_feature: MA Experiment 20001459 PARAMETER Experiment Name: At_50mM_NH4NO3_L-to-H_P Parameter: Plant Line Value: Undefined
  misc_feature: MA Experiment 20001459 PARAMETER Experiment Name: At_50mM_NH4NO3_L-to-H_P Parameter: Timepoint (hr) Value: 4
  misc_feature: MA Experiment 20001459 PARAMETER Experiment Name: At_50mM_NH4NO3_L-to-H_P Parameter: Tissue Value: Siliques
  misc_feature: MA Experiment 20001459 PARAMETER Experiment Name: At_50mM_NH4NO3_L-to-H_P Parameter: Treatment Value: 50mM NH4NO3 vs. 100mM Manitol
  misc_feature: MA Experiment ID: 20001759 Result: Up-regulated in Transcription
  misc_feature: MA Experiment 20001759 PARAMETER Experiment Name: At_50mM_NH4NO3_L-to-H_P Parameter: Timepoint (hr) Value: 1
  misc_feature: MA Experiment 20001759 PARAMETER Experiment Name: At_50mM_NH4NO3_L-to-H_P Parameter: Tissue Value: Siliques
  misc_feature: MA Experiment 20001759 PARAMETER Experiment Name: At_50mM_NH4NO3_L-to-H_P Parameter: Treatment Value: 50mM NH4NO3 vs 100mM Mannitol
tctctcgcttctctttctctatccaatcggaaagagatcaaccaacgatagaggagaagaagaacttgcatacgcaaaaaaactttcccgggaaaattccagaaactgctttggaaaaatgtgcgagcccgatgataattccgctagaaacggcgtcactactcaaccttcgaggtcaagggagcttctaatggatgttgacgacttagatcttgacggttcatggccactagatcaaatcccttacttatcctcatcgaatcgcatgatttctccgatttttgtctcctcttcctctgagcagccttgctcgcctctctgggctttctccgacggtggaggaaatggttttcaccacgcaacctccggtggcgatgatgagaagatcagctctgtctccggtgttccttctttccgtctcgccgagtatcctctcttcctcccttactcttctccatcagcagctgagaacacaacagagaagcataacagtttccagtttccgtctccattgatgagcctagtcccaccagagaacacagacaactactgtgtgatcaaagagaggatgactcaggcgcttcgatacttcaaagaatcaaccgaacaacacgttttggctcaggtctgggctcctgtgagaaagaatggtcgtgatttgctgacgactttgggtcaaccttttgttcttaatcctaatggtaatgggcttaatcaatacaggatgatctctctcacatatatgttttctgtggatagtgaaagtgacgtagagctcggactcccgggtcgagttttccgtcagaaattgcctgaatggactccaaatgttcagtactattccagcaaagaattctcgcggcttgatcacgccttgcactacaacgtgcgtggtacactggccttgcctgtctttaatccctctggtcagtcctgcataggtgttgtggaacttataatgacctcagagaagattcactatgcacccgaagtggacaaagtttgcaaagcccttgaggcggtaaatctgaaaagctcggaaatacttgatcaccaaacaacacagatatgcaatgagagtcgccaaaacgcgcttgctgagattctcgaagtgctgacagttgtatgtgagacccataacttgcctctcgctcagacttgggttccatgtcagcatgggagcgttcttgccaatggtggcggtctaaagaaaaactgcaccagctttgacggtagctgcatgggtcaaatctgcatgtctacaaccgacatggcctgctatgtcgtggatgctcatgtctggggctttagagatgcctgtcttgaacaccatctccagaaaggccagggagtcgctggacgagcttttctcaatggtggctcatgtttctgcagagacatcaccaagttctgcaaaacgcagtacccactagtccattatgcgctcatgttcaagttgaccacttgttttgcaatatctctccagagctcttacacgggcgacgacagttacattcttgaattttttcttccttcgagtataacagacgaccaagagcaagatttgctgttgggttctattttggtgacaatgaaagaacattttcagagtctgagggttgcatctggggttgactttggtgaagatgacgacaaattgtctttcgagatcatccaagcattaccggacaagaaggttcattcaaaaatagaatccattcgagttcccttttctggttttaagtcaaatgcaacagagacgatgttgattcctcagcctgtggttcagtcttctgatccagtaaatgagaaaatcaacgtggccactgttaacggtgtggttaaggagaagaagaaaacagagaaaaagcgtgggaagactgagaaaacaatcagtctagatgtacttcagcagtatttcactggaagtctcaaagacgctgcaaagagcctaggagtttgcccgacgacaatgaagcgaatttgcaggcaacacggaatctcgcggtggccatcgaggaagatcaagaaagtgaatcgttcaatcacaaagctgaaacgagtcatcgaatctgttcaaggtactgatggaggcctcgacctgacttccatggccgttagttccatcccttggacacacggtcaaacatcagcacagccactaaactcacccaatggttccaaaccacctgagctaccaaacaccaataattcacctaaccattggtcaagtgatcacagtccgaacgagccaaatggttcgcctgagttaccaccaagcaatggtcacaagcgatcacgaacggtggatgagagcgctgggactccaacctctcatggctcatgtgacggtaaccaattagatgaaccgaaagtcccaaatcaagatccgctcttcacggttggtggatcacccgggctcctttttccaccttattctagagatcatgatgtatctgcagcttccttcgcaatgccgaacaggcttcttggttctatagaccatttccgaggaatgctcattgaagacgctggaagttcaaaagatctgagaaatctctgccccactgcagcatttgacgataagtttcaagacacaaactggatgaacaatgataataatagcaacaacaacttatacgctcccccaaaggaagaggccattgcaaatgttgcatgcgaaccatcaggctcagaaatgagaacggtaacaatcaaagcaagttacaaagacgacataatacggttcagaatatcctcgggttcaggtataatggaattgaaggatgaagtggctaagaggctgaaagttgatgcaggaacgttcgatatcaagtatcttgacgatgataacgaatgggttttaatagcttgtgatgctgatcttcaagaatgtctcgagatccctagatcctcccgcacgaaaatcgtaaggctcttagttcatgatgtaacgacaaatctagggagctcctgcgagagcactggagaattgtgacctgataattcattcgaactcttttgtaaatatgttttttgaattttattattgtttagggtttctttggacaaattaaagttgtaaaagaaacatttgtttgtaacttttaactgtaaaagtgtaagagagagagaggttagaagtaaattttagttgtaacttc

SEQ ID NO: 45269 - protein, 998 aa, Arabidopsis thaliana
  peptide (1)..(998): Ceres Seq. ID no. 13575988
  misc_feature (902)..(984): Pfam Name: PB1 domain Pfam Description: PB1 domain
  misc_feature (186)..(573): Homolog of NCBI NO: 20503001 NR Description: Putataive nodule inception protein
  misc_feature (902)..(996): Homolog of NCBI NO: 34904438 NR Description: unnamed protein product [Oryza sativa (japonica
  misc_feature (615)..(928): Homolog of NCBI NO: 34904438 NR Description: unnamed protein product [Oryza sativa (japonica
  misc_feature (178)..(572): Homolog of NCBI NO: 34904438 NR Description: unnamed protein product [Oryza sativa (japonica
  misc_feature (889)..(997): Homolog of NCBI NO: 20259460 NR Description: unknown protein [Arabidopsis thaliana]
  misc_feature (70)..(713): Homolog of NCBI NO: 20259460 NR Description: unknown protein [Arabidopsis thaliana]
  misc_feature (889)..(997): Homolog of NCBI NO: 15217662 NR Description: RWP-RK domain containing protein [Arabidopsis
  misc_feature (70)..(713): Homolog of NCBI NO: 15217662 NR Description: RWP-RK domain containing protein [Arabidopsis
  misc_feature (889)..(997): Homolog of NCBI NO: 6633813 NR Description: F1N19.10 [Arabidopsis thaliana]
  misc_feature (64)..(713): Homolog of NCBI NO: 6633813 NR Description: F1N19.10 [Arabidopsis thaliana]
LSLLFLYPIGKRSTNDRGEEELAYAKKLSRENSRNCFGKMCEPDDNSARNGVTTQPSRSRELLMDVDDLDLDGSWPLDQIPYLSSSNRMISPIFVSSSSEQPCSPLWAFSDGGGNGFHHATSGGDDEKISSVSGVPSFRLAEYPLFLPYSSPSAAENTTEKHNSFQFPSPLMSLVPPENTDNYCVIKERMTQALRYFKESTEQHVLAQVWAPVRKNGRDLLTTLGQPFVLNPNGNGLNQYRMISLTYMFSVDSESDVELGLPGRVFRQKLPEWTPNVQYYSSKEFSRLDHALHYNVRGTLALPVFNPSGQSCIGVVELIMTSEKIHYAPEVDKVCKALEAVNLKSSEILDHQTTQICNESRQNALAEILEVLTVVCETHNLPLAQTWVPCQHGSVLANGGGLKKNCTSFDGSCMGQICMSTTDMACYVVDAHVWGFRDACLEHHLQKGQGVAGRAFLNGGSCFCRDITKFCKTQYPLVHYALMFKLTTCFAISLQSSYTGDDSYILEFFLPSSITDDQEQDLLLGSILVTMKEHFQSLRVASGVDFGEDDDKLSFEIIQALPDKKVHSKIESIRVPFSGFKSNATETMLIPQPVVQSSDPVNEKINVATVNGVVKEKKKTEKKRGKTEKTISLDVLQQYFTGSLKDAAKSLGVCPTTMKRICRQHGISRWPSRKIKKVNRSITKLKRVIESVQGTDGGLDLTSMAVSSIPWTHGQTSAQPLNSPNGSKPPELPNTNNSPNHWSSDHSPNEPNGSPELPPSNGHKRSRTVDESAGTPTSHGSCDGNQLDEPKVPNQDPLFTVGGSPGLLFPPYSRDHDVSAASFAMPNRLLGSIDHFRGMLIEDAGSSKDLRNLCPTAAFDDKFQDTNWMNNDNNSNNNLYAPPKEEAIANVACEPSGSEMRTVTIKASYKDDIIRFRISSGSGIMELKDEVAKRLKVDAGTFDIKYLDDDNEWVLIACDADLQECLEIPRSSRTKIVRLLVHDVTTNLGSSCESTGEL

SEQ ID NO: 45270 - protein, 959 aa, Arabidopsis thaliana
  peptide (1)..(959): Ceres Seq. ID no. 13575989
  misc_feature (863)..(945): Pfam Name: PB1 domain Pfam Description: PB1 domain
  misc_feature (147)..(534): Homolog of NCBI NO: 20503001 NR Description: Putataive nodule inception protein
  misc_feature (863)..(957): Homolog of NCBI NO: 34904438 NR Description: unnamed protein product [Oryza sativa (japonica
  misc_feature (576)..(889): Homolog of NCBI NO: 34904438 NR Description: unnamed protein product [Oryza sativa (japonica
  misc_feature (139)..(533): Homolog of NCBI NO: 34904438 NR Description: unnamed protein product [Oryza sativa (japonica
  misc_feature (850)..(958): Homolog of NCBI NO: 20259460 NR Description: unknown protein [Arabidopsis thaliana]
  misc_feature (31)..(674): Homolog of NCBI NO: 20259460 NR Description: unknown protein [Arabidopsis thaliana]
  misc_feature (850)..(958): Homolog of NCBI NO: 15217662 NR Description: RWP-RK domain containing protein [Arabidopsis
  misc_feature (31)..(674): Homolog of NCBI NO: 15217662 NR Description: RWP-RK domain containing protein [Arabidopsis
  misc_feature (850)..(958): Homolog of NCBI NO: 6633813 NR Description: F1N19.10 [Arabidopsis thaliana]
  misc_feature (25)..(674): Homolog of NCBI NO: 6633813 NR Description: F1N19.10 [Arabidopsis thaliana]
MCEPDDNSARNGVTTQPSRSRELLMDVDDLDLDGSWPLDQIPYLSSSNRMISPIFVSSSSEQPCSPLWAFSDGGGNGFHHATSGGDDEKISSVSGVPSFRLAEYPLFLPYSSPSAAENTTEKHNSFQFPSPLMSLVPPENTDNYCVIKERMTQALRYFKESTEQHVLAQVWAPVRKNGRDLLTTLGQPFVLNPNGNGLNQYRMISLTYMFSVDSESDVELGLPGRVFRQKLPEWTPNVQYYSSKEFSRLDHALHYNVRGTLALPVFNPSGQSCIGVVELIMTSEKIHYAPEVDKVCKALEAVNLKSSEILDHQTTQICNESRQNALAEILEVLTVVCETHNLPLAQTWVPCQHGSVLANGGGLKKNCTSFDGSCMGQICMSTTDMACYVVDAHVWGFRDACLEHHLQKGQGVAGRAFLNGGSCFCRDITKFCKTQYPLVHYALMFKLTTCFAISLQSSYTGDDSYILEFFLPSSITDDQEQDLLLGSILVTMKEHFQSLRVASGVDFGEDDDKLSFEIIQALPDKKVHSKIESIRVPFSGFKSNATETMLIPQPVVQSSDPVNEKINVATVNGVVKEKKKTEKKRGKTEKTISLDVLQQYFTGSLKDAAKSLGVCPTTMKRICRQHGISRWPSRKIKKVNRSITKLKRVIESVQGTDGGLDLTSMAVSSIPWTHGQTSAQPLNSPNGSKPPELPNTNNSPNHWSSDHSPNEPNGSPELPPSNGHKRSRTVDESAGTPTSHGSCDGNQLDEPKVPNQDPLFTVGGSPGLLFPPYSRDHDVSAASFAMPNRLLGSIDHFRGMLIEDAGSSKDLRNLCPTAAFDDKFQDTNWMNNDNNSNNNLYAPPKEEAIANVACEPSGSEMRTVTIKASYKDDIIRFRISSGSGIMELKDEVAKRLKVDAGTFDIKYLDDDNEWVLIACDADLQECLEIPRSSRTKIVRLLVHDVTTNLGSSCESTGEL

SEQ ID NO: 45271 - protein, 935 aa, Arabidopsis thaliana
  peptide (1)..(935): Ceres Seq. ID no. 13575990
  misc_feature (839)..(921): Pfam Name: PB1 domain Pfam Description: PB1 domain
  misc_feature (123)..(510): Homolog of NCBI NO: 20503001 NR Description: Putataive nodule inception protein
  misc_feature (839)..(933): Homolog of NCBI NO: 34904438 NR Description: unnamed protein product [Oryza sativa (japonica
  misc_feature (552)..(865): Homolog of NCBI NO: 34904438 NR Description: unnamed protein product [Oryza sativa (japonica
  misc_feature (115)..(509): Homolog of NCBI NO: 34904438 NR Description: unnamed protein product [Oryza sativa (japonica
  misc_feature (826)..(934): Homolog of NCBI NO: 20259460 NR Description: unknown protein [Arabidopsis thaliana]
  misc_feature (7)..(650): Homolog of NCBI NO: 20259460 NR Description: unknown protein [Arabidopsis thaliana]
  misc_feature (826)..(934): Homolog of NCBI NO: 15217662 NR Description: RWP-RK domain containing protein [Arabidopsis
  misc_feature (7)..(650): Homolog of NCBI NO: 15217662 NR Description: RWP-RK domain containing protein [Arabidopsis
  misc_feature (826)..(934): Homolog of NCBI NO: 6633813 NR Description: F1N19.10 [Arabidopsis thaliana]
  misc_feature (1)..(650): Homolog of NCBI NO: 6633813 NR Description: F1N19.10 [Arabidopsis thaliana]
MDVDDLDLDGSWPLDQIPYLSSSNRMISPIFVSSSSEQPCSPLWAFSDGGGNGFHHATSGGDDEKISSVSGVPSFRLAEYPLFLPYSSPSAAENTTEKHNSFQFPSPLMSLVPPENTDNYCVIKERMTQALRYFKESTEQHVLAQVWAPVRKNGRDLLTTLGQPFVLNPNGNGLNQYRMISLTYMFSVDSESDVELGLPGRVFRQKLPEWTPNVQYYSSKEFSRLDHALHYNVRGTLALPVFNPSGQSCIGVVELIMTSEKIHYAPEVDKVCKALEAVNLKSSEILDHQTTQICNESRQNALAEILEVLTVVCETHNLPLAQTWVPCQHGSVLANGGGLKKNCTSFDGSCMGQICMSTTDMACYVVDAHVWGFRDACLEHHLQKGQGVAGRAFLNGGSCFCRDITKFCKTQYPLVHYALMFKLTTCFAISLQSSYTGDDSYILEFFLPSSITDDQEQDLLLGSILVTMKEHFQSLRVASGVDFGEDDDKLSFEIIQALPDKKVHSKIESIRVPFSGFKSNATETMLIPQPVVQSSDPVNEKINVATVNGVVKEKKKTEKKRGKTEKTISLDVLQQYFTGSLKDAAKSLGVCPTTMKRICRQHGISRWPSRKIKKVNRSITKLKRVIESVQGTDGGLDLTSMAVSSIPWTHGQTSAQPLNSPNGSKPPELPNTNNSPNHWSSDHSPNEPNGSPELPPSNGHKRSRTVDESAGTPTSHGSCDGNQLDEPKVPNQDPLFTVGGSPGLLFPPYSRDHDVSAASFAMPNRLLGSIDHFRGMLIEDAGSSKDLRNLCPTAAFDDKFQDTNWMNNDNNSNNNLYAPPKEEAIANVACEPSGSEMRTVTIKASYKDDIIRFRISSGSGIMELKDEVAKRLKVDAGTFDIKYLDDDNEWVLIACDADLQECLEIPRSSRTKIVRLLVHDVTTNLGSSCESTGEL

SEQ ID NO: 45272 - DNA, 8061 bp, Arabidopsis thaliana
  misc_feature (1)..(8061): Ceres Seq. ID no. 13575991
  misc_feature: MA Experiment ID: 20000184 Result: Up-regulated in Transcription
  misc_feature: MA Experiment 20000184 PARAMETER Experiment Name: At_Shoots__P Parameter: Age (day) Value: 7
  misc_feature: MA Experiment 20000184 PARAMETER Experiment Name: At_Shoots__P Parameter: Tissue Value: Shoots vs. Whole Plant
  misc_feature: MA Experiment ID: 20001556 Result: Up-regulated in Transcription
  misc_feature: MA Experiment 20001556 PARAMETER Experiment Name: At_Drought_Soil_Dry_P Parameter: Age (day) Value: 26
  misc_feature: MA Experiment 20001556 PARAMETER Experiment Name: At_Drought_Soil_Dry_P Parameter: Organism Value: A. thaliana
  misc_feature: MA Experiment 20001556 PARAMETER Experiment Name: At_Drought_Soil_Dry_P Parameter: Plant Line Value: WS
  misc_feature: MA Experiment 20001556 PARAMETER Experiment Name: At_Drought_Soil_Dry_P Parameter: Post Timepoint (hr) Value: None
  misc_feature: MA Experiment 20001556 PARAMETER Experiment Name: At_Drought_Soil_Dry_P Parameter: Post-Treatment Value: None
  misc_feature: MA Experiment 20001556 PARAMETER Experiment Name: At_Drought_Soil_Dry_P Parameter: Timepoint (day) Value: 12
  misc_feature: MA Experiment 20001556 PARAMETER Experiment Name: At_Drought_Soil_Dry_P Parameter: Treatment Value: Drought vs. No Drought
atggttgtttctgtctttgcatttcagatgagcagcaggcgatcagtgaagagatcattggttcttgatgatgatgacgatgaggatatattctacaacttcaaggtccttctacctaatggcactagtgtgaaactcacactgaaaaacccagaaccggagatctcgatgcagtcttttgtcaacttggtgaagaaggagtatgataatgcacgaaaagattgtcttttgatgtctaagaggatgaaggttgattggaactcaggcggaaagtttcatctggagtcaaatggtgggaagatgaaaggcattgttcgctttgctgcgtttaagcctgacttgtgccacataatacgtcttgatgacggttctggtatagcttccaccatgtatgagaacttgtgggatttgacaccggatactgacctacttaaagagctaccagaaaattatagctttgagacagctctcgcggatctaatagacaattccttgcaagctgtgtggccttatcgtgaaggagctcgaaaactgattagtgtggatatatctggtgaccatattacagtctttgataccgggagaggaatggacagtagcgaaggaaactctattgataaatggtttgattttttggtgaacattcttcacatttggtttaaattatgcaggggtaaaataggggcctcactacatagatctcaaaaaaccggtgccattggaggcaatccaccataccttaagccatattttgggatgtttggatacggaggtccttatgcttctatgttcttgggaaggtgcgacttcagcttctgtttacccatacttatctgcattgtcttgttacgtctaactctcttctctgtcaggcgtactttggtgtcttctaagacaaaagagtccaagaaagtgttcactttgcaattcaagaaagaagcattgattgacaatcggtctatcgtgggaaaaaactggaagactgatggtggcatgagggacccgtcggaggaggaaatgaagttatcccctcatggaagctttacaaaggtcgagatatttgaatcagaatttgacatctcaaagatctatcaactccagtgcaggctcaaggatatttactttccttacatccagttttgccttgcgaccattttcttgtgtgatgaactctccaaaactgggaggactgaaaggcctgtggcgtttcagattcgattcactcttttcggtgggaaaagaaaagggacagctcaagaggcaaatgctcgcctcaagtttgtttattttccaatcgtccagggaaaagaaagcattgagaaaattttgcagagtttagaagaggaaggatgcaaagtttctgaaagcttccagacttttggccgtgtttcattaagaaggcttggtcgcttacttccagaagtccgttggaaaagctgccgaagagtaaaatgctttgttgatttggatgctggttttagcccaacgccctccaaaactgaccttgcaagccaaaatcctttctcagtggctttaagaaactttggtagtaagtcgacggagaaagagaaggatgatgatgtcaatattgtgattcatagagaaggaaaatctgtcagctatgcgcatctggaggaaaaatatcaagaatgggttttggagatgcataatacccatgatgaagaagctgcatcgggtctagatgaagctgtcctcattgttggatccttggataaaaaggcccttggcattttgcgtgatgctgtgagggtgcataaggaagttaggagaaaagaaaaaacatggaaacgtggtcagaatataaagattctgagaggagcttatgctgggattcacaataacaatgtgtatgccaccattgactatttcctaatagaagggtttgaggacgaagcaggcggggatactcggattttatgcaggcctatcgatcgccctgagaacgagggatgcaagctttcaatcatcgatggaatttcgaaactggaagttcagagttctttatctttaccgatcactataatcgactctggaaagtgccttcctgtagatgcgaacgaatggaatagaaaacttgataagcaacaggaaaaagcaccgtcaaaaattgatttgctggatgaaagagattgcagagaattgaagattgatggggaactacccattggcaattctgtgcgtgctgggaaagctcctccgaaacagattgttgcagttgtccgacctgcatgcttcacgtctttaactccgtcaaagaagttggaccagaaaaatatcgttaagatggatggggaagaaatggtcatggtagtaaaattgaaatcaagtgataagaatatatcttcgcagcgcttgtttcctacatcccgtaaagggattagtggtctttacatcttctcacttgggtccaagtttccaaaccttttcaagaaagctggcacctacaatttttctttctccattggcaattcgattaagtgcaacaaaacggtggttgttagaccttcttctaaggcagcaaggtgggaacttgacgataatctggagtcccttccgtgcaatgttcgggtgggttcttctcttccacctttccgtatcgcttgctttgataagtacaaaaacaagattccgttcacttctgttccaagtctggaagttgaattggaagctagccctggattcttaatcaaaattgacaaacttgagaccaacctgataaatgatggattaattcttaaaatcgagaatatgctcgttgagactgatgagttagaccagatccgacctaattatgaagcaacgttagagatacgtgcaatggacaatcctttttctgtctcggttccttgtaaagttaatcccgggcctctgaaacgagttgctgtgaataatcccaaggctctggaaaatttgcttccagattctactgtcgaagattttatcctggagttgttcgatggatataataaccatgttgccgaggggaccgatgttctgatacatattgatggttatcgtattgaagactggatgggcatcaaccgtaaggttgatagtcgtggctgcattaatctatctggcattcttaaggtcacagaaggctatgggaaatctgtatcactctctgtaatgtctggtaatgaagttatcttctgtaaagagtcacaaattgatgaacgacagctaagacttgtaaccgagctgcccgactgctgtactgctggtacaaatctcatgaacctcatcttccaagtgacggagttagatggttctttggatactagcatccatcatgacgaaaaatcaggttgtttccatacaatgagcattgaatctgattcaagcagcgttgaaagtgcaatcagatatgcctttgtccacgggtcctgcaaagtttcttctctctccctacctgagaacgagggtgtcttttcttgcagggtgttccattctcgatatcccgagctgcagatgagcataaagattcaggtaacatctgctcccacatctgaaagagaggagagtggatattctacaccccattcaaaaacgactccaccacctgaatcagggattccttcaatcacaaatccatggccgactccatgttcacagtttggagtattggccattaggtcatcatcattggctctcagtagcgaaactagcctgatggatatggcacagtacactgaggctcaacgtgaacatgctgagcaagagtgtagtagactgcaagcttctctggaacctcttggtgcaccgtttccagaatgcctatccaccaaagaatcaatgatgaagcaaatcgaagagaagcatcatgacactgcagcatcagtgttctgttgtctgtacagaaaggctccacctccacggtctctgtttctgtcacagaaaggaatgtttggcgttgtagcgcttctaggttcagttgcctccacgtcgctaagcagggttttgtctgaatatttggggaaagacacaatgctttctttggtgtgcaaatcatcacagtttggacccaaaagcgatgagtatcgcaagtttcaatctgaagcagctagcctcggacgatctatcaccaatcggtttcttgttatttgtcttgatgcaactagaccttggaggaacggacttgtgaggaatgatcctcagaagagattagccatggataacccttacctgccgaatggagatcctatacccggtttcaaaggctacgctgtgaacatgatagatttagcttcagaggagctggatatacaatcaagctcgggttacgggcttagagagacactattctatggagttttcagagagttgcaggtatatgagaccgcagagcatcttgaagcagctcttcctcacatcaatggtggagacgctgtgtctctagatggtgtgatcgccagagaaaacggtttcatatactctggttgctgtacaccggaagttcattttccaataaccgtaacggagaggcaagagaaggcattggtgcaactggaaataacaagagacaagaagagaaagactgaggagatgatgactgaggagaatcgttcgttgcgcagtcggggtttggtggattactcaaacagaaatcagtcttcaaattctaagatgagtaataagagatcggtcgggagagtattgagtctagatgatgatgaagcagaagataagttttacaggctcaaggttcttttaccaaacagcacaagtgtgacactcgcacttaccaaccctgaacctagaatgtcaatgaataattttgttaacttggtgaaagaggaatatgagaaaagcctgaacaaatgtgtattgtccggtaagaagaggaagcgggttgattggaatttggctgtcaaatattatctcgagtttaacggcgaaaagattaaagaaatcgttcgatttgacaagtttaagcctgatttgtgcaatgtactccgtcttgatatttgtaagacggcgcgtacagagaacccgagccagagtgaagagtacaatccttcggaagaacaagtgttgcttggagatgataatgaagaaactaagcaaatttcaatggattctgaagaggaaactgaaccattacgacccttgaaaatgtactttagcccctccgattatttgaagccattcaagataggaacaaagtgttatattcatcaagtggtgaatattttggagagtcatctttcaagtgaggagaagaaatggttttgggagcatccacagttcaaacatttcttccatatgcatacggattcaaatcacaaggtaatggccatgtggatgcttcttcttcgcaccgcttgtgttgataagaagaaggaatgttggtttgttgtcaacggtgttccaatccgctattctcttcaagaacttgcactcatctctggtttatactgccattcttatccaaaaaactataaagcatttggcagcttagggttctctggtaagcattttggtgttggtgcaacagtaacatatgcgaaagtgaagacaaaactactctcaatgaagaaatcttcgagagagcgtttgaaaatggcggtcctattcttcttatgcagcgtcatcattgggaagagaaaaacaggggaaaaagcagaggctgtggaagatttctttcttaaatccgtggaagatctagaatggtgtaaaacattcccatggggtcgattagcatttgataagaatatgaaagacatttttcatctcatggaccactttgatgaagaattgggcgcagcatgggtgtttcctagcttcgtgatgcagcttctagcgtttgagaccatcccaaatctaatgaacaactttagaaaacatgttagagaagcagatcctgagtgtcctaggatgtgcaagatgaagttcaaacctagtagtatgaaaggctttcctatttcggagttgtatgatactcttggtacaacaaaggaaattaagagtatcatgcttccatctcctagtgaaaaagaacttttgaagcaaatcatggatgatgaggttggacatgatgatgtggatgatatgattgttgatggttggacgaagcgtataattaaggaaaataagccaatatgttttgaagagcttcatatccaagatgttagtagccgtgagattgaggcaaatccaaagaatgcgaatgttgttggggtaagagttggtcggaaaaaggtggctctgaagaaggtgagtgaaaaaggaattgttgagcagctacagaagcagttggaagatggtttaaacagaatatatatgaagattgatgacatggatacaagacttacatatgtggaatcatgtgtgaagaatctaaaagaagctaaagatactaaaggtgagaaggaagatggagagaaagagaaagagttggaagagaatgacttggaagaagatgagactgaaacagataaagagaaagagaaagaagatgagtcaagtgagaagagaagcaaggtggagaggatgtacgggagaaagagaacacgcacaacaacggcaaaagaacaagaagaaaaaggagaagaaattcaagtcggttttcaagaaacaagtgaaagaggcagaaaaaaggcaaagttgacatggaagaaagtggatattaagggtgtaactgcggatcagggaaactcgattactactaacgaaagggtggttgttgaaccgtcttcgaaagtgggaagttggaaacttgcttctaatctcaagtccacgcggcagtataatgttcaggtgggttcttcacttcctccttgctctatctcttgcgttgatgaaccattttctgtctcagtttcttgtaaaggttctactgttcaaaattatatcttggaggtgttcgatggatataataaccatgttgcagaaggtaccaatgttctgatatgtattgagggctattgtatcaatgactcgatgggcttaaaccaaaaggttaatagttgtggctgcattgatctgtctggaatactccaagtcacggctggctatgggaaaactatatctctctcggttatgtctggtattgatgagatcttcaagaaagagtctcagactgagagacgagagctcatgctcttaacaaagctgcctgaatgctgtgttgctggttcaaatcttacaaacctcatttttaaagtgacggattcagatggtgttatggatactagtatccatcatgatgaaaaatctggatgtttccatacaatgagcattgaaactgattcaagcagcgatgagagtgaaatcagatatgcctttgtccatggttcctgcaaagttcctactctttctctacctgagagggagggtgtcttttctttcaaggttttccattctcgatttcccgagcttcatctgagcttaaagattcagcttacacctgctcaaatacttcaaagagatgagacatcttattcaaggatgggtttaacacctaaatcaaagatggcttcaaccacatattcaccggctctcagtagccaaactggcccgagcctgagggatgtggcacagttcactgagagctttaaagaaaatcttattggatacagtgaacacagagtggaaatagatgagcgcctacattgtttggaagctgaacaaaaccaggctaaggaagagttgcgtaccttgcaagttgcctccacctcccttagcagggtgttatctgaatatttgggagaagacatgttgctcgctttggtatgcaaatcggcacaaattggacctaataatgctgagtttctcaggcttcagtccaatcatcggtttcatgttctatgtcttgatgcaatcagaccttggaaggatggacttttggagaacgatcctcagaagaaattagccatggatgacccaaagctgcccgatggagatcccataccgggtttcaagggctatgccgtgaacatgattgatttggctccagaggagctcactgttcaaacttactcaggatacgggcttagagagactttgttctataatctctttgggaatttacaggtatag

SEQ ID NO: 45273 - protein, 2686 aa, Arabidopsis thaliana
  peptide (1)..(2686): Ceres Seq. ID no. 13575992
  misc_feature (1995)..(2047): Pfam Name: Drosophila protein of unknown function, DUF287 Pfam Description: Drosophila protein of unknown function, DUF287
  misc_feature (1026)..(1074): Homolog of NCBI NO: 9279729 NR Description: gene_id:MWL2.12~unknown protein [Arabidopsis
  misc_feature (1072)..(1239): Homolog of NCBI NO: 9279729 NR Description: gene_id:MWL2.12~unknown protein [Arabidopsis
  misc_feature (1772)..(2237): Homolog of NCBI NO: 15232634 NR Description: hypothetical protein [Arabidopsis thaliana]
  misc_feature (1690)..(2237): Homolog of NCBI NO: 11994227 NR Description: En/Spm-like transposon protein-like [Arabidopsis
  misc_feature (1549)..(1662): Homolog of NCBI NO: 15237930 NR Description: hypothetical protein [Arabidopsis thaliana]
  misc_feature (809)..(900): Homolog of NCBI NO: 10177087 NR Description: contains similarity to En/Spm-like transposon
  misc_feature (944)..(1451): Homolog of NCBI NO: 10177087 NR Description: contains similarity to En/Spm-like transposon
  misc_feature (6)..(121): Homolog of NCBI NO: 10177087 NR Description: contains similarity to En/Spm-like transposon
  misc_feature (2086)..(2581): Homolog of NCBI NO: 10177087 NR Description: contains similarity to En/Spm-like transposon
  misc_feature (2204)..(2355): Homolog of NCBI NO: 15237930 NR Description: hypothetical protein [Arabidopsis thaliana]
MVVSVFAFQMSSRRSVKRSLVLDDDDDEDIFYNFKVLLPNGTSVKLTLKNPEPEISMQSFVNLVKKEYDNARKDCLLMSKRMKVDWNSGGKFHLESNGGKMKGIVRFAAFKPDLCHIIRLDDGSGIASTMYENLWDLTPDTDLLKELPENYSFETALADLIDNSLQAVWPYREGARKLISVDISGDHITVFDTGRGMDSSEGNSIDKWFDFLVNILHIWFKLCRGKIGASLHRSQKTGAIGGNPPYLKPYFGMFGYGGPYASMFLGRCDFSFCLPILICIVLLRLTLFSVRRTLVSSKTKESKKVFTLQFKKEALIDNRSIVGKNWKTDGGMRDPSEEEMKLSPHGSFTKVEIFESEFDISKIYQLQCRLKDIYFPYIQFCLATIFLCDELSKTGRTERPVAFQIRFTLFGGKRKGTAQEANARLKFVYFPIVQGKESIEKILQSLEEEGCKVSESFQTFGRVSLRRLGRLLPEVRWKSCRRVKCFVDLDAGFSPTPSKTDLASQNPFSVALRNFGSKSTEKEKDDDVNIVIHREGKSVSYAHLEEKYQEWVLEMHNTHDEEAASGLDEAVLIVGSLDKKALGILRDAVRVHKEVRRKEKTWKRGQNIKILRGAYAGIHNNNVYATIDYFLIEGFEDEAGGDTRILCRPIDRPENEGCKLSIIDGISKLEVQSSLSLPITIIDSGKCLPVDANEWNRKLDKQQEKAPSKIDLLDERDCRELKIDGELPIGNSVRAGKAPPKQIVAVVRPACFTSLTPSKKLDQKNIVKMDGEEMVMVVKLKSSDKNISSQRLFPTSRKGISGLYIFSLGSKFPNLFKKAGTYNFSFSIGNSIKCNKTVVVRPSSKAARWELDDNLESLPCNVRVGSSLPPFRIACFDKYKNKIPFTSVPSLEVELEASPGFLIKIDKLETNLINDGLILKIENMLVETDELDQIRPNYEATLEIRAMDNPFSVSVPCKVNPGPLKRVAVNNPKALENLLPDSTVEDFILELFDGYNNHVAEGTDVLIHIDGYRIEDWMGINRKVDSRGCINLSGILKVTEGYGKSVSLSVMSGNEVIFCKESQIDERQLRLVTELPDCCTAGTNLMNLIFQVTELDGSLDTSIHHDEKSGCFHTMSIESDSSSVESAIRYAFVHGSCKVSSLSLPENEGVFSCRVFHSRYPELQMSIKIQVTSAPTSEREESGYSTPHSKTTPPPESGIPSITNPWPTPCSQFGVLAIRSSSLALSSETSLMDMAQYTEAQREHAEQECSRLQASLEPLGAPFPECLSTKESMMKQIEEKHHDTAASVFCCLYRKAPPPRSLFLSQKGMFGVVALLGSVASTSLSRVLSEYLGKDTMLSLVCKSSQFGPKSDEYRKFQSEAASLGRSITNRFLVICLDATRPWRNGLVRNDPQKRLAMDNPYLPNGDPIPGFKGYAVNMIDLASEELDIQSSSGYGLRETLFYGVFRELQVYETAEHLEAALPHINGGDAVSLDGVIARENGFIYSGCCTPEVHFPITVTERQEKALVQLEITRDKKRKTEEMMTEENRSLRSRGLVDYSNRNQSSNSKMSNKRSVGRVLSLDDDEAEDKFYRLKVLLPNSTSVTLALTNPEPRMSMNNFVNLVKEEYEKSLNKCVLSGKKRKRVDWNLAVKYYLEFNGEKIKEIVRFDKFKPDLCNVLRLDICKTARTENPSQSEEYNPSEEQVLLGDDNEETKQISMDSEEETEPLRPLKMYFSPSDYLKPFKIGTKCYIHQVVNILESHLSSEEKKWFWEHPQFKHFFHMHTDSNHKVMAMWMLLLRTACVDKKKECWFVVNGVPIRYSLQELALISGLYCHSYPKNYKAFGSLGFSGKHFGVGATVTYAKVKTKLLSMKKSSRERLKMAVLFFLCSVIIGKRKTGEKAEAVEDFFLKSVEDLEWCKTFPWGRLAFDKNMKDIFHLMDHFDEELGAAWVFPSFVMQLLAFETIPNLMNNFRKHVREADPECPRMCKMKFKPSSMKGFPISELYDTLGTTKEIKSIMLPSPSEKELLKQIMDDEVGHDDVDDMIVDGWTKRIIKENKPICFEELHIQDVSSREIEANPKNANVVGVRVGRKKVALKKVSEKGIVEQLQKQLEDGLNRIYMKIDDMDTRLTYVESCVKNLKEAKDTKGEKEDGEKEKELEENDLEEDETETDKEKEKEDESSEKRSKVERMYGRKRTRTTTAKEQEEKGEEIQVGFQETSERGRKKAKLTWKKVDIKGVTADQGNSITTNERVVVEPSSKVGSWKLASNLKSTRQYNVQVGSSLPPCSISCVDEPFSVSVSCKGSTVQNYILEVFDGYNNHVAEGTNVLICIEGYCINDSMGLNQKVNSCGCIDLSGILQVTAGYGKTISLSVMSGIDEIFKKESQTERRELMLLTKLPECCVAGSNLTNLIFKVTDSDGVMDTSIHHDEKSGCFHTMSIETDSSSDESEIRYAFVHGSCKVPTLSLPEREGVFSFKVFHSRFPELHLSLKIQLTPAQILQRDETSYSRMGLTPKSKMASTTYSPALSSQTGPSLRDVAQFTESFKENLIGYSEHRVEIDERLHCLEAEQNQAKEELRTLQVASTSLSRVLSEYLGEDMLLALVCKSAQIGPNNAEFLRLQSNHRFHVLCLDAIRPWKDGLLENDPQKKLAMDDPKLPDGDPIPGFKGYAVNMIDLAPEELTVQTYSGYGLRETLFYNLFGNLQV

SEQ ID NO: 45274 - protein, 2677 aa, Arabidopsis thaliana
  peptide (1)..(2677): Ceres Seq. ID no. 13575993
  misc_feature (1986)..(2038): Pfam Name: Drosophila protein of unknown function, DUF287 Pfam Description: Drosophila protein of unknown function, DUF287
  misc_feature (1017)..(1065): Homolog of NCBI NO: 9279729 NR Description: gene_id:MWL2.12~unknown protein [Arabidopsis
  misc_feature (1063)..(1230): Homolog of NCBI NO: 9279729 NR Description: gene_id:MWL2.12~unknown protein [Arabidopsis
  misc_feature (1763)..(2228): Homolog of NCBI NO: 15232634 NR Description: hypothetical protein [Arabidopsis thaliana]
  misc_feature (1681)..(2228): Homolog of NCBI NO: 11994227 NR Description: En/Spm-like transposon protein-like [Arabidopsis
  misc_feature (1540)..(1653): Homolog of NCBI NO: 15237930 NR Description: hypothetical protein [Arabidopsis thaliana]
  misc_feature (800)..(891): Homolog of NCBI NO: 10177087 NR Description: contains similarity to En/Spm-like transposon
  misc_feature (935)..(1442): Homolog of NCBI NO: 10177087 NR Description: contains similarity to En/Spm-like transposon
  misc_feature (1)..(112): Homolog of NCBI NO: 10177087 NR Description: contains similarity to En/Spm-like transposon
  misc_feature (2077)..(2572): Homolog of NCBI NO: 10177087 NR Description: contains similarity to En/Spm-like transposon
  misc_feature (2195)..(2346): Homolog of NCBI NO: 15237930 NR Description: hypothetical protein [Arabidopsis thaliana]
MSSRRSVKRSLVLDDDDDEDIFYNFKVLLPNGTSVKLTLKNPEPEISMQSFVNLVKKEYDNARKDCLLMSKRMKVDWNSGGKFHLESNGGKMKGIVRFAAFKPDLCHIIRLDDGSGIASTMYENLWDLTPDTDLLKELPENYSFETALADLIDNSLQAVWPYREGARKLISVDISGDHITVFDTGRGMDSSEGNSIDKWFDFLVNILHIWFKLCRGKIGASLHRSQKTGAIGGNPPYLKPYFGMFGYGGPYASMFLGRCDFSFCLPILICIVLLRLTLFSVRRTLVSSKTKESKKVFTLQFKKEALIDNRSIVGKNWKTDGGMRDPSEEEMKLSPHGSFTKVEIFESEFDISKIYQLQCRLKDIYFPYIQFCLATIFLCDELSKTGRTERPVAFQIRFTLFGGKRKGTAQEANARLKFVYFPIVQGKESIEKILQSLEEEGCKVSESFQTFGRVSLRRLGRLLPEVRWKSCRRVKCFVDLDAGFSPTPSKTDLASQNPFSVALRNFGSKSTEKEKDDDVNIVIHREGKSVSYAHLEEKYQEWVLEMHNTHDEEAASGLDEAVLIVGSLDKKALGILRDAVRVHKEVRRKEKTWKRGQNIKILRGAYAGIHNNNVYATIDYFLIEGFEDEAGGDTRILCRPIDRPENEGCKLSIIDGISKLEVQSSLSLPITIIDSGKCLPVDANEWNRKLDKQQEKAPSKIDLLDERDCRELKIDGELPIGNSVRAGKAPPKQIVAVVRPACFTSLTPSKKLDQKNIVKMDGEEMVMVVKLKSSDKNISSQRLFPTSRKGISGLYIFSLGSKFPNLFKKAGTYNFSFSIGNSIKCNKTVVVRPSSKAARWELDDNLESLPCNVRVGSSLPPFRIACFDKYKNKIPFTSVPSLEVELEASPGFLIKIDKLETNLINDGLILKIENMLVETDELDQIRPNYEATLEIRAMDNPFSVSVPCKVNPGPLKRVAVNNPKALENLLPDSTVEDFILELFDGYNNHVAEGTDVLIHIDGYRIEDWMGINRKVDSRGCINLSGILKVTEGYGKSVSLSVMSGNEVIFCKESQIDERQLRLVTELPDCCTAGTNLMNLIFQVTELDGSLDTSIHHDEKSGCFHTMSIESDSSSVESAIRYAFVHGSCKVSSLSLPENEGVFSCRVFHSRYPELQMSIKIQVTSAPTSEREESGYSTPHSKTTPPPESGIPSITNPWPTPCSQFGVLAIRSSSLALSSETSLMDMAQYTEAQREHAEQECSRLQASLEPLGAPFPECLSTKESMMKQIEEKHHDTAASVFCCLYRKAPPPRSLFLSQKGMFGVVALLGSVASTSLSRVLSEYLGKDTMLSLVCKSSQFGPKSDEYRKFQSEAASLGRSITNRFLVICLDATRPWRNGLVRNDPQKRLAMDNPYLPNGDPIPGFKGYAVNMIDLASEELDIQSSSGYGLRETLFYGVFRELQVYETAEHLEAALPHINGGDAVSLDGVIARENGFIYSGCCTPEVHFPITVTERQEKALVQLEITRDKKRKTEEMMTEENRSLRSRGLVDYSNRNQSSNSKMSNKRSVGRVLSLDDDEAEDKFYRLKVLLPNSTSVTLALTNPEPRMSMNNFVNLVKEEYEKSLNKCVLSGKKRKRVDWNLAVKYYLEFNGEKIKEIVRFDKFKPDLCNVLRLDICKTARTENPSQSEEYNPSEEQVLLGDDNEETKQISMDSEEETEPLRPLKMYFSPSDYLKPFKIGTKCYIHQVVNILESHLSSEEKKWFWEHPQFKHFFHMHTDSNHKVMAMWMLLLRTACVDKKKECWFVVNGVPIRYSLQELALISGLYCHSYPKNYKAFGSLGFSGKHFGVGATVTYAKVKTKLLSMKKSSRERLKMAVLFFLCSVIIGKRKTGEKAEAVEDFFLKSVEDLEWCKTFPWGRLAFDKNMKDIFHLMDHFDEELGAAWVFPSFVMQLLAFETIPNLMNNFRKHVREADPECPRMCKMKFKPSSMKGFPISELYDTLGTTKEIKSIMLPSPSEKELLKQIMDDEVGHDDVDDMIVDGWTKRIIKENKPICFEELHIQDVSSREIEANPKNANVVGVRVGRKKVALKKVSEKGIVEQLQKQLEDGLNRIYMKIDDMDTRLTYVESCVKNLKEAKDTKGEKEDGEKEKELEENDLEEDETETDKEKEKEDESSEKRSKVERMYGRKRTRTTTAKEQEEKGEEIQVGFQETSERGRKKAKLTWKKVDIKGVTADQGNSITTNERVVVEPSSKVGSWKLASNLKSTRQYNVQVGSSLPPCSISCVDEPFSVSVSCKGSTVQNYILEVFDGYNNHVAEGTNVLICIEGYCINDSMGLNQKVNSCGCIDLSGILQVTAGYGKTISLSVMSGIDEIFKKESQTERRELMLLTKLPECCVAGSNLTNLIFKVTDSDGVMDTSIHHDEKSGCFHTMSIETDSSSDESEIRYAFVHGSCKVPTLSLPEREGVFSFKVFHSRFPELHLSLKIQLTPAQILQRDETSYSRMGLTPKSKMASTTYSPALSSQTGPSLRDVAQFTESFKENLIGYSEHRVEIDERLHCLEAEQNQAKEELRTLQVASTSLSRVLSEYLGEDMLLALVCKSAQIGPNNAEFLRLQSNHRFHVLCLDAIRPWKDGLLENDPQKKLAMDDPKLPDGDPIPGFKGYAVNMIDLAPEELTVQTYSGYGLRETLFYNLFGNLQV

SEQ ID NO: 45275 - protein, 2630 aa, Arabidopsis thaliana
  peptide (1)..(2630): Ceres Seq. ID no. 13575994
  misc_feature (1939)..(1991): Pfam Name: Drosophila protein of unknown function, DUF287 Pfam Description: Drosophila protein of unknown function, DUF287
  misc_feature (970)..(1018): Homolog of NCBI NO: 9279729 NR Description: gene_id:MWL2.12~unknown protein [Arabidopsis
  misc_feature (1016)..(1183): Homolog of NCBI NO: 9279729 NR Description: gene_id:MWL2.12~unknown protein [Arabidopsis
  misc_feature (1716)..(2181): Homolog of NCBI NO: 15232634 NR Description: hypothetical protein [Arabidopsis thaliana]
  misc_feature (1634)..(2181): Homolog of NCBI NO: 11994227 NR Description: En/Spm-like transposon protein-like [Arabidopsis
  misc_feature (1493)..(1606): Homolog of NCBI NO: 15237930 NR Description: hypothetical protein [Arabidopsis thaliana]
  misc_feature (753)..(844): Homolog of NCBI NO: 10177087 NR Description: contains similarity to En/Spm-like transposon
  misc_feature (888)..(1395): Homolog of NCBI NO: 10177087 NR Description: contains similarity to En/Spm-like transposon
  misc_feature (1)..(65): Homolog of NCBI NO: 10177087 NR Description: contains similarity to En/Spm-like transposon
  misc_feature (2030)..(2525): Homolog of NCBI NO: 10177087 NR Description: contains similarity to En/Spm-like transposon
  misc_feature (2148)..(2299): Homolog of NCBI NO: 15237930 NR Description: hypothetical protein [Arabidopsis thaliana]
MQSFVNLVKKEYDNARKDCLLMSKRMKVDWNSGGKFHLESNGGKMKGIVRFAAFKPDLCHIIRLDDGSGIASTMYENLWDLTPDTDLLKELPENYSFETALADLIDNSLQAVWPYREGARKLISVDISGDHITVFDTGRGMDSSEGNSIDKWFDFLVNILHIWFKLCRGKIGASLHRSQKTGAIGGNPPYLKPYFGMFGYGGPYASMFLGRCDFSFCLPILICIVLLRLTLFSVRRTLVSSKTKESKKVFTLQFKKEALIDNRSIVGKNWKTDGGMRDPSEEEMKLSPHGSFTKVEIFESEFDISKIYQLQCRLKDIYFPYIQFCLATIFLCDELSKTGRTERPVAFQIRFTLFGGKRKGTAQEANARLKFVYFPIVQGKESIEKILQSLEEEGCKVSESFQTFGRVSLRRLGRLLPEVRWKSCRRVKCFVDLDAGFSPTPSKTDLASQNPFSVALRNFGSKSTEKEKDDDVNIVIHREGKSVSYAHLEEKYQEWVLEMHNTHDEEAASGLDEAVLIVGSLDKKALGILRDAVRVHKEVRRKEKTWKRGQNIKILRGAYAGIHNNNVYATIDYFLIEGFEDEAGGDTRILCRPIDRPENEGCKLSIIDGISKLEVQSSLSLPITIIDSGKCLPVDANEWNRKLDKQQEKAPSKIDLLDERDCRELKIDGELPIGNSVRAGKAPPKQIVAVVRPACFTSLTPSKKLDQKNIVKMDGEEMVMVVKLKSSDKNISSQRLFPTSRKGISGLYIFSLGSKFPNLFKKAGTYNFSFSIGNSIKCNKTVVVRPSSKAARWELDDNLESLPCNVRVGSSLPPFRIACFDKYKNKIPFTSVPSLEVELEASPGFLIKIDKLETNLINDGLILKIENMLVETDELDQIRPNYEATLEIRAMDNPFSVSVPCKVNPGPLKRVAVNNPKALENLLPDSTVEDFILELFDGYNNHVAEGTDVLIHIDGYRIEDWMGINRKVDSRGCINLSGILKVTEGYGKSVSLSVMSGNEVIFCKESQIDERQLRLVTELPDCCTAGTNLMNLIFQVTELDGSLDTSIHHDEKSGCFHTMSIESDSSSVESAIRYAFVHGSCKVSSLSLPENEGVFSCRVFHSRYPELQMSIKIQVTSAPTSEREESGYSTPHSKTTPPPESGIPSITNPWPTPCSQFGVLAIRSSSLALSSETSLMDMAQYTEAQREHAEQECSRLQASLEPLGAPFPECLSTKESMMKQIEEKHHDTAASVFCCLYRKAPPPRSLFLSQKGMFGVVALLGSVASTSLSRVLSEYLGKDTMLSLVCKSSQFGPKSDEYRKFQSEAASLGRSITNRFLVICLDATRPWRNGLVRNDPQKRLAMDNPYLPNGDPIPGFKGYAVNMIDLASEELDIQSSSGYGLRETLFYGVFRELQVYETAEHLEAALPHINGGDAVSLDGVIARENGFIYSGCCTPEVHFPITVTERQEKALVQLEITRDKKRKTEEMMTEENRSLRSRGLVDYSNRNQSSNSKMSNKRSVGRVLSLDDDEAEDKFYRLKVLLPNSTSVTLALTNPEPRMSMNNFVNLVKEEYEKSLNKCVLSGKKRKRVDWNLAVKYYLEFNGEKIKEIVRFDKFKPDLCNVLRLDICKTARTENPSQSEEYNPSEEQVLLGDDNEETKQISMDSEEETEPLRPLKMYFSPSDYLKPFKIGTKCYIHQVVNILESHLSSEEKKWFWEHPQFKHFFHMHTDSNHKVMAMWMLLLRTACVDKKKECWFVVNGVPIRYSLQELALISGLYCHSYPKNYKAFGSLGFSGKHFGVGATVTYAKVKTKLLSMKKSSRERLKMAVLFFLCSVIIGKRKTGEKAEAVEDFFLKSVEDLEWCKTFPWGRLAFDKNMKDIFHLMDHFDEELGAAWVFPSFVMQLLAFETIPNLMNNFRKHVREADPECPRMCKMKFKPSSMKGFPISELYDTLGTTKEIKSIMLPSPSEKELLKQIMDDEVGHDDVDDMIVDGWTKRIIKENKPICFEELHIQDVSSREIEANPKNANVVGVRVGRKKVALKKVSEKGIVEQLQKQLEDGLNRIYMKIDDMDTRLTYVESCVKNLKEAKDTKGEKEDGEKEKELEENDLEEDETETDKEKEKEDESSEKRSKVERMYGRKRTRTTTAKEQEEKGEEIQVGFQETSERGRKKAKLTWKKVDIKGVTADQGNSITTNERVVVEPSSKVGSWKLASNLKSTRQYNVQVGSSLPPCSISCVDEPFSVSVSCKGSTVQNYILEVFDGYNNHVAEGTNVLICIEGYCINDSMGLNQKVNSCGCIDLSGILQVTAGYGKTISLSVMSGIDEIFKKESQTERRELMLLTKLPECCVAGSNLTNLIFKVTDSDGVMDTSIHHDEKSGCFHTMSIETDSSSDESEIRYAFVHGSCKVPTLSLPEREGVFSFKVFHSRFPELHLSLKIQLTPAQILQRDETSYSRMGLTPKSKMASTTYSPALSSQTGPSLRDVAQFTESFKENLIGYSEHRVEIDERLHCLEAEQNQAKEELRTLQVASTSLSRVLSEYLGEDMLLALVCKSAQIGPNNAEFLRLQSNHRFHVLCLDAIRPWKDGLLENDPQKKLAMDDPKLPDGDPIPGFKGYAVNMIDLAPEELTVQTYSGYGLRETLFYNLFGNLQV

SEQ ID NO: 45276 - DNA, 1203 bp, Arabidopsis thaliana
  misc_feature (1)..(1203): Ceres Seq. ID no. 12560595
  misc_feature: MA Experiment ID: 20000437 Result: Up-regulated in Transcription
  misc_feature: MA Experiment 20000437 PARAMETER Experiment Name: At_Drought_P Parameter: Age (day) Value: 8
  misc_feature: MA Experiment 20000437 PARAMETER Experiment Name: At_Drought_P Parameter: Organism Value: A. thaliana
  misc_feature: MA Experiment 20000437 PARAMETER Experiment Name: At_Drought_P Parameter: Plant Line Value: WS
  misc_feature: MA Experiment 20000437 PARAMETER Experiment Name: At_Drought_P Parameter: Timepoint (hr) Value: 24
  misc_feature: MA Experiment 20000437 PARAMETER Experiment Name: At_Drought_P Parameter: Tissue Value: Whole Plant
  misc_feature: MA Experiment 20000437 PARAMETER Experiment Name: At_Drought_P Parameter: Treatment Value: Drought vs. No Drought
  misc_feature: MA Experiment ID: 20000495 Result: Down-regulated in Transcription
  misc_feature: MA Experiment 20000495 PARAMETER Experiment Name: At_Guard_Cells_P Parameter: Harvest Date Value: 8/2/2002
  misc_feature: MA Experiment 20000495 PARAMETER Experiment Name: At_Guard_Cells_P Parameter: Organism Value: A. thaliana
  misc_feature: MA Experiment 20000495 PARAMETER Experiment Name: At_Guard_Cells_P Parameter: Tissue Value: Guard Cells vs. Leaves
  misc_feature: MA Experiment ID: 20000794 Result: Down-regulated in Transcription
  misc_feature: MA Experiment 20000794 PARAMETER Experiment Name: At_Petals_P Parameter: Age (day) Value: 23-25 days
  misc_feature: MA Experiment 20000794 PARAMETER Experiment Name: At_Petals_P Parameter: Plant Line Value: WS
  misc_feature: MA Experiment 20000794 PARAMETER Experiment Name: At_Petals_P Parameter: Tissue Value: Petals vs. Whole plant
aatttcccccaaatcaaagcttttgacctaaatccgtttcccgggaaaaataaatcaacaaaccatcaccggaatcttcaatatctctccggtgaagaaaaaatgtcgcacaacgatacgattccgctttatcaatcatctcaatcagacattgacgagattgagaatatgatgaacgacagttttcaatcaggtcccggaaccgtgcttcctgctcgaccaccgagtccgatccgtccgtcgattcccgtttcatcctcaccgttcgttcaatccaatctcccaccgcttccaccgtcgtcttcctcctccactcagaaggtgatgcctgttccagctcctccaccacttccgtcagcaggtaacgaaggtaacaagagtattggaggtagcggattcggatctccgccaaatacattgacggagcctgtttgggatactgtgaagcgtgatctgtcacggatcgtgagtaatttgaagcttgtggtgtttcctaatccgtatagggaagatcctgggaaagcacttagggattgggatctatggggaccttttttcttcattgtgttcttggggcttactctttcgtggtctgcttccgttaagaagtctgaagtatttgccgtggcatttgcactacttgcagctggggcagtgatcctcacactaaatgtgctgcttctgggaggacatataatctttttccaaagcctaagccttctaggctactgtctatttccgctagacgttggagcagtgatctgcatgttgaaagacaatgtgatactgaagatggtcgttgtgtctgtgactcttgcctggagctcttgggctgcttatcctttcatgagcgccgcagtgaacccgagaagaaaagctctcgcactctacccggtcttcctcatgtatgtctctgttggcttcttaatcattgccattaattgattctatccggaaaaatgggaaatcagagataggttctttgattcagtttgggaagtcatttggtacagagtagatagagaattctccagccgcgaactattctgagttctaatgagatcatatgtataatatgttctttgacgcttttttgttaaactcccctgtggattttactcttctatatggttttgctttgtgtatgaaacttacggttcttttttggaaacgtatatataatatcaagaccttgatgctcgt

SEQ ID NO: 45277 - protein, 314 aa, Arabidopsis thaliana
  peptide (1)..(314): Ceres Seq. ID no. 12560596
  misc_feature (148)..(295): Pfam Name: Yip1 domain Pfam Description: Yip1 domain
  misc_feature (148)..(295): Pfam Name: Yip1 domain Pfam Description: Yip1 domain
  misc_feature (138)..(311): Homolog of NCBI NO: 26337383 NR Description: unnamed protein product [Mus musculus]
  misc_feature (138)..(311): Homolog of NCBI NO: 28603852 NR Description: hypothetical protein MGC21416 [Homo sapiens]
  misc_feature (123)..(314): Homolog of NCBI NO: 24581631 NR Description: CG3652-PA [Drosophila melanogaster]
  misc_feature (138)..(312): Homolog of NCBI NO: 39580726 NR Description: Hypothetical protein CBG08721 [Caenorhabditis
  misc_feature (138)..(312): Homolog of NCBI NO: 17509487 NR Description: Yeast YIP1 protein like [Caenorhabditis elegans]
  misc_feature (138)..(311): Homolog of NCBI NO: 26337383 NR Description: unnamed protein product [Mus musculus]
  misc_feature (123)..(314): Homolog of NCBI NO: 24581631 NR Description: CG3652-PA [Drosophila melanogaster]
  misc_feature (138)..(312): Homolog of NCBI NO: 17509487 NR Description: Yeast YIP1 protein like [Caenorhabditis elegans]
  misc_feature (1)..(314): Homolog of NCBI NO: 7486761 NR Description: hypothetical protein F9N11.110 - Arabidopsis
  misc_feature (35)..(314): Homolog of NCBI NO: 18417560 NR Description: hypothetical protein common family
  misc_feature (35)..(314): Homolog of NCBI NO: 18398861 NR Description: Expressed protein
  misc_feature (35)..(314): Homolog of NCBI NO: 21553537 NR Description: unknown [Arabidopsis thaliana]
  misc_feature (35)..(302): Homolog of NCBI NO: 34908612 NR Description: P0677H08.6 [Oryza sativa (japonica
  misc_feature (138)..(312): Homolog of NCBI NO: 39580726 NR Description: Hypothetical protein CBG08721 [Caenorhabditis
  misc_feature (138)..(311): Homolog of NCBI NO: 28603852 NR Description: hypothetical protein MGC21416 [Homo sapiens]
  misc_feature (35)..(302): Homolog of NCBI NO: 34908612 NR Description: P0677H08.6 [Oryza sativa (japonica
  misc_feature (35)..(314): Homolog of NCBI NO: 21553537 NR Description: unknown [Arabidopsis thaliana]
  misc_feature (35)..(314): Homolog of NCBI NO: 18398861 NR Description: Expressed protein
  misc_feature (35)..(314): Homolog of NCBI NO: 18417560 NR Description: hypothetical protein common family
  misc_feature (1)..(314): Homolog of NCBI NO: 7486761 NR Description: hypothetical protein F9N11.110 - Arabidopsis
NFPQIKAFDLNPFPGKNKSTNHHRNLQYLSGEEKMSHNDTIPLYQSSQSDIDEIENMMNDSFQSGPGTVLPARPPSPIRPSIPVSSSPFVQSNLPPLPPSSSSSTQKVMPVPAPPPLPSAGNEGNKSIGGSGFGSPPNTLTEPVWDTVKRDLSRIVSNLKLVVFPNPYREDPGKALRDWDLWGPFFFIVFLGLTLSWSASVKKSEVFAVAFALLAAGAVILTLNVLLLGGHIIFFQSLSLLGYCLFPLDVGAVICMLKDNVILKMVVVSVTLAWSSWAAYPFMSAAVNPRRKALALYPVFLMYVSVGFLIIAIN

SEQ ID NO: 45278 - protein, 280 aa, Arabidopsis thaliana
  peptide (1)..(280): Ceres Seq. ID no. 12560597
  misc_feature (114)..(261): Pfam Name: Yip1 domain Pfam Description: Yip1 domain
  misc_feature (114)..(261): Pfam Name: Yip1 domain Pfam Description: Yip1 domain
  misc_feature (104)..(277): Homolog of NCBI NO: 26337383 NR Description: unnamed protein product [Mus musculus]
  misc_feature (104)..(277): Homolog of NCBI NO: 28603852 NR Description: hypothetical protein MGC21416 [Homo sapiens]
  misc_feature (89)..(280): Homolog of NCBI NO: 24581631 NR Description: CG3652-PA [Drosophila melanogaster]
  misc_feature (104)..(278): Homolog of NCBI NO: 39580726 NR Description: Hypothetical protein CBG08721 [Caenorhabditis
  misc_feature (104)..(278): Homolog of NCBI NO: 17509487 NR Description: Yeast YIP1 protein like [Caenorhabditis elegans]
  misc_feature (104)..(277): Homolog of NCBI NO: 26337383 NR Description: unnamed protein product [Mus musculus]
  misc_feature (89)..(280): Homolog of NCBI NO: 24581631 NR Description: CG3652-PA [Drosophila melanogaster]
  misc_feature (104)..(278): Homolog of NCBI NO: 17509487 NR Description: Yeast YIP1 protein like [Caenorhabditis elegans]
  misc_feature (1)..(280): Homolog of NCBI NO: 7486761 NR Description: hypothetical protein F9N11.110 - Arabidopsis
  misc_feature (1)..(280): Homolog of NCBI NO: 18417560 NR Description: hypothetical protein common family
  misc_feature (1)..(280): Homolog of NCBI NO: 18398861 NR Description: Expressed protein
  misc_feature (1)..(280): Homolog of NCBI NO: 21553537 NR Description: unknown [Arabidopsis thaliana]
  misc_feature (1)..(268): Homolog of NCBI NO: 34908612 NR Description: P0677H08.6 [Oryza sativa (japonica
  misc_feature (104)..(278): Homolog of NCBI NO: 39580726 NR Description: Hypothetical protein CBG08721 [Caenorhabditis
  misc_feature (104)..(277): Homolog of NCBI NO: 28603852 NR Description: hypothetical protein MGC21416 [Homo sapiens]
  misc_feature (1)..(268): Homolog of NCBI NO: 34908612 NR Description: P0677H08.6 [Oryza sativa (japonica
  misc_feature (1)..(280): Homolog of NCBI NO: 21553537 NR Description: unknown [Arabidopsis thaliana]
  misc_feature (1)..(280): Homolog of NCBI NO: 18398861 NR Description: Expressed protein
  misc_feature (1)..(280): Homolog of NCBI NO: 18417560 NR Description: hypothetical protein common family
  misc_feature (1)..(280): Homolog of NCBI NO: 7486761 NR Description: hypothetical protein F9N11.110 - Arabidopsis
MSHNDTIPLYQSSQSDIDEIENMMNDSFQSGPGTVLPARPPSPIRPSIPVSSSPFVQSNLPPLPPSSSSSTQKVMPVPAPPPLPSAGNEGNKSIGGSGFGSPPNTLTEPVWDTVKRDLSRIVSNLKLVVFPNPYREDPGKALRDWDLWGPFFFIVFLGLTLSWSASVKKSEVFAVAFALLAAGAVILTLNVLLLGGHIIFFQSLSLLGYCLFPLDVGAVICMLKDNVILKMVVVSVTLAWSSWAAYPFMSAAVNPRRKALALYPVFLMYVSVGFLIIAIN

SEQ ID NO: 45279 - protein, 258 aa, Arabidopsis thaliana
  peptide (1)..(258): Ceres Seq. ID no. 12560598
  misc_feature (92)..(239): Pfam Name: Yip1 domain Pfam Description: Yip1 domain
  misc_feature (92)..(239): Pfam Name: Yip1 domain Pfam Description: Yip1 domain
  misc_feature (82)..(255): Homolog of NCBI NO: 26337383 NR Description: unnamed protein product [Mus musculus]
  misc_feature (82)..(255): Homolog of NCBI NO: 28603852 NR Description: hypothetical protein MGC21416 [Homo sapiens]
  misc_feature (67)..(258): Homolog of NCBI NO: 24581631 NR Description: CG3652-PA [Drosophila melanogaster]
  misc_feature (82)..(256): Homolog of NCBI NO: 39580726 NR Description: Hypothetical protein CBG08721 [Caenorhabditis
  misc_feature (82)..(256): Homolog of NCBI NO: 17509487 NR Description: Yeast YIP1 protein like [Caenorhabditis elegans]
  misc_feature (82)..(255): Homolog of NCBI NO: 26337383 NR Description: unnamed protein product [Mus musculus]
  misc_feature (67)..(258): Homolog of NCBI NO: 24581631 NR Description: CG3652-PA [Drosophila melanogaster]
  misc_feature (82)..(256): Homolog of NCBI NO: 17509487 NR Description: Yeast YIP1 protein like [Caenorhabditis elegans]
  misc_feature (1)..(258): Homolog of NCBI NO: 7486761 NR Description: hypothetical protein F9N11.110 - Arabidopsis
  misc_feature (1)..(258): Homolog of NCBI NO: 18417560 NR Description: hypothetical protein common family
  misc_feature (1)..(258): Homolog of NCBI NO: 18398861 NR Description: Expressed protein
  misc_feature (1)..(258): Homolog of NCBI NO: 21553537 NR Description: unknown [Arabidopsis thaliana]
  misc_feature (1)..(246): Homolog of NCBI NO: 34908612 NR Description: P0677H08.6 [Oryza sativa (japonica
  misc_feature (82)..(256): Homolog of NCBI NO: 39580726 NR Description: Hypothetical protein CBG08721 [Caenorhabditis
  misc_feature (82)..(255): Homolog of NCBI NO: 28603852 NR Description: hypothetical protein MGC21416 [Homo sapiens]
  misc_feature (1)..(246): Homolog of NCBI NO: 34908612 NR Description: P0677H08.6 [Oryza sativa (japonica
  misc_feature (1)..(258): Homolog of NCBI NO: 21553537 NR Description: unknown [Arabidopsis thaliana]
  misc_feature (1)..(258): Homolog of NCBI NO: 18398861 NR Description: Expressed protein
  misc_feature (1)..(258): Homolog of NCBI NO: 18417560 NR Description: hypothetical protein common family
  misc_feature (1)..(258): Homolog of NCBI NO: 7486761 NR Description: hypothetical protein F9N11.110 - Arabidopsis
MMNDSFQSGPGTVLPARPPSPIRPSIPVSSSPFVQSNLPPLPPSSSSSTQKVMPVPAPPPLPSAGNEGNKSIGGSGFGSPPNTLTEPVWDTVKRDLSRIVSNLKLVVFPNPYREDPGKALRDWDLWGPFFFIVFLGLTLSWSASVKKSEVFAVAFALLAAGAVILTLNVLLLGGHIIFFQSLSLLGYCLFPLDVGAVICMLKDNVILKMVVVSVTLAWSSWAAYPFMSAAVNPRRKALALYPVFLMYVSVGFLIIAIN

SEQ ID NO: 45280 - DNA, 1855 bp, Arabidopsis thaliana; identical to SEQ ID NO: 36353
  misc_feature (1)..(1855): Ceres Seq. ID no. 13575995
  misc_feature: MA Experiment ID: 20000179 Result: Down-regulated in Transcription
  misc_feature: MA Experiment 20000179 PARAMETER Experiment Name: At_Germinating_Seeds_P Parameter: Age (hr) Value: 6 vs. 0
  misc_feature: MA Experiment 20000179 PARAMETER Experiment Name: At_Germinating_Seeds_P Parameter: Tissue Value: Germinating Seeds

SEQ ID NO: 45281 - protein, 463 aa, Arabidopsis thaliana; identical to SEQ ID NO: 36354
  peptide (1)..(463): Ceres Seq. ID no. 13575996
  misc_feature (315)..(419): Pfam Name: PCI domain Pfam Description: PCI domain
  misc_feature (315)..(419): Pfam Name: PCI domain Pfam Description: PCI domain
  misc_feature (96)..(459): Homolog of NCBI NO: 7512468 NR Description: fusca protein homolog Gps1 - human
  misc_feature (96)..(459): Homolog of NCBI NO: 20981690 NR Description: COP9 signalosome complex subunit 1 (G protein
  misc_feature (96)..(459): Homolog of NCBI NO: 5713317 NR Description: G protein pathway suppressor 1; Arabidopsis
  misc_feature (96)..(459): Homolog of NCBI NO: 21703742 NR Description: G protein pathway suppressor 1 [Mus musculus]
  misc_feature (23)..(462): Homolog of NCBI NO: 10443485 NR Description: rCOP11 protein [Oryza sativa]
  misc_feature (96)..(459): Homolog of NCBI NO: 7512468 NR Description: fusca protein homolog Gps1 - human
  misc_feature (96)..(459): Homolog of NCBI NO: 5713317 NR Description: G protein pathway suppressor 1; Arabidopsis
  misc_feature (23)..(462): Homolog of NCBI NO: 10443485 NR Description: rCOP11 protein [Oryza sativa]
  misc_feature (23)..(463): Homolog of NCBI NO: 18411857 NR Description: COP9 complex subunit, FUS6 [Arabidopsis thaliana]
  misc_feature (23)..(463): Homolog of NCBI NO: 432446 NR Description: FUS6
  misc_feature (23)..(463): Homolog of NCBI NO: 26450149 NR Description: putative FUSCA protein FUS6 [Arabidopsis thaliana]
  misc_feature (23)..(463): Homolog of NCBI NO: 11282867 NR Description: FUSCA PROTEIN FUS6 - Arabidopsis thaliana
  misc_feature (23)..(462): Homolog of NCBI NO: 7208213 NR Description: constitutive photomorphogenic 11 [Oryza sativa
  misc_feature (96)..(459): Homolog of NCBI NO: 21703742 NR Description: G protein pathway suppressor 1 [Mus musculus]
  misc_feature (96)..(459): Homolog of NCBI NO: 20981690 NR Description: COP9 signalosome complex subunit 1 (G protein
  misc_feature (23)..(462): Homolog of NCBI NO: 7208213 NR Description: constitutive photomorphogenic 11 [Oryza sativa
  misc_feature (23)..(463): Homolog of NCBI NO: 11282867 NR Description: FUSCA PROTEIN FUS6 - Arabidopsis thaliana
  misc_feature (23)..(463): Homolog of NCBI NO: 26450149 NR Description: putative FUSCA protein FUS6 [Arabidopsis thaliana]
  misc_feature (23)..(463): Homolog of NCBI NO: 432446 NR Description: FUS6
  misc_feature (23)..(463): Homolog of NCBI NO: 18411857 NR Description: COP9 complex subunit, FUS6 [Arabidopsis thaliana]

SEQ ID NO: 45282 - protein, 441 aa, Arabidopsis thaliana; identical to SEQ ID NO: 36355
  peptide (1)..(441): Ceres Seq. ID no. 13575997
  misc_feature (293)..(397): Pfam Name: PCI domain Pfam Description: PCI domain
  misc_feature (293)..(397): Pfam Name: PCI domain Pfam Description: PCI domain
  misc_feature (74)..(437): Homolog of NCBI NO: 20981690 NR Description: COP9 signalosome complex subunit 1 (G protein
  misc_feature (74)..(437): Homolog of NCBI NO: 7512468 NR Description: fusca protein homolog Gps1 - human
  misc_feature (74)..(437): Homolog of NCBI NO: 5713317 NR Description: G protein pathway suppressor 1; Arabidopsis
  misc_feature (74)..(437): Homolog of NCBI NO: 21703742 NR Description: G protein pathway suppressor 1 [Mus musculus]
  misc_feature (1)..(440): Homolog of NCBI NO: 10443485 NR Description: rCOP11 protein [Oryza sativa]
  misc_feature (74)..(437): Homolog of NCBI NO: 20981690 NR Description: COP9 signalosome complex subunit 1 (G protein
  misc_feature (74)..(437): Homolog of NCBI NO: 5713317 NR Description: G protein pathway suppressor 1; Arabidopsis
  misc_feature (1)..(440): Homolog of NCBI NO: 10443485 NR Description: rCOP11 protein [Oryza sativa]
  misc_feature (1)..(441): Homolog of NCBI NO: 18411857 NR Description: COP9 complex subunit, FUS6 [Arabidopsis thaliana]
  misc_feature (1)..(441): Homolog of NCBI NO: 432446 NR Description: FUS6
  misc_feature (1)..(441): Homolog of NCBI NO: 26450149 NR Description: putative FUSCA protein FUS6 [Arabidopsis thaliana]
  misc_feature (1)..(441): Homolog of NCBI NO: 11282867 NR Description: FUSCA PROTEIN FUS6 - Arabidopsis thaliana
  misc_feature (1)..(440): Homolog of NCBI NO: 7208213 NR Description: constitutive photomorphogenic 11 [Oryza sativa
  misc_feature (74)..(437): Homolog of NCBI NO: 21703742 NR Description: G protein pathway suppressor 1 [Mus musculus]
  misc_feature (74)..(437): Homolog of NCBI NO: 7512468 NR Description: fusca protein homolog Gps1 - human
  misc_feature (1)..(440): Homolog of NCBI NO: 7208213 NR Description: constitutive photomorphogenic 11 [Oryza sativa
  misc_feature (1)..(441): Homolog of NCBI NO: 11282867 NR Description: FUSCA PROTEIN FUS6 - Arabidopsis thaliana
  misc_feature (1)..(441): Homolog of NCBI NO: 26450149 NR Description: putative FUSCA protein FUS6 [Arabidopsis thaliana]
  misc_feature (1)..(441): Homolog of NCBI NO: 432446 NR Description: FUS6
  misc_feature (1)..(441): Homolog of NCBI NO: 18411857 NR Description: COP9 complex subunit, FUS6 [Arabidopsis thaliana]

SEQ ID NO: 45283 - protein, 431 aa, Arabidopsis thaliana; identical to SEQ ID NO: 36356
  peptide (1)..(431): Ceres Seq. ID no. 13575998
  misc_feature (283)..(387): Pfam Name: PCI domain Pfam Description: PCI domain
  misc_feature (283)..(387): Pfam Name: PCI domain Pfam Description: PCI domain
  misc_feature (64)..(427): Homolog of NCBI NO: 20981690 NR Description: COP9 signalosome complex subunit 1 (G protein
  misc_feature (64)..(427): Homolog of NCBI NO: 7512468 NR Description: fusca protein homolog Gps1 - human
  misc_feature (64)..(427): Homolog of NCBI NO: 5713317 NR Description: G protein pathway suppressor 1; Arabidopsis
  misc_feature (64)..(427): Homolog of NCBI NO: 21703742 NR Description: G protein pathway suppressor 1 [Mus musculus]
  misc_feature (1)..(430): Homolog of NCBI NO: 10443485 NR Description: rCOP11 protein [Oryza sativa]
  misc_feature (64)..(427): Homolog of NCBI NO: 20981690 NR Description: COP9 signalosome complex subunit 1 (G protein
  misc_feature (64)..(427): Homolog of NCBI NO: 5713317 NR Description: G protein pathway suppressor 1; Arabidopsis
  misc_feature (1)..(430): Homolog of NCBI NO: 10443485 NR Description: rCOP11 protein [Oryza sativa]
  misc_feature (1)..(431): Homolog of NCBI NO: 18411857 NR Description: COP9 complex subunit, FUS6 [Arabidopsis thaliana]
  misc_feature (1)..(431): Homolog of NCBI NO: 432446 NR Description: FUS6
  misc_feature (1)..(431): Homolog of NCBI NO: 26450149 NR Description: putative FUSCA protein FUS6 [Arabidopsis thaliana]
  misc_feature (1)..(431): Homolog of NCBI NO: 11282867 NR Description: FUSCA PROTEIN FUS6 - Arabidopsis thaliana
  misc_feature (1)..(430): Homolog of NCBI NO: 7208213 NR Description: constitutive photomorphogenic 11 [Oryza sativa
  misc_feature (64)..(427): Homolog of NCBI NO: 21703742 NR Description: G protein pathway suppressor 1 [Mus musculus]
  misc_feature (64)..(427): Homolog of NCBI NO: 7512468 NR Description: fusca protein homolog Gps1 - human
  misc_feature (1)..(430): Homolog of NCBI NO: 7208213 NR Description: constitutive photomorphogenic 11 [Oryza sativa
  misc_feature (1)..(431): Homolog of NCBI NO: 11282867 NR Description: FUSCA PROTEIN FUS6 - Arabidopsis thaliana
  misc_feature (1)..(431): Homolog of NCBI NO: 26450149 NR Description: putative FUSCA protein FUS6 [Arabidopsis thaliana]
  misc_feature (1)..(431): Homolog of NCBI NO: 432446 NR Description: FUS6
  misc_feature (1)..(431): Homolog of NCBI NO: 18411857 NR Description: COP9 complex subunit, FUS6 [Arabidopsis thaliana]

SEQ ID NO: 45284 - DNA, 2256 bp, Arabidopsis thaliana; identical to SEQ ID NO: 22038
  misc_feature (1)..(2256): Ceres Seq. ID no. 13646318
  misc_feature: MA Experiment ID: 108434 Result: Up-regulated in Transcription
  misc_feature: MA Experiment 108434 PARAMETER Experiment Name: At_Root_Tips_cDNA_P Parameter: Tissue Value: Root Tips
  misc_feature: MA Experiment ID: 108462 Result: Down-regulated in Transcription
  misc_feature: MA Experiment 108462 PARAMETER Experiment Name: At_Germinating_Seeds_cDNA_P Parameter: Age (day) Value: 2 vs. 0
  misc_feature: MA Experiment 108462 PARAMETER Experiment Name: At_Germinating_Seeds_cDNA_P Parameter: Tissue Value: Germinating Seeds
  misc_feature: MA Experiment ID: 108463 Result: Down-regulated in Transcription
  misc_feature: MA Experiment 108463 PARAMETER Experiment Name: At_Germinating_Seeds_cDNA_P Parameter: Age (day) Value: 3 vs. 0
  misc_feature: MA Experiment 108463 PARAMETER Experiment Name: At_Germinating_Seeds_cDNA_P Parameter: Tissue Value: Germinating Seeds
  misc_feature: MA Experiment ID: 108464 Result: Down-regulated in Transcription
  misc_feature: MA Experiment 108464 PARAMETER Experiment Name: At_Germinating_Seeds_cDNA_P Parameter: Age (day) Value: 4 vs. 0
  misc_feature: MA Experiment 108464 PARAMETER Experiment Name: At_Germinating_Seeds_cDNA_P Parameter: Tissue Value: Germinating Seeds
  misc_feature: MA Experiment ID: 108501 Result: Up-regulated in Transcription
  misc_feature: MA Experiment 108501 PARAMETER Experiment Name: At_ap2_floral_buds_cDNA_P Parameter: Plant Line Value: ap2 (Ler.)
  misc_feature: MA Experiment 108501 PARAMETER Experiment Name: At_ap2_floral_buds_cDNA_P Parameter: Tissue Value: Closed Flower
  misc_feature: MA Experiment ID: 108573 Result: Up-regulated in Transcription
  misc_feature: MA Experiment 108573 PARAMETER Experiment Name: At_Drought_cDNA_P Parameter: Timepoint (hr) Value: 6
  misc_feature: MA Experiment 108573 PARAMETER Experiment Name: At_Drought_cDNA_P Parameter: Tissue Value: Aerial
  misc_feature: MA Experiment 108573 PARAMETER Experiment Name: At_Drought_cDNA_P Parameter: Treatment Value: Drought vs. No Drought
  misc_feature: MA Experiment ID: 108576 Result: Up-regulated in Transcription
  misc_feature: MA Experiment 108576 PARAMETER Experiment Name: At_42deg_Heat_cDNA_P Parameter: Temperature (deg C) Value: 42 vs. 22
  misc_feature: MA Experiment 108576 PARAMETER Experiment Name: At_42deg_Heat_cDNA_P Parameter: Timepoint (hr) Value: 1
  misc_feature: MA Experiment 108576 PARAMETER Experiment Name: At_42deg_Heat_cDNA_P Parameter: Tissue Value: Aerial
  misc_feature: MA Experiment ID: 108577 Result: Up-regulated in Transcription
  misc_feature: MA Experiment 108577 PARAMETER Experiment Name: At_42deg_Heat_cDNA_P Parameter: Temperature (deg C) Value: 42 vs. 22
  misc_feature: MA Experiment 108577 PARAMETER Experiment Name: At_42deg_Heat_cDNA_P Parameter: Timepoint (hr) Value: 6
  misc_feature: MA Experiment 108577 PARAMETER Experiment Name: At_42deg_Heat_cDNA_P Parameter: Tissue Value: Aerial
  misc_feature: MA Experiment ID: 108585 Result: Up-regulated in Transcription
  misc_feature: MA Experiment 108585 PARAMETER Experiment Name: At_5mM_NaNP_cDNA_P Parameter: Timepoint (hr) Value: 6
  misc_feature: MA Experiment 108585 PARAMETER Experiment Name: At_5mM_NaNP_cDNA_P Parameter: Tissue Value: Aerial
  misc_feature: MA Experiment 108585 PARAMETER Experiment Name: At_5mM_NaNP_cDNA_P Parameter: Treatment Value: null
  misc_feature: MA Experiment ID: 108595 Result: Down-regulated in Transcription
  misc_feature: MA Experiment 108595 PARAMETER Experiment Name: At_Ler-pi_Ovule_cDNA_P Parameter: Plant Line Value: null
  misc_feature: MA Experiment ID: 20000069 Result: Down-regulated in Transcription
  misc_feature: MA Experiment 20000069 PARAMETER Experiment Name: At_100uM_ABA_Mutants_cDNA_P Parameter: Plant Line Value: CS23
  misc_feature: MA Experiment 20000069 PARAMETER Experiment Name: At_100uM_ABA_Mutants_cDNA_P Parameter: Timepoint (hr) Value: 6
  misc_feature: MA Experiment 20000069 PARAMETER Experiment Name: At_100uM_ABA_Mutants_cDNA_P Parameter: Tissue Value: Aerial
  misc_feature: MA Experiment 20000069 PARAMETER Experiment Name: At_100uM_ABA_Mutants_cDNA_P Parameter: Treatment Value: 100uM ABA vs. No Treatment
  misc_feature: MA Experiment ID: 20000087 Result: Down-regulated in Transcription
  misc_feature: MA Experiment 20000087 PARAMETER Experiment Name: At_100uM_ABA_Mutants_cDNA_P Parameter: Plant Line Value: WS
  misc_feature: MA Experiment 20000087 PARAMETER Experiment Name: At_100uM_ABA_Mutants_cDNA_P Parameter: Timepoint (hr) Value: 6
  misc_feature: MA Experiment 20000087 PARAMETER Experiment Name: At_100uM_ABA_Mutants_cDNA_P Parameter: Tissue Value: Aerial
  misc_feature: MA Experiment 20000087 PARAMETER Experiment Name: At_100uM_ABA_Mutants_cDNA_P Parameter: Treatment Value: 100uM ABA vs. No Treatment
  misc_feature: MA Experiment ID: 20000111 Result: Up-regulated in Transcription
  misc_feature: MA Experiment 20000111 PARAMETER Experiment Name: At_42deg_Heat_cDNA_P Parameter: Temperature (deg C) Value: 42 vs. 22
  misc_feature: MA Experiment 20000111 PARAMETER Experiment Name: At_42deg_Heat_cDNA_P Parameter: Timepoint (hr) Value: 6
  misc_feature: MA Experiment 20000111 PARAMETER Experiment Name: At_42deg_Heat_cDNA_P Parameter: Tissue Value: Aerial
  misc_feature: MA Experiment ID: 20000112 Result: Up-regulated in Transcription
  misc_feature: MA Experiment 20000112 PARAMETER Experiment Name: At_42deg_Heat_cDNA_P Parameter: Temperature (deg C) Value: 42 vs. 22
  misc_feature: MA Experiment 20000112 PARAMETER Experiment Name: At_42deg_Heat_cDNA_P Parameter: Timepoint (hr) Value: 2
  misc_feature: MA Experiment 20000112 PARAMETER Experiment Name: At_42deg_Heat_cDNA_P Parameter: Tissue Value: Aerial
  misc_feature: MA Experiment ID: 20000113 Result: Up-regulated in Transcription
  misc_feature: MA Experiment 20000113 PARAMETER Experiment Name: At_42deg_Heat_cDNA_P Parameter: Temperature (deg C) Value: 42 vs. 22
  misc_feature: MA Experiment 20000113 PARAMETER Experiment Name: At_42deg_Heat_cDNA_P Parameter: Timepoint (hr) Value: 8
  misc_feature: MA Experiment 20000113 PARAMETER Experiment Name: At_42deg_Heat_cDNA_P Parameter: Tissue Value: Aerial
  misc_feature: MA Experiment ID: 20000144 Result: Up-regulated in Transcription
  misc_feature: MA Experiment 20000144 PARAMETER Experiment Name: At_42deg_Heat_cDNA_P Parameter: Temperature (deg C) Value: 42 vs. 22
  misc_feature: MA Experiment 20000144 PARAMETER Experiment Name: At_42deg_Heat_cDNA_P Parameter: Timepoint (hr) Value: 1
  misc_feature: MA Experiment 20000144 PARAMETER Experiment Name: At_42deg_Heat_cDNA_P Parameter: Tissue Value: Aerial
  misc_feature: MA Experiment ID: 20000314 Result: Down-regulated in Transcription
  misc_feature: MA Experiment 20000314 PARAMETER Experiment Name: At_14day_Shoots-Roots_Sub_P Parameter: Age (day) Value: 14
  misc_feature: MA Experiment 20000314 PARAMETER Experiment Name: At_14day_Shoots-Roots_Sub_P Parameter: Organism Value: A. thaliana
  misc_feature: MA Experiment 20000314 PARAMETER Experiment Name: At_14day_Shoots-Roots_Sub_P Parameter: Plant Line Value: WS
  misc_feature: MA Experiment 20000314 PARAMETER Experiment Name: At_14day_Shoots-Roots_Sub_P Parameter: Tissue Value: Roots vs. Whole Plant
  misc_feature: MA Experiment ID: 20000327 Result: Up-regulated in Transcription
  misc_feature: MA Experiment 20000327 PARAMETER Experiment Name: At_42deg_Heat_Sub_P Parameter: Age (day) Value: 14
  misc_feature: MA Experiment 20000327 PARAMETER Experiment Name: At_42deg_Heat_Sub_P Parameter: Organism Value: A. thaliana
  misc_feature: MA Experiment 20000327 PARAMETER Experiment Name: At_42deg_Heat_Sub_P Parameter: Plant Line Value: WS
  misc_feature: MA Experiment 20000327 PARAMETER Experiment Name: At_42deg_Heat_Sub_P Parameter: Temperature (deg C) Value: 42 vs. 22
  misc_feature: MA Experiment 20000327 PARAMETER Experiment Name: At_42deg_Heat_Sub_P Parameter: Timepoint (hr) Value: 1
  misc_feature: MA Experiment 20000327 PARAMETER Experiment Name: At_42deg_Heat_Sub_P Parameter: Tissue Value: Aerial
  misc_feature: MA Experiment ID: 20000328 Result: Up-regulated in Transcription
  misc_feature: MA Experiment 20000328 PARAMETER Experiment Name: At_42deg_Heat_Sub_P Parameter: Age (day) Value: 14
  misc_feature: MA Experiment 20000328 PARAMETER Experiment Name: At_42deg_Heat_Sub_P Parameter: Organism Value: A. thaliana
  misc_feature: MA Experiment 20000328 PARAMETER Experiment Name: At_42deg_Heat_Sub_P Parameter: Plant Line Value: WS
  misc_feature: MA Experiment 20000328 PARAMETER Experiment Name: At_42deg_Heat_Sub_P Parameter: Temperature (deg C) Value: 42 vs. 22
  misc_feature: MA Experiment 20000328 PARAMETER Experiment Name: At_42deg_Heat_Sub_P Parameter: Timepoint (hr) Value: 6
  misc_feature: MA Experiment 20000328 PARAMETER Experiment Name: At_42deg_Heat_Sub_P Parameter: Tissue Value: Aerial
  misc_feature: MA Experiment ID: 20000355 Result: Down-regulated in Transcription
  misc_feature: MA Experiment 20000355 PARAMETER Experiment Name: At_Siliques_Sub_P Parameter: Age (day) Value: 21
  misc_feature: MA Experiment 20000355 PARAMETER Experiment Name: At_Siliques_Sub_P Parameter: Organism Value: A. thaliana
  misc_feature: MA Experiment 20000355 PARAMETER Experiment Name: At_Siliques_Sub_P Parameter: Plant Line Value: WS
  misc_feature: MA Experiment 20000355 PARAMETER Experiment Name: At_Siliques_Sub_P Parameter: Tissue Value: Less Than 5mm Siliques vs. Whole Plant
  misc_feature: MA Experiment ID: 20001807 Result: Up-regulated in Transcription
  misc_feature: MA Experiment 20001807 PARAMETER Experiment Name: At_50mM_NH4NO3_L-to-H_Sub_P Parameter: Timepoint (hr) Value: 6
  misc_feature: MA Experiment 20001807 PARAMETER Experiment Name: At_50mM_NH4NO3_L-to-H_Sub_P Parameter: Tissue Value: Leaf
  misc_feature: MA Experiment 20001807 PARAMETER Experiment Name: At_50mM_NH4NO3_L-to-H_Sub_P Parameter: Treatment Value: 50mM NH4NO3 vs 100mM Mannitol

SEQ ID NO: 45285 - protein, 651 aa, Arabidopsis thaliana; identical to SEQ ID NO: 22039
  peptide (1)..(651): Ceres Seq. ID no. 13646319
  misc_feature (124)..(646): Homolog of NCBI NO: 4164594 NR Description: heat shock protein 70 [Paracoccidioides
  misc_feature (1)..(635): Homolog of NCBI NO: 23480384 NR Description: heat shock protein [Plasmodium yoelii yoelii]
  misc_feature (3)..(635): Homolog of NCBI NO: 29539338 NR Description: Heat shock 70 kDa protein [Cyanidioschyzon
  misc_feature (1)..(626): Homolog of NCBI NO: 481576 NR Description: dnaK-type molecular chaperone GRP78/BiP -
  misc_feature (3)..(635): Homolog of NCBI NO: 1037176 NR Description: immunoglobulin heavy chain binding protein
  misc_feature (1)..(635): Homolog of NCBI NO: 6016151 NR Description: Luminal binding protein 3 precursor (BiP3)
  misc_feature (8)..(651): Homolog of NCBI NO: 14423732 NR Description: Heat shock 70 kDa protein
  misc_feature (6)..(626): Homolog of NCBI NO: 21263753 NR Description: Heat shock cognate 71 kDa protein (Hsc70.1)
  misc_feature (124)..(646): Homolog of NCBI NO: 4164594 NR Description: heat shock protein 70 [Paracoccidioides
  misc_feature (1)..(635): Homolog of NCBI NO: 23480384 NR Description: heat shock protein [Plasmodium yoelii yoelii]
  misc_feature (3)..(635): Homolog of NCBI NO: 29539338 NR Description: Heat shock 70 kDa protein [Cyanidioschyzon
  misc_feature (1)..(626): Homolog of NCBI NO: 481576 NR Description: dnaK-type molecular chaperone GRP78/BiP -
  misc_feature (3)..(635): Homolog of NCBI NO: 1037176 NR Description: immunoglobulin heavy chain binding protein
  misc_feature (1)..(635): Homolog of NCBI NO: 6016151 NR Description: Luminal binding protein 3 precursor (BiP3)
  misc_feature (8)..(651): Homolog of NCBI NO: 14423732 NR Description: Heat shock 70 kDa protein
  misc_feature (6)..(626): Homolog of NCBI NO: 21263753 NR Description: Heat shock cognate 71 kDa protein (Hsc70.1)
  misc_feature (124)..(646): Homolog of NCBI NO: 4164594 NR Description: heat shock protein 70 [Paracoccidioides
  misc_feature (1)..(635): Homolog of NCBI NO: 23480384 NR Description: heat shock protein [Plasmodium yoelii yoelii]
  misc_feature (3)..(635): Homolog of NCBI NO: 29539338 NR Description: Heat shock 70 kDa protein [Cyanidioschyzon
  misc_feature (1)..(626): Homolog of NCBI NO: 481576 NR Description: dnaK-type molecular chaperone GRP78/BiP -
  misc_feature (3)..(635): Homolog of NCBI NO: 1037176 NR Description: immunoglobulin heavy chain binding protein
  misc_feature (1)..(635): Homolog of NCBI NO: 6016151 NR Description: Luminal binding protein 3 precursor (BiP3)
  misc_feature (8)..(651): Homolog of NCBI NO: 14423732 NR Description: Heat shock 70 kDa protein
  misc_feature (6)..(626): Homolog of NCBI NO: 21263753 NR Description: Heat shock cognate 71 kDa protein (Hsc70.1)
  misc_feature (124)..(646): Homolog of NCBI NO: 4164594 NR Description: heat shock protein 70 [Paracoccidioides
  misc_feature (1)..(635): Homolog of NCBI NO: 23480384 NR Description: heat shock protein [Plasmodium yoelii yoelii]
  misc_feature (3)..(635): Homolog of NCBI NO: 29539338 NR Description: Heat shock 70 kDa protein [Cyanidioschyzon
  misc_feature (1)..(626): Homolog of NCBI NO: 481576 NR Description: dnaK-type molecular chaperone GRP78/BiP -
  misc_feature (3)..(635): Homolog of NCBI NO: 1037176 NR Description: immunoglobulin heavy chain binding protein
  misc_feature (1)..(635): Homolog of NCBI NO: 6016151 NR Description: Luminal binding protein 3 precursor (BiP3)
  misc_feature (8)..(651): Homolog of NCBI NO: 14423732 NR Description: Heat shock 70 kDa protein
  misc_feature (6)..(626): Homolog of NCBI NO: 21263753 NR Description: Heat shock cognate 71 kDa protein (Hsc70.1)
  misc_feature (124)..(646): Homolog of NCBI NO: 4164594 NR Description: heat shock protein 70 [Paracoccidioides
  misc_feature (1)..(635): Homolog of NCBI NO: 23480384 NR Description: heat shock protein [Plasmodium yoelii yoelii]
  misc_feature (3)..(635): Homolog of NCBI NO: 29539338 NR Description: Heat shock 70 kDa protein [Cyanidioschyzon
  misc_feature (1)..(626): Homolog of NCBI NO: 481576 NR Description: dnaK-type molecular chaperone GRP78/BiP -
  misc_feature (3)..(635): Homolog of NCBI NO: 1037176 NR Description: immunoglobulin heavy chain binding protein
  misc_feature (1)..(635): Homolog of NCBI NO: 6016151 NR Description: Luminal binding protein 3 precursor (BiP3)
  misc_feature (8)..(651): Homolog of NCBI NO: 14423732 NR Description: Heat shock 70 kDa protein
  misc_feature (6)..(626): Homolog of NCBI NO: 21263753 NR Description: Heat shock cognate 71 kDa protein (Hsc70.1)
  misc_feature (124)..(646): Homolog of NCBI NO: 4164594 NR Description: heat shock protein 70 [Paracoccidioides
  misc_feature (1)..(635): Homolog of NCBI NO: 23480384 NR Description: heat shock protein [Plasmodium yoelii yoelii]
  misc_feature (3)..(635): Homolog of NCBI NO: 29539338 NR Description: Heat shock 70 kDa protein [Cyanidioschyzon
  misc_feature (1)..(626): Homolog of NCBI NO: 481576 NR Description: dnaK-type molecular chaperone GRP78/BiP -
  misc_feature (3)..(635): Homolog of NCBI NO: 1037176 NR Description: immunoglobulin heavy chain binding protein
  misc_feature (1)..(635): Homolog of NCBI NO: 6016151 NR Description: Luminal binding protein 3 precursor (BiP3)
  misc_feature (8)..(651): Homolog of NCBI NO: 14423732 NR Description: Heat shock 70 kDa protein
  misc_feature (6)..(626): Homolog of NCBI NO: 21263753 NR Description: Heat shock cognate 71 kDa protein (Hsc70.1)
  misc_feature (124)..(646): Homolog of NCBI NO: 4164594 NR Description: heat shock protein 70 [Paracoccidioides
  misc_feature (1)..(635): Homolog of NCBI NO: 23480384 NR Description: heat shock protein [Plasmodium yoelii yoelii]
  misc_feature (3)..(635): Homolog of NCBI NO: 29539338 NR Description: Heat shock 70 kDa protein [Cyanidioschyzon
  misc_feature (1)..(626): Homolog of NCBI NO: 481576 NR Description: dnaK-type molecular chaperone GRP78/BiP -
  misc_feature (3)..(635): Homolog of NCBI NO: 1037176 NR Description: immunoglobulin heavy chain binding protein
  misc_feature (1)..(635): Homolog of NCBI NO: 6016151 NR Description: Luminal binding protein 3 precursor (BiP3)
  misc_feature (8)..(651): Homolog of NCBI NO: 14423732 NR Description: Heat shock 70 kDa protein
  misc_feature (6)..(626): Homolog of NCBI NO: 21263753 NR Description: Heat shock cognate 71 kDa protein (Hsc70.1)

SEQ ID NO: 45286 - protein, 588 aa, Arabidopsis thaliana; identical to SEQ ID NO: 22040
  peptide (1)..(588): Ceres Seq. ID no. 13646320
  misc_feature (61)..(583): Homolog of NCBI NO: 4164594 NR Description: heat shock protein 70 [Paracoccidioides
  misc_feature (1)..(572): Homolog of NCBI NO: 23480384 NR Description: heat shock protein [Plasmodium yoelii yoelii]
  misc_feature (1)..(572): Homolog of NCBI NO: 29539338 NR Description: Heat shock 70 kDa protein [Cyanidioschyzon
  misc_feature (1)..(563): Homolog of NCBI NO: 481576 NR Description: dnaK-type molecular chaperone GRP78/BiP -
  misc_feature (1)..(572): Homolog of NCBI NO: 1037176 NR Description: immunoglobulin heavy chain binding protein
  misc_feature (1)..(572): Homolog of NCBI NO: 6016151 NR Description: Luminal binding protein 3 precursor (BiP3)
  misc_feature (1)..(588): Homolog of NCBI NO: 14423732 NR Description: Heat shock 70 kDa protein
  misc_feature (1)..(563): Homolog of NCBI NO: 21263753 NR Description: Heat shock cognate 71 kDa protein (Hsc70.1)
  misc_feature (61)..(583): Homolog of NCBI NO: 4164594 NR Description: heat shock protein 70 [Paracoccidioides
  misc_feature (1)..(572): Homolog of NCBI NO: 23480384 NR Description: heat shock protein [Plasmodium yoelii yoelii]
  misc_feature (1)..(572): Homolog of NCBI NO: 29539338 NR Description: Heat shock 70 kDa protein [Cyanidioschyzon
  misc_feature (1)..(563): Homolog of NCBI NO: 481576 NR Description: dnaK-type molecular chaperone GRP78/BiP -
  misc_feature (1)..(572): Homolog of NCBI NO: 1037176 NR Description: immunoglobulin heavy chain binding protein
  misc_feature (1)..(572): Homolog of NCBI NO: 6016151 NR Description: Luminal binding protein 3 precursor (BiP3)
  misc_feature (1)..(588): Homolog of NCBI NO: 14423732 NR Description: Heat shock 70 kDa protein
  misc_feature (1)..(563): Homolog of NCBI NO: 21263753 NR Description: Heat shock cognate 71 kDa protein (Hsc70.1)
  misc_feature (61)..(583): Homolog of NCBI NO: 4164594 NR Description: heat shock protein 70 [Paracoccidioides
  misc_feature (1)..(572): Homolog of NCBI NO: 23480384 NR Description: heat shock protein [Plasmodium yoelii yoelii]
  misc_feature (1)..(572): Homolog of NCBI NO: 29539338 NR Description: Heat shock 70 kDa protein [Cyanidioschyzon
  misc_feature (1)..(563): Homolog of NCBI NO: 481576 NR Description: dnaK-type molecular chaperone GRP78/BiP -
  misc_feature (1)..(572): Homolog of NCBI NO: 1037176 NR Description: immunoglobulin heavy chain binding protein
  misc_feature (1)..(572): Homolog of NCBI NO: 6016151 NR Description: Luminal binding protein 3 precursor (BiP3)
  misc_feature (1)..(588): Homolog of NCBI NO: 14423732 NR Description: Heat shock 70 kDa protein
  misc_feature (1)..(563): Homolog of NCBI NO: 21263753 NR Description: Heat shock cognate 71 kDa protein (Hsc70.1)
  misc_feature (61)..(583): Homolog of NCBI NO: 4164594 NR Description: heat shock protein 70 [Paracoccidioides
  misc_feature (1)..(572): Homolog of NCBI NO: 23480384 NR Description: heat shock protein [Plasmodium yoelii yoelii]
  misc_feature (1)..(572): Homolog of NCBI NO: 29539338 NR Description: Heat shock 70 kDa protein [Cyanidioschyzon
  misc_feature (1)..(563): Homolog of NCBI NO: 481576 NR Description: dnaK-type molecular chaperone GRP78/BiP -
  misc_feature (1)..(572): Homolog of NCBI NO: 1037176 NR Description: immunoglobulin heavy chain binding protein
  misc_feature (1)..(572): Homolog of NCBI NO: 6016151 NR Description: Luminal binding protein 3 precursor (BiP3)
  misc_feature (1)..(588): Homolog of NCBI NO: 14423732 NR Description: Heat shock 70 kDa protein
  misc_feature (1)..(563): Homolog of NCBI NO: 21263753 NR Description: Heat shock cognate 71 kDa protein (Hsc70.1)
  misc_feature (61)..(583): Homolog of NCBI NO: 4164594 NR Description: heat shock protein 70 [Paracoccidioides
  misc_feature (1)..(572): Homolog of NCBI NO: 23480384 NR Description: heat shock protein [Plasmodium yoelii yoelii]
  misc_feature (1)..(572): Homolog of NCBI NO: 29539338 NR Description: Heat shock 70 kDa protein [Cyanidioschyzon
  misc_feature (1)..(563): Homolog of NCBI NO: 481576 NR Description: dnaK-type molecular chaperone GRP78/BiP -
  misc_feature (1)..(572): Homolog of NCBI NO: 1037176 NR Description: immunoglobulin heavy chain binding protein
  misc_feature (1)..(572): Homolog of NCBI NO: 6016151 NR Description: Luminal binding protein 3 precursor (BiP3)
  misc_feature (1)..(588): Homolog of NCBI NO: 14423732 NR Description: Heat shock 70 kDa protein
  misc_feature (1)..(563): Homolog of NCBI NO: 21263753 NR Description: Heat shock cognate 71 kDa protein (Hsc70.1)
  misc_feature (61)..(583): Homolog of NCBI NO: 4164594 NR Description: heat shock protein 70 [Paracoccidioides
  misc_feature (1)..(572): Homolog of NCBI NO: 23480384 NR Description: heat shock protein [Plasmodium yoelii yoelii]
  misc_feature (1)..(572): Homolog of NCBI NO: 29539338 NR Description: Heat shock 70 kDa protein [Cyanidioschyzon
  misc_feature (1)..(563): Homolog of NCBI NO: 481576 NR Description: dnaK-type molecular chaperone GRP78/BiP -
  misc_feature (1)..(572): Homolog of NCBI NO: 1037176 NR Description: immunoglobulin heavy chain binding protein
  misc_feature (1)..(572): Homolog of NCBI NO: 6016151 NR Description: Luminal binding protein 3 precursor (BiP3)
  misc_feature (1)..(588): Homolog of NCBI NO: 14423732 NR Description: Heat shock 70 kDa protein
  misc_feature (1)..(563): Homolog of NCBI NO: 21263753 NR Description: Heat shock cognate 71 kDa protein (Hsc70.1)
  misc_feature (61)..(583): Homolog of NCBI NO: 4164594 NR Description: heat shock protein 70 [Paracoccidioides
  misc_feature (1)..(572): Homolog of NCBI NO: 23480384 NR Description: heat shock protein [Plasmodium yoelii yoelii]
  misc_feature (1)..(572): Homolog of NCBI NO: 29539338 NR Description: Heat shock 70 kDa protein [Cyanidioschyzon
  misc_feature (1)..(563): Homolog of NCBI NO: 481576 NR Description: dnaK-type molecular chaperone GRP78/BiP -
  misc_feature (1)..(572): Homolog of NCBI NO: 1037176 NR Description: immunoglobulin heavy chain binding protein
  misc_feature (1)..(572): Homolog of NCBI NO: 6016151 NR Description: Luminal binding protein 3 precursor (BiP3)
  misc_feature (1)..(588): Homolog of NCBI NO: 14423732 NR Description: Heat shock 70 kDa protein
  misc_feature (1)..(563): Homolog of NCBI NO: 21263753 NR Description: Heat shock cognate 71 kDa protein (Hsc70.1)

SEQ ID NO: 45287 - protein, 562 aa, Arabidopsis thaliana; identical to SEQ ID NO: 22041
  peptide (1)..(562): Ceres Seq. ID no. 13646321
  misc_feature (35)..(557): Homolog of NCBI NO: 4164594 NR Description: heat shock protein 70 [Paracoccidioides
  misc_feature (1)..(546): Homolog of NCBI NO: 23480384 NR Description: heat shock protein [Plasmodium yoelii yoelii]
  misc_feature (1)..(546): Homolog of NCBI NO: 29539338 NR Description: Heat shock 70 kDa protein [Cyanidioschyzon
  misc_feature (1)..(537): Homolog of NCBI NO: 481576 NR Description: dnaK-type molecular chaperone GRP78/BiP -
  misc_feature (1)..(546): Homolog of NCBI NO: 1037176 NR Description: immunoglobulin heavy chain binding protein
  misc_feature (1)..(546): Homolog of NCBI NO: 6016151 NR Description: Luminal binding protein 3 precursor (BiP3)
  misc_feature (1)..(562): Homolog of NCBI NO: 14423732 NR Description: Heat shock 70 kDa protein
  misc_feature (1)..(537): Homolog of NCBI NO: 21263753 NR Description: Heat shock cognate 71 kDa protein (Hsc70.1)
  misc_feature (35)..(557): Homolog of NCBI NO: 4164594 NR Description: heat shock protein 70 [Paracoccidioides
  misc_feature (1)..(546): Homolog of NCBI NO: 23480384 NR Description: heat shock protein [Plasmodium yoelii yoelii]
  misc_feature (1)..(546): Homolog of NCBI NO: 29539338 NR Description: Heat shock 70 kDa protein [Cyanidioschyzon
  misc_feature (1)..(537): Homolog of NCBI NO: 481576 NR Description: dnaK-type molecular chaperone GRP78/BiP -
  misc_feature (1)..(546): Homolog of NCBI NO: 1037176 NR Description: immunoglobulin heavy chain binding protein
  misc_feature (1)..(546): Homolog of NCBI NO: 6016151 NR Description: Luminal binding protein 3 precursor (BiP3)
  misc_feature (1)..(562): Homolog of NCBI NO: 14423732 NR Description: Heat shock 70 kDa protein
  misc_feature (1)..(537): Homolog of NCBI NO: 21263753 NR Description: Heat shock cognate 71 kDa protein (Hsc70.1)
  misc_feature (35)..(557): Homolog of NCBI NO: 4164594 NR Description: heat shock protein 70 [Paracoccidioides
  misc_feature (1)..(546): Homolog of NCBI NO: 23480384 NR Description: heat shock protein [Plasmodium yoelii yoelii]
  misc_feature (1)..(546): Homolog of NCBI NO: 29539338 NR Description: Heat shock 70 kDa protein [Cyanidioschyzon
  misc_feature (1)..(537): Homolog of NCBI NO: 481576 NR Description: dnaK-type molecular chaperone GRP78/BiP -
  misc_feature (1)..(546): Homolog of NCBI NO: 1037176 NR Description: immunoglobulin heavy chain binding protein
  misc_feature (1)..(546): Homolog of NCBI NO: 6016151 NR Description: Luminal binding protein 3 precursor (BiP3)
  misc_feature (1)..(562): Homolog of NCBI NO: 14423732 NR Description: Heat shock 70 kDa protein
  misc_feature (1)..(537): Homolog of NCBI NO: 21263753 NR Description: Heat shock cognate 71 kDa protein (Hsc70.1)
  misc_feature (35)..(557): Homolog of NCBI NO: 4164594 NR Description: heat shock protein 70 [Paracoccidioides
  misc_feature (1)..(546): Homolog of NCBI NO: 23480384 NR Description: heat shock protein [Plasmodium yoelii yoelii]
  misc_feature (1)..(546): Homolog of NCBI NO: 29539338 NR Description: Heat shock 70 kDa protein [Cyanidioschyzon
  misc_feature (1)..(537): Homolog of NCBI NO: 481576 NR Description: dnaK-type molecular chaperone GRP78/BiP -
  misc_feature (1)..(546): Homolog of NCBI NO: 1037176 NR Description: immunoglobulin heavy chain binding protein
  misc_feature (1)..(546): Homolog of NCBI NO: 6016151 NR Description: Luminal binding protein 3 precursor (BiP3)
  misc_feature (1)..(562): Homolog of NCBI NO: 14423732 NR Description: Heat shock 70 kDa protein
  misc_feature (1)..(537): Homolog of NCBI NO: 21263753 NR Description: Heat shock cognate 71 kDa protein (Hsc70.1)
  misc_feature (35)..(557): Homolog of NCBI NO: 4164594 NR Description: heat shock protein 70 [Paracoccidioides
  misc_feature (1)..(546): Homolog of NCBI NO: 23480384 NR Description: heat shock protein [Plasmodium yoelii yoelii]
  misc_feature (1)..(546): Homolog of NCBI NO: 29539338 NR Description: Heat shock 70 kDa protein [Cyanidioschyzon
  misc_feature (1)..(537): Homolog of NCBI NO: 481576 NR Description: dnaK-type molecular chaperone GRP78/BiP -
  misc_feature (1)..(546): Homolog of NCBI NO: 1037176 NR Description: immunoglobulin heavy chain binding protein
  misc_feature (1)..(546): Homolog of NCBI NO: 6016151 NR Description: Luminal binding protein 3 precursor (BiP3)
  misc_feature (1)..(562): Homolog of NCBI NO: 14423732 NR Description: Heat shock 70 kDa protein
  misc_feature (1)..(537): Homolog of NCBI NO: 21263753 NR Description: Heat shock cognate 71 kDa protein (Hsc70.1)
  misc_feature (1)..(546): Homolog of NCBI NO: 29539338 NR Description: Heat shock 70 kDa protein [Cyanidioschyzon
  misc_feature (1)..(537): Homolog of NCBI NO: 481576 NR Description: dnaK-type molecular chaperone GRP78/BiP -
  misc_feature (1)..(546): Homolog of NCBI NO: 1037176 NR Description: immunoglobulin heavy chain binding protein
  misc_feature (1)..(546): Homolog of NCBI NO: 6016151 NR Description: Luminal binding protein 3 precursor (BiP3)
  misc_feature (1)..(562): Homolog of NCBI NO: 14423732 NR Description: Heat shock 70 kDa protein
  misc_feature (1)..(537): Homolog of NCBI NO: 21263753 NR Description: Heat shock cognate 71 kDa protein (Hsc70.1)
  misc_feature (35)..(557): Homolog of NCBI NO: 4164594 NR Description: heat shock protein 70 [Paracoccidioides
  misc_feature (1)..(546): Homolog of NCBI NO: 23480384 NR Description: heat shock protein [Plasmodium yoelii yoelii]
  misc_feature (35)..(557): Homolog of NCBI NO: 4164594 NR Description: heat shock protein 70 [Paracoccidioides
  misc_feature (1)..(546): Homolog of NCBI NO: 23480384 NR Description: heat shock protein [Plasmodium yoelii yoelii]
  misc_feature (1)..(546): Homolog of NCBI NO: 29539338 NR Description: Heat shock 70 kDa protein [Cyanidioschyzon
  misc_feature (1)..(537): Homolog of NCBI NO: 481576 NR Description: dnaK-type molecular chaperone GRP78/BiP -
  misc_feature (1)..(546): Homolog of NCBI NO: 1037176 NR Description: immunoglobulin heavy chain binding protein
  misc_feature (1)..(546): Homolog of NCBI NO: 6016151 NR Description: Luminal binding protein 3 precursor (BiP3)
  misc_feature (1)..(562): Homolog of NCBI NO: 14423732 NR Description: Heat shock 70 kDa protein
  misc_feature (1)..(537): Homolog of NCBI NO: 21263753 NR Description: Heat shock cognate 71 kDa protein (Hsc70.1)

SEQ ID NO: 45288 - DNA, 2528 bp, Arabidopsis thaliana
  misc_feature (1)..(2528): Ceres Seq. ID no. 13576003
gaacttgtggagagagaaaagggttagatacagagagatagcgaaagagaagaagaagaagaggtctatcgacagagcaaacttcgtcaagagatccgttaaaaggatccatttggagctccgattcgagctagagtcaataatgagcggaagacagagatctgttgcagcggcggtgcatcaccagaggcagctctccgataaccctctcgatatgtcttcatccaatggcagatggcttcaatccactggtcttcagcattttcagtcatccgccaatgattatggatactatgctggtgggcaaggaggtggtggtcaagcagcaagaggataccagaatgctcagagaggaaacgagttctttggggaaccaactactcctcaatacggtgctcgtcctaccaaccaaaggaagaacaatgatgaatctgagtttagtcctgggctcttagatctgcattcttttgatactgagcttcttcctgagattccagtctctaaccaattggatggtccctcacttttcaatcctagtcaaggtcaaagctttgatgactttgaagcttacaacaagcagcctaaccgtagtcgcgtgttggctgaaaacttggctgctgagaaggagaggatgaatgctgttgcaaagattaaagtcgttgtgcgtaagcgaccacttaacaaaaaggagtcgacaaaaaacgaggaagatattgttgacacccatgccaattgcttaacagttcatgaaactaaacttaaggtcgacttaacagcttatgttgaaaagcatgaatttgtgtttgatgccgtgctagatgaggaagtatcaaatgatgaggtatatcgtgagactgtggagcctgtagtccccctaatttttcagcgcatcaaagccacttgctttgcatatgggcaaacaggtagtggtaaaacctatactatgaagcctttgcctcttaaggcttcaagggacatcctgcggttgatgcaccacacatacagaaatcaagggtttcagttgtttgtcagcttctttgagatttatggaggaaagctatatgatctcctcagtgagaggaagaagctgtgcatgagagaggatggtaagcagcaagtgtgcatcgttggtttacaagagtacagagtatctgatacagatgctattatggagcttattgagagaggaagtgcaacaagaagtactggaaccactggtgcaaatgaagaatcctctcgttcacatgctatactacagctcgcgataaaaaaatcagtagagggaaatcagtcaaagccccctcgccttgttggcaagctttctttcattgatcttgctggaagtgaacgtggtgcagatacaacagacaatgacaagcagacaagattggaaggagcagagatcaataagagcttactcgccttaaaggaatgcattagagctctggataatgaccaaggtcatatcccttttagaggcagtaagttaactgaagttctcagggactccttcatgggaaattctcgtactgtaatgatatcgtgcatatctccaagctctggatcatgtgagcacaccctgaacaccctaagatatgcggacagggttaagagtctctcaaagggaaacgcctctaagaaagatgtatcttcttcgaccatgaacttaagggagtccacgaaaattcctttgtcttctgcacttccaactccatctaactttgatgatgacgtgaatgagatgtggactgaagagaacgatgaatttgatgcatcggattatgagcaagataaacaaatgtggaagaaaaacgggaagctagagccatcctataacggtatggcacaggagagaatcccgaaacctactattcagatgaagtcacgagacatgccaaggcccgatatgaagaagtcaaactctgatgacaatctaaatgcgcttctgcaggaagaagaagaccttgtgaatgcacaccgtaaacaagttgaggataccatgaacatagtgaaagaggagatgaacttgctggttgaggcagaccaacccggaaaccagctagatggttacatttcaagactgaacacaattctatctcagaaggctgcaggtatactccaactacagaaccgtcttgctcatttccagaaacgccttagagagcacaatgtattagtctctaccactgggtactgacctataaccactctctcgagtaaataccggtcctccttttatcgacctcgtttcgggttttgcacttgtgccccctactggcttggactggagatcagaagtgtatctgtttacagcctacagagaactttacagcaaagggttatggatgattacagagtttctcatacgtaaaaggatatgatatgcgttctgttcttgccgctgcacttgaattctatcagattcttgtaatggatttgttgcagaagatgaaatacctatgtaatattgcatttgtgctattaatgagcttgccttctattcaataccatactaagttttgcgtacc

SEQ ID NO: 45289 - protein, 731 aa, Arabidopsis thaliana
  peptide (1)..(731): Ceres Seq. ID no. 13576004
  misc_feature (538)..(717): Homolog of NCBI NO: 9909720 NR Description: probable mitotic centromere associated kinesin
  misc_feature (189)..(545): Homolog of NCBI NO: 9909720 NR Description: probable mitotic centromere associated kinesin
  misc_feature (125)..(690): Homolog of NCBI NO: 34897620 NR Description: kinesin-like protein [Oryza sativa]
  misc_feature (642)..(725): Homolog of NCBI NO: 15228274 NR Description: kinesin-related protein TBK5, putative
  misc_feature (114)..(654): Homolog of NCBI NO: 15228274 NR Description: kinesin-related protein TBK5, putative
  misc_feature (642)..(725): Homolog of NCBI NO: 11994617 NR Description: contains similarity to kinesin
  misc_feature (102)..(654): Homolog of NCBI NO: 11994617 NR Description: contains similarity to kinesin
  misc_feature (594)..(726): Homolog of NCBI NO: 34912848 NR Description: kinesin-like protein [Oryza sativa (japonica
  misc_feature (99)..(632): Homolog of NCBI NO: 34912848 NR Description: kinesin-like protein [Oryza sativa (japonica
  misc_feature (50)..(728): Homolog of NCBI NO: 13536983 NR Description: BY-2 kinesin-like protein 10 [Nicotiana tabacum]
NLWREKRVRYREIAKEKKKKRSIDRANFVKRSVKRIHLELRFELESIMSGRQRSVAAAVHHQRQLSDNPLDMSSSNGRWLQSTGLQHFQSSANDYGYYAGGQGGGGQAARGYQNAQRGNEFFGEPTTPQYGARPTNQRKNNDESEFSPGLLDLHSFDTELLPEIPVSNQLDGPSLFNPSQGQSFDDFEAYNKQPNRSRVLAENLAAEKERMNAVAKIKVVVRKRPLNKKESTKNEEDIVDTHANCLTVHETKLKVDLTAYVEKHEFVFDAVLDEEVSNDEVYRETVEPVVPLIFQRIKATCFAYGQTGSGKTYTMKPLPLKASRDILRLMHHTYRNQGFQLFVSFFEIYGGKLYDLLSERKKLCMREDGKQQVCIVGLQEYRVSDTDAIMELIERGSATRSTGTTGANEESSRSHAILQLAIKKSVEGNQSKPPRLVGKLSFIDLAGSERGADTTDNDKQTRLEGAEINKSLLALKECIRALDNDQGHIPFRGSKLTEVLRDSFMGNSRTVMISCISPSSGSCEHTLNTLRYADRVKSLSKGNASKKDVSSSTMNLRESTKIPLSSALPTPSNFDDDVNEMWTEENDEFDASDYEQDKQMWKKNGKLEPSYNGMAQERIPKPTIQMKSRDMPRPDMKKSNSDDNLNALLQEEEDLVNAHRKQVEDTMNIVKEEMNLLVEADQPGNQLDGYISRLNTILSQKAAGILQLQNRLAHFQKRLREHNVLVSTTGY

SEQ ID NO: 45290 - protein, 684 aa, Arabidopsis thaliana
  peptide (1)..(684): Ceres Seq. ID no. 13576005
  misc_feature (491)..(670): Homolog of NCBI NO: 9909720 NR Description: probable mitotic centromere associated kinesin
  misc_feature (142)..(498): Homolog of NCBI NO: 9909720 NR Description: probable mitotic centromere associated kinesin
  misc_feature (78)..(643): Homolog of NCBI NO: 34897620 NR Description: kinesin-like protein [Oryza sativa]
  misc_feature (595)..(678): Homolog of NCBI NO: 15228274 NR Description: kinesin-related protein TBK5, putative
  misc_feature (67)..(607): Homolog of NCBI NO: 15228274 NR Description: kinesin-related protein TBK5, putative
  misc_feature (595)..(678): Homolog of NCBI NO: 11994617 NR Description: contains similarity to kinesin
  misc_feature (55)..(607): Homolog of NCBI NO: 11994617 NR Description: contains similarity to kinesin
  misc_feature (547)..(679): Homolog of NCBI NO: 34912848 NR Description: kinesin-like protein [Oryza sativa (japonica
  misc_feature (52)..(585): Homolog of NCBI NO: 34912848 NR Description: kinesin-like protein [Oryza sativa (japonica
  misc_feature (3)..(681): Homolog of NCBI NO: 13536983 NR Description: BY-2 kinesin-like protein 10 [Nicotiana tabacum]
MSGRQRSVAAAVHHQRQLSDNPLDMSSSNGRWLQSTGLQHFQSSANDYGYYAGGQGGGGQAARGYQNAQRGNEFFGEPTTPQYGARPTNQRKNNDESEFSPGLLDLHSFDTELLPEIPVSNQLDGPSLFNPSQGQSFDDFEAYNKQPNRSRVLAENLAAEKERMNAVAKIKVVVRKRPLNKKESTKNEEDIVDTHANCLTVHETKLKVDLTAYVEKHEFVFDAVLDEEVSNDEVYRETVEPVVPLIFQRIKATCFAYGQTGSGKTYTMKPLPLKASRDILRLMHHTYRNQGFQLFVSFFEIYGGKLYDLLSERKKLCMREDGKQQVCIVGLQEYRVSDTDAIMELIERGSATRSTGTTGANEESSRSHAILQLAIKKSVEGNQSKPPRLVGKLSFIDLAGSERGADTTDNDKQTRLEGAEINKSLLALKECIRALDNDQGHIPFRGSKLTEVLRDSFMGNSRTVMISCISPSSGSCEHTLNTLRYADRVKSLSKGNASKKDVSSSTMNLRESTKIPLSSALPTPSNFDDDVNEMWTEENDEFDASDYEQDKQMWKKNGKLEPSYNGMAQERIPKPTIQMKSRDMPRPDMKKSNSDDNLNALLQEEEDLVNAHRKQVEDTMNIVKEEMNLLVEADQPGNQLDGYISRLNTILSQKAAGILQLQNRLAHFQKRLREHNVLVSTTGY

SEQ ID NO: 45291 - protein, 660 aa, Arabidopsis thaliana
  peptide (1)..(660): Ceres Seq. ID no. 13576006
  misc_feature (467)..(646): Homolog of NCBI NO: 9909720 NR Description: probable mitotic centromere associated kinesin
  misc_feature (118)..(474): Homolog of NCBI NO: 9909720 NR Description: probable mitotic centromere associated kinesin
  misc_feature (54)..(619): Homolog of NCBI NO: 34897620 NR Description: kinesin-like protein [Oryza sativa]
  misc_feature (571)..(654): Homolog of NCBI NO: 15228274 NR Description: kinesin-related protein TBK5, putative
  misc_feature (43)..(583): Homolog of NCBI NO: 15228274 NR Description: kinesin-related protein TBK5, putative
  misc_feature (571)..(654): Homolog of NCBI NO: 11994617 NR Description: contains similarity to kinesin
  misc_feature (31)..(583): Homolog of NCBI NO: 11994617 NR Description: contains similarity to kinesin
  misc_feature (523)..(655): Homolog of NCBI NO: 34912848 NR Description: kinesin-like protein [Oryza sativa (japonica
  misc_feature (28)..(561): Homolog of NCBI NO: 34912848 NR Description: kinesin-like protein [Oryza sativa (japonica
  misc_feature (1)..(657): Homolog of NCBI NO: 13536983 NR Description: BY-2 kinesin-like protein 10 [Nicotiana tabacum]
MSSSNGRWLQSTGLQHFQSSANDYGYYAGGQGGGGQAARGYQNAQRGNEFFGEPTTPQYGARPTNQRKNNDESEFSPGLLDLHSFDTELLPEIPVSNQLDGPSLFNPSQGQSFDDFEAYNKQPNRSRVLAENLAAEKERMNAVAKIKVVVRKRPLNKKESTKNEEDIVDTHANCLTVHETKLKVDLTAYVEKHEFVFDAVLDEEVSNDEVYRETVEPVVPLIFQRIKATCFAYGQTGSGKTYTMKPLPLKASRDILRLMHHTYRNQGFQLFVSFFEIYGGKLYDLLSERKKLCMREDGKQQVCIVGLQEYRVSDTDAIMELIERGSATRSTGTTGANEESSRSHAILQLAIKKSVEGNQSKPPRLVGKLSFIDLAGSERGADTTDNDKQTRLEGAEINKSLLALKECIRALDNDQGHIPFRGSKLTEVLRDSFMGNSRTVMISCISPSSGSCEHTLNTLRYADRVKSLSKGNASKKDVSSSTMNLRESTKIPLSSALPTPSNFDDDVNEMWTEENDEFDASDYEQDKQMWKKNGKLEPSYNGMAQERIPKPTIQMKSRDMPRPDMKKSNSDDNLNALLQEEEDLVNAHRKQVEDTMNIVKEEMNLLVEADQPGNQLDGYISRLNTILSQKAAGILQLQNRLAHFQKRLREHNVLVSTTGY

SEQ ID NO: 45292 - DNA, 2061 bp, Arabidopsis thaliana
  misc_feature (1)..(2061): Ceres Seq. ID no. 12560615
  misc_feature: MA Experiment ID: 20000173 Result: Down-regulated in Transcription
  misc_feature: MA Experiment 20000173 PARAMETER Experiment Name: At_42deg_Heat_P Parameter: Age (day) Value: 14
  misc_feature: MA Experiment 20000173 PARAMETER Experiment Name: At_42deg_Heat_P Parameter: Organism Value: A. thaliana
  misc_feature: MA Experiment 20000173 PARAMETER Experiment Name: At_42deg_Heat_P Parameter: Plant Line Value: WS
  misc_feature: MA Experiment 20000173 PARAMETER Experiment Name: At_42deg_Heat_P Parameter: Temperature (deg C) Value: 42 vs. 22
  misc_feature: MA Experiment 20000173 PARAMETER Experiment Name: At_42deg_Heat_P Parameter: Timepoint (hr) Value: 6
  misc_feature: MA Experiment 20000173 PARAMETER Experiment Name: At_42deg_Heat_P Parameter: Tissue Value: Aerial
  misc_feature: MA Experiment ID: 20000234 Result: Up-regulated in Transcription
  misc_feature: MA Experiment 20000234 PARAMETER Experiment Name: At_Siliques_P Parameter: Age (day) Value: 21
  misc_feature: MA Experiment 20000234 PARAMETER Experiment Name: At_Siliques_P Parameter: Organism Value: A. thaliana
  misc_feature: MA Experiment 20000234 PARAMETER Experiment Name: At_Siliques_P Parameter: Plant Line Value: WS
  misc_feature: MA Experiment 20000234 PARAMETER Experiment Name: At_Siliques_P Parameter: Tissue Value: Less Than 5mm Siliques vs. Whole Plant
  misc_feature: MA Experiment ID: 20000235 Result: Up-regulated in Transcription
  misc_feature: MA Experiment 20000235 PARAMETER Experiment Name: At_Siliques_P Parameter: Age (day) Value: 21
  misc_feature: MA Experiment 20000235 PARAMETER Experiment Name: At_Siliques_P Parameter: Organism Value: A. thaliana
  misc_feature: MA Experiment 20000235 PARAMETER Experiment Name: At_Siliques_P Parameter: Plant Line Value: WS
  misc_feature: MA Experiment 20000235 PARAMETER Experiment Name: At_Siliques_P Parameter: Tissue Value: 5-10mm Siliques vs. Whole Plant
  misc_feature: MA Experiment ID: 20000264 Result: Up-regulated in Transcription
  misc_feature: MA Experiment 20000264 PARAMETER Experiment Name: At_Open_Flower_P Parameter: Age (day) Value: 21
  misc_feature: MA Experiment 20000264 PARAMETER Experiment Name: At_Open_Flower_P Parameter: Plant Line Value: WS
  misc_feature: MA Experiment 20000264 PARAMETER Experiment Name: At_Open_Flower_P Parameter: Tissue Value: Open Flower vs. Whole Plant
  misc_feature: MA Experiment ID: 20000265 Result: Up-regulated in Transcription
  misc_feature: MA Experiment 20000265 PARAMETER Experiment Name: At_Open_Flower_P Parameter: Age (day) Value: 21
  misc_feature: MA Experiment 20000265 PARAMETER Experiment Name: At_Open_Flower_P Parameter: Plant Line Value: WS
  misc_feature: MA Experiment 20000265 PARAMETER Experiment Name: At_Open_Flower_P Parameter: Tissue Value: Closed Flower vs. Whole Plant
  misc_feature: MA Experiment ID: 20000286 Result: Up-regulated in Transcription
  misc_feature: MA Experiment 20000286 PARAMETER Experiment Name: At_Open_Flower_P Parameter: Age (day) Value: 21
  misc_feature: MA Experiment 20000286 PARAMETER Experiment Name: At_Open_Flower_P Parameter: Plant Line Value: WS
  misc_feature: MA Experiment 20000286 PARAMETER Experiment Name: At_Open_Flower_P Parameter: Tissue Value: Half Open vs. Whole Plant
  misc_feature: MA Experiment ID: 20000437 Result: Down-regulated in Transcription
  misc_feature: MA Experiment 20000437 PARAMETER Experiment Name: At_Drought_P Parameter: Age (day) Value: 8
  misc_feature: MA Experiment 20000437 PARAMETER Experiment Name: At_Drought_P Parameter: Organism Value: A. thaliana
  misc_feature: MA Experiment 20000437 PARAMETER Experiment Name: At_Drought_P Parameter: Plant Line Value: WS
  misc_feature: MA Experiment 20000437 PARAMETER Experiment Name: At_Drought_P Parameter: Timepoint (hr) Value: 24
  misc_feature: MA Experiment 20000437 PARAMETER Experiment Name: At_Drought_P Parameter: Tissue Value: Whole Plant
  misc_feature: MA Experiment 20000437 PARAMETER Experiment Name: At_Drought_P Parameter: Treatment Value: Drought vs. No Drought
  misc_feature: MA Experiment ID: 20001557 Result: Down-regulated in Transcription
  misc_feature: MA Experiment 20001557 PARAMETER Experiment Name: At_Drought_Soil_Dry_P Parameter: Age (day) Value: 27
  misc_feature: MA Experiment 20001557 PARAMETER Experiment Name: At_Drought_Soil_Dry_P Parameter: Organism Value: A. thaliana
  misc_feature: MA Experiment 20001557 PARAMETER Experiment Name: At_Drought_Soil_Dry_P Parameter: Plant Line Value: WS
  misc_feature: MA Experiment 20001557 PARAMETER Experiment Name: At_Drought_Soil_Dry_P Parameter: Post Timepoint (hr) Value: 3
  misc_feature: MA Experiment 20001557 PARAMETER Experiment Name: At_Drought_Soil_Dry_P Parameter: Post-Treatment Value: Re-Water vs. No Drought
  misc_feature: MA Experiment 20001557 PARAMETER Experiment Name: At_Drought_Soil_Dry_P Parameter: Timepoint (day) Value: 13
  misc_feature: MA Experiment 20001557 PARAMETER Experiment Name: At_Drought_Soil_Dry_P Parameter: Treatment Value: Drought vs. No Drought
  misc_feature: MA Experiment ID: 20001911 Result: Down-regulated in Transcription
  misc_feature: MA Experiment 20001911 PARAMETER Experiment Name: At_Drought_Reproduction_P Parameter: Age (day) Value: 40
  misc_feature: MA Experiment 20001911 PARAMETER Experiment Name: At_Drought_Reproduction_P Parameter: Organism Value: A. thaliana
  misc_feature: MA Experiment 20001911 PARAMETER Experiment Name: At_Drought_Reproduction_P Parameter: Plant Line Value: WS
  misc_feature: MA Experiment 20001911 PARAMETER Experiment Name: At_Drought_Reproduction_P Parameter: Timepoint (day) Value: 10
  misc_feature: MA Experiment 20001911 PARAMETER Experiment Name: At_Drought_Reproduction_P Parameter: Tissue Value: Flowers
  misc_feature: MA Experiment 20001911 PARAMETER Experiment Name: At_Drought_Reproduction_P Parameter: Treatment Value: Drought vs. No Drought
caacaacaaaaaaaaaaaagttgttagttaagacattgctttacagctcaattgcgtcttcttcctctgtcttattcttcatcttcatcttcctcctcgcggatccattttgaggagtccctttttgtttcttgaagatagactgggcgtcacggagcagctgagtatatgctacgagtgttgcattccggaggctgttctttcagatgataggcagtagctatattatgcttgaacggtgccataatgggcatctgtctaatgaagcgctgctgctcatggtttcttttgatctcgtttctctctgcactaacgaatgaaaatgaagcaattagtcctgatggtgaggcgcttttgagttttagaaatggagttttggcttctgatggtgttattggtctgtggagaccagaggatcctgatccatgtaactggaaaggagtgacctgtgatgcaaaaacaaaaagagttatagcctttatgtggtgcatcttttgtcggttcctgaagtttcttgtgtgcaggagtcttacttatcacaaattaaggggacctttaccccctgagcttggaaagctggatcagttaaggcttttaatgcttcacaacaatgcgttatatcaatcaatacctgcctcattgggaaattgcacggcattagagggaatatacttgcagaataattacatcactgggacaatcccaagtgaaataggaaacctgtccgggctgaaaaacctggacctctcaaacaacaatctcaatggagctatccctgcttcacttgggcagttgaaaaggcttactaaattcaatgtctcaaacaatttcctggtgggaaaaataccttctgacggcctactcgctagactctcgagggactccttcaacggaaatcgtaacttgtgtggaaaacaaatcgatattgtgtgcaatgacagtggaaattctacagcttctgggtctccaacaggccaaggaggtaataaccctaaaaggctgcttataagtgcttcagctactgtgggtgggctgctcctagtggcgctcatgtgtttctggggatgctttctctataaaaagcttggtagagttgagagtaaaagccttgtgatagatgtcggtggaggtgcgtctatagtgatgttccatggagatttgccctacgcttccaaagacattatcaagaaactggaatctcttaatgaagagcacataataggctgtggaggctttggcacagtgtacaagctgtctatggacgatggcaatgtttttgcgctgaaaagaattgttaagttaaatgaaggttttgatcggttttttgaaagggagcttgagattcttgggagcatcaaacatcgttaccttgtgaatctacgtggatactgcaattcacccacatcaaagcttctgctatatgattaccttcctggtggtagccttgatgaagctctacataagagaggcgagcagctggattgggattcgcgagttaatatcataataggagcggcaaaagggttggcatacttgcatcatgattgttctcctaggattatacaccgtgatataaaatcaagcaacatcttactggatggaaatctggaggctcgggtatcagactttgggcttgccaagttgttagaggacgaagaatctcatattacaaccattgttgcaggcacattcggttacttggctccagagtatatgcaaagcggtagagcgactgagaaaaccgatgtttacagcttcggggttttggttcttgaagtcttgagtggtaaacttcccacggatgcctcattcatcgagaaaggctttaacattgttggttggctaaacttcttaatcagcgaaaaccgggcaaaggagattgttgatctaagctgtgaaggagtggagagagagagtctcgacgcacttctatcaatagcaacaaagtgtgtgtcgtcaagtccagatgagcggccaacaatgcacagagtcgtccagttacttgaatccgaagttatgactccttgccccagcgacttctacgactccagctccgattga

SEQ ID NO: 45293 - protein, 604 aa, Arabidopsis thaliana
  peptide (1)..(604): Ceres Seq. ID no. 12560616
  misc_feature (90)..(238): Homolog of NCBI NO: 15240747 NR Description: receptor-like protein kinase-like protein
  misc_feature (297)..(587): Homolog of NCBI NO: 15240747 NR Description: receptor-like protein kinase-like protein
  misc_feature (90)..(238): Homolog of NCBI NO: 23304947 NR Description: extra sporogenous cells [Arabidopsis thaliana]
  misc_feature (297)..(587): Homolog of NCBI NO: 23304947 NR Description: extra sporogenous cells [Arabidopsis thaliana]
  misc_feature (15)..(294): Homolog of NCBI NO: 15227455 NR Description: putative receptor-like protein kinase; protein
  misc_feature (33)..(604): Homolog of NCBI NO: 10177448 NR Description: receptor-like protein kinase [Arabidopsis
  misc_feature (11)..(604): Homolog of NCBI NO: 30697726 NR Description: leucine rich repeat protein family [Arabidopsis
  misc_feature (1)..(604): Homolog of NCBI NO: 25403114 NR Description: probable protein kinase [imported] - Arabidopsis
  misc_feature (1)..(604): Homolog of NCBI NO: 30692520 NR Description: leucine-rich repeat transmembrane protein kinase,
  misc_feature (88)..(604): Homolog of NCBI NO: 15227455 NR Description: putative receptor-like protein kinase; protein
MGICLMKRCCSWFLLISFLSALTNENEAISPDGEALLSFRNGVLASDGVIGLWRPEDPDPCNWKGVTCDAKTKRVIAFMWCIFCRFLKFLVCRSLTYHKLRGPLPPELGKLDQLRLLMLHNNALYQSIPASLGNCTALEGIYLQNNYITGTIPSEIGNLSGLKNLDLSNNNLNGAIPASLGQLKRLTKFNVSNNFLVGKIPSDGLLARLSRDSFNGNRNLCGKQIDIVCNDSGNSTASGSPTGQGGNNPKRLLISASATVGGLLLVALMCFWGCFLYKKLGRVESKSLVIDVGGGASIVMFHGDLPYASKDIIKKLESLNEEHIIGCGGFGTVYKLSMDDGNVFALKRIVKLNEGFDRFFERELEILGSIKHRYLVNLRGYCNSPTSKLLLYDYLPGGSLDEALHKRGEQLDWDSRVNIIIGAAKGLAYLHHDCSPRIIHRDIKSSNILLDGNLEARVSDFGLAKLLEDEESHITTIVAGTFGYLAPEYMQSGRATEKTDVYSFGVLVLEVLSGKLPTDASFIEKGFNIVGWLNFLISENRAKEIVDLSCEGVERESLDALLSIATKCVSSSPDERPTMHRVVQLLESEVMTPCPSDFYDSSSD

SEQ ID NO: 45294 - protein, 599 aa, Arabidopsis thaliana
  peptide (1)..(599): Ceres Seq. ID no. 12560617
  misc_feature (85)..(233): Homolog of NCBI NO: 15240747 NR Description: receptor-like protein kinase-like protein
  misc_feature (292)..(582): Homolog of NCBI NO: 15240747 NR Description: receptor-like protein kinase-like protein
  misc_feature (85)..(233): Homolog of NCBI NO: 23304947 NR Description: extra sporogenous cells [Arabidopsis thaliana]
  misc_feature (292)..(582): Homolog of NCBI NO: 23304947 NR Description: extra sporogenous cells [Arabidopsis thaliana]
  misc_feature (10)..(289): Homolog of NCBI NO: 15227455 NR Description: putative receptor-like protein kinase; protein
  misc_feature (28)..(599): Homolog of NCBI NO: 10177448 NR Description: receptor-like protein kinase [Arabidopsis
  misc_feature (6)..(599): Homolog of NCBI NO: 30697726 NR Description: leucine rich repeat protein family [Arabidopsis
  misc_feature (1)..(599): Homolog of NCBI NO: 25403114 NR Description: probable protein kinase [imported] - Arabidopsis
  misc_feature (1)..(599): Homolog of NCBI NO: 30692520 NR Description: leucine-rich repeat transmembrane protein kinase,
  misc_feature (83)..(599): Homolog of NCBI NO: 15227455 NR Description: putative receptor-like protein kinase; protein
MKRCCSWFLLISFLSALTNENEAISPDGEALLSFRNGVLASDGVIGLWRPEDPDPCNWKGVTCDAKTKRVIAFMWCIFCRFLKFLVCRSLTYHKLRGPLPPELGKLDQLRLLMLHNNALYQSIPASLGNCTALEGIYLQNNYITGTIPSEIGNLSGLKNLDLSNNNLNGAIPASLGQLKRLTKFNVSNNFLVGKIPSDGLLARLSRDSFNGNRNLCGKQIDIVCNDSGNSTASGSPTGQGGNNPKRLLISASATVGGLLLVALMCFWGCFLYKKLGRVESKSLVIDVGGGASIVMFHGDLPYASKDIIKKLESLNEEHIIGCGGFGTVYKLSMDDGNVFALKRIVKLNEGFDRFFERELEILGSIKHRYLVNLRGYCNSPTSKLLLYDYLPGGSLDEALHKRGEQLDWDSRVNIIIGAAKGLAYLHHDCSPRIIHRDIKSSNILLDGNLEARVSDFGLAKLLEDEESHITTIVAGTFGYLAPEYMQSGRATEKTDVYSFGVLVLEVLSGKLPTDASFIEKGFNIVGWLNFLISENRAKEIVDLSCEGVERESLDALLSIATKCVSSSPDERPTMHRVVQLLESEVMTPCPSDFYDSSSD

SEQ ID NO: 45295 - protein, 526 aa, Arabidopsis thaliana
  peptide (1)..(526): Ceres Seq. ID no. 12560618
  misc_feature (12)..(160): Homolog of NCBI NO: 15240747 NR Description: receptor-like protein kinase-like protein
  misc_feature (219)..(509): Homolog of NCBI NO: 15240747 NR Description: receptor-like protein kinase-like protein
  misc_feature (12)..(160): Homolog of NCBI NO: 23304947 NR Description: extra sporogenous cells [Arabidopsis thaliana]
  misc_feature (219)..(509): Homolog of NCBI NO: 23304947 NR Description: extra sporogenous cells [Arabidopsis thaliana]
  misc_feature (1)..(216): Homolog of NCBI NO: 15227455 NR Description: putative receptor-like protein kinase; protein
  misc_feature (1)..(526): Homolog of NCBI NO: 10177448 NR Description: receptor-like protein kinase [Arabidopsis
  misc_feature (1)..(526): Homolog of NCBI NO: 30697726 NR Description: leucine rich repeat protein family [Arabidopsis
  misc_feature (1)..(526): Homolog of NCBI NO: 25403114 NR Description: probable protein kinase [imported] - Arabidopsis
  misc_feature (1)..(526): Homolog of NCBI NO: 30692520 NR Description: leucine-rich repeat transmembrane protein kinase,
  misc_feature (10)..(526): Homolog of NCBI NO: 15227455 NR Description: putative receptor-like protein kinase; protein
MWCIFCRFLKFLVCRSLTYHKLRGPLPPELGKLDQLRLLMLHNNALYQSIPASLGNCTALEGIYLQNNYITGTIPSEIGNLSGLKNLDLSNNNLNGAIPASLGQLKRLTKFNVSNNFLVGKIPSDGLLARLSRDSFNGNRNLCGKQIDIVCNDSGNSTASGSPTGQGGNNPKRLLISASATVGGLLLVALMCFWGCFLYKKLGRVESKSLVIDVGGGASIVMFHGDLPYASKDIIKKLESLNEEHIIGCGGFGTVYKLSMDDGNVFALKRIVKLNEGFDRFFERELEILGSIKHRYLVNLRGYCNSPTSKLLLYDYLPGGSLDEALHKRGEQLDWDSRVNIIIGAAKGLAYLHHDCSPRIIHRDIKSSNILLDGNLEARVSDFGLAKLLEDEESHITTIVAGTFGYLAPEYMQSGRATEKTDVYSFGVLVLEVLSGKLPTDASFIEKGFNIVGWLNFLISENRAKEIVDLSCEGVERESLDALLSIATKCVSSSPDERPTMHRVVQLLESEVMTPCPSDFYDSSSD

SEQ ID NO: 45296 - DNA, 3114 bp, Arabidopsis thaliana
  misc_feature (1)..(3114): Ceres Seq. ID no. 12560623
  misc_feature: MA Experiment ID: 20000438 Result: Up-regulated in Transcription
  misc_feature: MA Experiment 20000438 PARAMETER Experiment Name: At_Shoots__P Parameter: Age (day) Value: 14
  misc_feature: MA Experiment 20000438 PARAMETER Experiment Name: At_Shoots__P Parameter: Tissue Value: Shoots vs. Whole Plant
  misc_feature: MA Experiment ID: 20001451 Result: Up-regulated in Transcription
  misc_feature: MA Experiment 20001451 PARAMETER Experiment Name: At_Far-red-induction_P Parameter: Age (day) Value: 7
  misc_feature: MA Experiment 20001451 PARAMETER Experiment Name: At_Far-red-induction_P Parameter: Light Value: Far-red vs. White
  misc_feature: MA Experiment 20001451 PARAMETER Experiment Name: At_Far-red-induction_P Parameter: Organism Value: A. thaliana
  misc_feature: MA Experiment 20001451 PARAMETER Experiment Name: At_Far-red-induction_P Parameter: Plant Line Value: Columbia
  misc_feature: MA Experiment 20001451 PARAMETER Experiment Name: At_Far-red-induction_P Parameter: Timepoint (hr) Value: 24
  misc_feature: MA Experiment 20001451 PARAMETER Experiment Name: At_Far-red-induction_P Parameter: Tissue Value: Whole Plant
  misc_feature: MA Experiment ID: 20001757 Result: Up-regulated in Transcription
  misc_feature: MA Experiment 20001757 PARAMETER Experiment Name: At_50mM_NH4NO3_L-to-H_P Parameter: Timepoint (hr) Value: 6
  misc_feature: MA Experiment 20001757 PARAMETER Experiment Name: At_50mM_NH4NO3_L-to-H_P Parameter: Tissue Value: Leaf
  misc_feature: MA Experiment 20001757 PARAMETER Experiment Name: At_50mM_NH4NO3_L-to-H_P Parameter: Treatment Value: 50mM NH4NO3 vs 100mM Mannitol
aaagagggtcatcatcatttcatggttacctcctcttcctctcttcttactctcaccatatctgctctctctctctctctgtttcaagcttttgctcccatttttcatttccttcgtattctcgctcgagcttagcggttgatgtaccaatgaccaaatcgatatttgaatcgccgtggctacctttctttttcttctgatttctctatctctcgcttgattctaccacttttagggtttctattattcccagggactttgggtttctttaagaagttcgattcgtctccgttttctttttagggttaacgaagtctgtggtgttggatttcgatctttttttttttggtatcttccccattgactgttgcggtgataagagagtgacgcaatggtgtctaagaatgatcatatcgagactttattcaattcaatccaactagttaaagatgttgttcttcttccgattgagcttggtgtgaaaaaggcggcaagagatattgaaaattgttggataagcaaagaaagggatctaggtcttgttttcagatcatctggaagaaacaggaagaagcggattgttgctactcctgaatttgacgacaatgctactaataatgttcagtgtgtggtggttactgatgagagaaagaaaggtttgtctatcaagaagatccctgtgaagtcactctttggtatgttttctcccaatttagtcagtgagaagttgagtcgtggaaatgatgtggtggtggcgaagaaagataagtctttggagaagaaagatgatgattcttgtactgattgcttcaagtttgcgatgacttggtctttgttggttagtggctttgttcatgcttttcctattccttttaaaattggtaagaagaggattcataagatgggggatgatgagaacagtctacgtaaacacggccttaaatcaaaggcggcatttgtgagtcggaaagaagtgaggtgtcagtcagttgaatctgtagaaaaggaagggaaccctttttcgattgaatgcgctgttggttttgttgttgaaatgttggctcagaatctccagaagctggaccagtttatacaggatagttcagagaatgaatcttgttgttccaaggaagctagttctaatgatagtccacttatctttaacatctgggaggctagaaaactcgacgtaaatggattcctcgggaacctgatgtttgccagagttggagatgtggcgtcaggtataggtggcctgacatctcacataagtgaagatggtgatgaaagtaatgtcagtactgctggtaaggaggaaagtgcagttgattctccgcagaacttggcaactggactattgagtatacctttatcaaatgtagagcgcttaaaatccacactgtccacaatttcactgacggaacttattgaacttttaccacaattaggacgaccttcaagagaccatccagacaagaaaaaactaatttctgttcaggattttttcagatacaccgagtctgaaggcaggaggttctttgaagaattagatagagatggtgatggcaaagtaactttggaggatctggaaattgcaatgaggagaagaaaattgcccagaagatacgccaaggaatttatgcgacgagctaggagtcatcttttctcgaaatcgtttggttggaagcaatttttgtccttgatggaacagaaggagccaaccatcctccgtgcctatacttctctctgcttgaccaagtctggtactcttaagaaaagtgagatattggcatcactaaataacgcaggacttcctgctaatgaagaaaatgctatagccatgatgagatttttgaaggctgataccgaggagtctatctcatacggacatttccgtaatttcatggttttgctgccatatgagcgcttacaagatgatcctcgtaacatctggtttgaagctgcgactgttgttgctgttgcaccccctgtggccttacctgctggagatgttctaaaatctgcattagcgggagggcttgcctctgctctctccacttccttaatgcatccgattgacacaatcaagacacgtgtgcaagcatcaaccttgtcatttcctgaagtaatagccaagcttccagagattggtgtccggggagtgtataggggttctattccagcaattcttggacaattttcaagccatggcctgcggacaggaatattcgaagcaagcaaacttgtgttgatcaattttgctcccaatctcccagaaattcaggttcaatcgattgcatcattctgcagcacactattaggcacagctgtgcggattccatgtgaggtgctgaagcaacggttgcaggctggcatgtttaacaatgtaggggaagccattgtcgggacgtggaagcaagatggtccaagtggctttttccgtgggacaggcgcaactctttgccgcgaagttccactatacgttgttggcatgggactgtatgcagagtccaaaaagatggtggcgcaagctctgggaagagaactggaggcatgggagacaatagcggttggggcggtgtcaggaggtattgcagcagttgtaacaaccccatttgatgtgatgaagacgagaatgatgactgcaacgccagggagaccgatctcaatgtctatggttgttgtatcgattctgcgtaatgagggaccgctaggtttgttcaaaggagcagtcccgaggttcttctgggtggctcctctaggtgctatgaactttgctgggtacgaactagccaagaaagctatgcagaagaacgaagatgcagtgctagcggatcagcttggtcagaagaagctttgctaatgggattttactttgctttgctgctacgaagttttttgggggcagcttaagccggagactcacctcttttgttaaaagctactttgcaaaattttgacaaaaaaaaaagggttcattgttttgttgtgcattgaggacagtttcatttactctttataaaaactctgcttcaaaaatgtgattttttgccctctctacaattggttgttgctttgacagttgcaattacttcaatggtatacagtagcctt

SEQ ID NO: 45297 - protein, 823 aa, Arabidopsis thaliana
  peptide (1)..(823): Ceres Seq. ID no. 12560624
  misc_feature (378)..(406): Pfam Name: EF hand Pfam Description: EF hand
  misc_feature (541)..(659): Homolog of NCBI NO: 25406327 NR Description: hypothetical protein F1O17.9 [imported] -
  misc_feature (661)..(802): Homolog of NCBI NO: 25406327 NR Description: hypothetical protein F1O17.9 [imported] -
  misc_feature (546)..(812): Homolog of NCBI NO: 18420458 NR Description: mitochondrial carrier protein family
  misc_feature (541)..(659): Homolog of NCBI NO: 30699000 NR Description: mitochondrial carrier protein family [Arabidopsis
  misc_feature (661)..(802): Homolog of NCBI NO: 30699000 NR Description: mitochondrial carrier protein family [Arabidopsis
  misc_feature (544)..(805): Homolog of NCBI NO: 27754081 NR Description: RIKEN cDNA 4930433D19; expressed sequence
  misc_feature (543)..(807): Homolog of NCBI NO: 18399114 NR Description: allinase, putative; protein id: At1g34065.1
  misc_feature (524)..(807): Homolog of NCBI NO: 34905862 NR Description: P0458E05.7 [Oryza sativa (japonica
  misc_feature (600)..(805): Homolog of NCBI NO: 15225292 NR Description: putative mitochondrial carrier protein; protein
  misc_feature (534)..(805): Homolog of NCBI NO: 26449572 NR Description: putative mitochondrial carrier protein
MVSKNDHIETLFNSIQLVKDVVLLPIELGVKKAARDIENCWISKERDLGLVFRSSGRNRKKRIVATPEFDDNATNNVQCVVVTDERKKGLSIKKIPVKSLFGMFSPNLVSEKLSRGNDVVVAKKDKSLEKKDDDSCTDCFKFAMTWSLLVSGFVHAFPIPFKIGKKRIHKMGDDENSLRKHGLKSKAAFVSRKEVRCQSVESVEKEGNPFSIECAVGFVVEMLAQNLQKLDQFIQDSSENESCCSKEASSNDSPLIFNIWEARKLDVNGFLGNLMFARVGDVASGIGGLTSHISEDGDESNVSTAGKEESAVDSPQNLATGLLSIPLSNVERLKSTLSTISLTELIELLPQLGRPSRDHPDKKKLISVQDFFRYTESEGRRFFEELDRDGDGKVTLEDLEIAMRRRKLPRRYAKEFMRRARSHLFSKSFGWKQFLSLMEQKEPTILRAYTSLCLTKSGTLKKSEILASLNNAGLPANEENAIAMMRFLKADTEESISYGHFRNFMVLLPYERLQDDPRNIWFEAATVVAVAPPVALPAGDVLKSALAGGLASALSTSLMHPIDTIKTRVQASTLSFPEVIAKLPEIGVRGVYRGSIPAILGQFSSHGLRTGIFEASKLVLINFAPNLPEIQVQSIASFCSTLLGTAVRIPCEVLKQRLQAGMFNNVGEAIVGTWKQDGPSGFFRGTGATLCREVPLYVVGMGLYAESKKMVAQALGRELEAWETIAVGAVSGGIAAVVTTPFDVMKTRMMTATPGRPISMSMVVVSILRNEGPLGLFKGAVPRFFWVAPLGAMNFAGYELAKKAMQKNEDAVLADQLGQKKLC

SEQ ID NO: 45298 - protein, 721 aa, Arabidopsis thaliana
  peptide (1)..(721): Ceres Seq. ID no. 12560625
  misc_feature (276)..(304): Pfam Name: EF hand Pfam Description: EF hand
  misc_feature (439)..(557): Homolog of NCBI NO: 25406327 NR Description: hypothetical protein F1O17.9 [imported] -
  misc_feature (559)..(700): Homolog of NCBI NO: 25406327 NR Description: hypothetical protein F1O17.9 [imported] -
  misc_feature (444)..(710): Homolog of NCBI NO: 18420458 NR Description: mitochondrial carrier protein family
  misc_feature (439)..(557): Homolog of NCBI NO: 30699000 NR Description: mitochondrial carrier protein family [Arabidopsis
  misc_feature (559)..(700): Homolog of NCBI NO: 30699000 NR Description: mitochondrial carrier protein family [Arabidopsis
  misc_feature (442)..(703): Homolog of NCBI NO: 27754081 NR Description: RIKEN cDNA 4930433D19; expressed sequence
  misc_feature (441)..(705): Homolog of NCBI NO: 18399114 NR Description: allinase, putative; protein id: At1g34065.1
  misc_feature (422)..(705): Homolog of NCBI NO: 34905862 NR Description: P0458E05.7 [Oryza sativa (japonica
  misc_feature (498)..(703): Homolog of NCBI NO: 15225292 NR Description: putative mitochondrial carrier protein; protein
  misc_feature (432)..(703): Homolog of NCBI NO: 26449572 NR Description: putative mitochondrial carrier protein
MFSPNLVSEKLSRGNDVVVAKKDKSLEKKDDDSCTDCFKFAMTWSLLVSGFVHAFPIPFKIGKKRIHKMGDDENSLRKHGLKSKAAFVSRKEVRCQSVESVEKEGNPFSIECAVGFVVEMLAQNLQKLDQFIQDSSENESCCSKEASSNDSPLIFNIWEARKLDVNGFLGNLMFARVGDVASGIGGLTSHISEDGDESNVSTAGKEESAVDSPQNLATGLLSIPLSNVERLKSTLSTISLTELIELLPQLGRPSRDHPDKKKLISVQDFFRYTESEGRRFFEELDRDGDGKVTLEDLEIAMRRRKLPRRYAKEFMRRARSHLFSKSFGWKQFLSLMEQKEPTILRAYTSLCLTKSGTLKKSEILASLNNAGLPANEENAIAMMRFLKADTEESISYGHFRNFMVLLPYERLQDDPRNIWFEAATVVAVAPPVALPAGDVLKSALAGGLASALSTSLMHPIDTIKTRVQASTLSFPEVIAKLPEIGVRGVYRGSIPAILGQFSSHGLRTGIFEASKLVLINFAPNLPEIQVQSIASFCSTLLGTAVRIPCEVLKQRLQAGMFNNVGEAIVGTWKQDGPSGFFRGTGATLCREVPLYVVGMGLYAESKKMVAQALGRELEAWETIAVGAVSGGIAAVVTTPFDVMKTRMMTATPGRPISMSMVVVSILRNEGPLGLFKGAVPRFFWVAPLGAMNFAGYELAKKAMQKNEDAVLADQLGQKKLC

SEQ ID NO: 45299 - protein, 680 aa, Arabidopsis thaliana
  peptide (1)..(680): Ceres Seq. ID no. 12560626
  misc_feature (235)..(263): Pfam Name: EF hand Pfam Description: EF hand
  misc_feature (398)..(516): Homolog of NCBI NO: 25406327 NR Description: hypothetical protein F1O17.9 [imported] -
  misc_feature (518)..(659): Homolog of NCBI NO: 25406327 NR Description: hypothetical protein F1O17.9 [imported] -
  misc_feature (403)..(669): Homolog of NCBI NO: 18420458 NR Description: mitochondrial carrier protein family
  misc_feature (398)..(516): Homolog of NCBI NO: 30699000 NR Description: mitochondrial carrier protein family [Arabidopsis
  misc_feature (518)..(659): Homolog of NCBI NO: 30699000 NR Description: mitochondrial carrier protein family [Arabidopsis
  misc_feature (401)..(662): Homolog of NCBI NO: 27754081 NR Description: RIKEN cDNA 4930433D19; expressed sequence
  misc_feature (400)..(664): Homolog of NCBI NO: 18399114 NR Description: allinase, putative; protein id: At1g34065.1
  misc_feature (381)..(664): Homolog of NCBI NO: 34905862 NR Description: P0458E05.7 [Oryza sativa (japonica
  misc_feature (457)..(662): Homolog of NCBI NO: 15225292 NR Description: putative mitochondrial carrier protein; protein
  misc_feature (391)..(662): Homolog of NCBI NO: 26449572 NR Description: putative mitochondrial carrier protein
MTWSLLVSGFVHAFPIPFKIGKKRIHKMGDDENSLRKHGLKSKAAFVSRKEVRCQSVESVEKEGNPFSIECAVGFVVEMLAQNLQKLDQFIQDSSENESCCSKEASSNDSPLIFNIWEARKLDVNGFLGNLMFARVGDVASGIGGLTSHISEDGDESNVSTAGKEESAVDSPQNLATGLLSIPLSNVERLKSTLSTISLTELIELLPQLGRPSRDHPDKKKLISVQDFFRYTESEGRRFFEELDRDGDGKVTLEDLEIAMRRRKLPRRYAKEFMRRARSHLFSKSFGWKQFLSLMEQKEPTILRAYTSLCLTKSGTLKKSEILASLNNAGLPANEENAIAMMRFLKADTEESISYGHFRNFMVLLPYERLQDDPRNIWFEAATVVAVAPPVALPAGDVLKSALAGGLASALSTSLMHPIDTIKTRVQASTLSFPEVIAKLPEIGVRGVYRGSIPAILGQFSSHGLRTGIFEASKLVLINFAPNLPEIQVQSIASFCSTLLGTAVRIPCEVLKQRLQAGMFNNVGEAIVGTWKQDGPSGFFRGTGATLCREVPLYVVGMGLYAESKKMVAQALGRELEAWETIAVGAVSGGIAAVVTTPFDVMKTRMMTATPGRPISMSMVVVSILRNEGPLGLFKGAVPRFFWVAPLGAMNFAGYELAKKAMQKNEDAVLADQLGQKKLC

SEQ ID NO: 45300 - DNA, 2033 bp, Arabidopsis thaliana
  misc_feature (1)..(2033): Ceres Seq. ID no. 12601578
  misc_feature: MA Experiment ID: 20000173 Result: Down-regulated in Transcription
  misc_feature: MA Experiment 20000173 PARAMETER Experiment Name: At_42deg_Heat_P Parameter: Age (day) Value: 14
  misc_feature: MA Experiment 20000173 PARAMETER Experiment Name: At_42deg_Heat_P Parameter: Organism Value: A. thaliana
  misc_feature: MA Experiment 20000173 PARAMETER Experiment Name: At_42deg_Heat_P Parameter: Plant Line Value: WS
  misc_feature: MA Experiment 20000173 PARAMETER Experiment Name: At_42deg_Heat_P Parameter: Temperature (deg C) Value: 42 vs. 22
  misc_feature: MA Experiment 20000173 PARAMETER Experiment Name: At_42deg_Heat_P Parameter: Timepoint (hr) Value: 6
  misc_feature: MA Experiment 20000173 PARAMETER Experiment Name: At_42deg_Heat_P Parameter: Tissue Value: Aerial
aaaaaaaaaaaaaaaacgctcgcctacttctcttctctctcaccatagagatagtttcaagctccaaaagttcttcaatcagattctggaaactaggttgttggtagaagttatggtgagaaatgaagcttagattgagatttaagttatgggttgtgtatttggccgagaggcggcgacaacaacaacagctgaagctaaacaagctaagagctctaaagctagtagtggagtagtagtagtaggagagagtagtgtgactaagagtaatggagttattgctgatgatgtagagaagaagaagaatgaggaggcaaatggtgataaagaaaggaaatcatccaaaggagatcgaagaaggtcgacaaagccgaatccgcggttgagtaatccttccaagcattggcgtggtgaacaggttgctgctggttggccttcttggctttctgatgcttgtggtgaagctttaaatggttgggttcctagaaaggctgatacttttgagaaaattgataagattggacaaggaacatatagtaatgtgtacaaagctaaggatatgttgaccggtaaaatcgttgcgttgaagaaggttcggtttgataacttggagccggaaagtgtgaagtttatggcgagagagattcttgtgttgcggagacttgatcatcctaatgttgtgaagttggaaggtttggttacgtcaagaatgtcttgtagcttataccttgtatttcaatacatggatcatgatttggctggtcttgcttcaagtcctgttgttaagttctcagaatcagaggttaaatgtttgatgcgtcagttgatatctggtttggagcattgtcatagtcgtggtgtacttcatcgtgacatcaaaggatcaaatcttcttattgatgatggtggggtcctaaagattgctgattttggactcgcaacgatttttgatcctaatcacaagcggccaatgactagtcgagtggttacactatggtatcgagctccagagcttctgcttggggctactgattatggtgtaggtattgatctttggagtgccggctgtattttagctgagctattggcgggaagacctattatgcccggtcggacagaggtagagcagctacataagatttacaagctgtgtggttcaccatcagaggattattggaaaaaagggaaattcacacatggagccatatacaaaccccgtgaaccatacaaaagaagcataagagagacatttaaagattttccaccatcatctcttccgctcattgacgctcttctttcaatcgagccagaagaccgccaaactgcatctgctgctttaaaaagtgaattctttacaagtgaaccatatgcctgtgaacctgctgatctgccaaagtatcccccgagcaaagaaattgatgcaaagcgacgagatgaagaaactcggagacaaagagctgctagtaaagcccaaggggatggtgcaaggaagaatcggcacagagatcgttcaaatcgagctcttccagctcctgaagctaatgcagaacttcagtcaaatgtcgatagaaggagattaatcacacacgcaaatgcaaagagcaagagcgagaagtttccgccaccacaccaagatggtggagcaatgggtgtaccattgggtgcctcacagcatatagacccgacatttatcccacgagatatggtcccatccttcacatcctcttctttcaatttttccaaagacgaaccaccaacacaagtccagacgtggtcaggtcctctgggtcatccaatcacaggcgtttcaagaaagaagaaagataacaccaaaagcagtaaaggaaagagagcagtagtggcctgagaagagaaagtgtttactacttcatgtataacaatgtaagtgtttaccctctattctttgtggcttcctctaagagaaaatgttttaattcttttcaaatttgcgtagactttcatgtatttgtaactatatatttattatatatatacactacttcttttgttgc

SEQ ID NO: 45301 - protein, 572 aa, Arabidopsis thaliana
  peptide (1)..(572): Ceres Seq. ID no. 12601579
  misc_feature (118)..(402): Pfam Name: Protein kinase domain Pfam Description: Protein kinase domain
  misc_feature (46)..(504): Homolog of NCBI NO: 25402555 NR Description: hypothetical protein [imported] - Arabidopsis
  misc_feature (46)..(504): Homolog of NCBI NO: 15217565 NR Description: putative protein kinase; protein id: At1g09600.1
  misc_feature (1)..(516): Homolog of NCBI NO: 28393523 NR Description: putative cell division-related protein
  misc_feature (1)..(516): Homolog of NCBI NO: 15219169 NR Description: cell division-related protein, putative; protein
  misc_feature (1)..(504): Homolog of NCBI NO: 26449319 NR Description: putative cyclin-dependent protein kinase
  misc_feature (1)..(504): Homolog of NCBI NO: 15241289 NR Description: cyclin-dependent protein kinase-like; protein id:
  misc_feature (19)..(571): Homolog of NCBI NO: 15229881 NR Description: putative cyclin-dependent protein kinase
  misc_feature (1)..(565): Homolog of NCBI NO: 34899282 NR Description: putative CRK1 protein(cdc2-related kinase 1)
  misc_feature (39)..(570): Homolog of NCBI NO: 7671528 NR Description: CRK1 protein [Beta vulgaris]
  misc_feature (1)..(572): Homolog of NCBI NO: 15221868 NR Description: CRK1 protein, putative
MGCVFGREAATTTTAEAKQAKSSKASSGVVVVGESSVTKSNGVIADDVEKKKNEEANGDKERKSSKGDRRRSTKPNPRLSNPSKHWRGEQVAAGWPSWLSDACGEALNGWVPRKADTFEKIDKIGQGTYSNVYKAKDMLTGKIVALKKVRFDNLEPESVKFMAREILVLRRLDHPNVVKLEGLVTSRMSCSLYLVFQYMDHDLAGLASSPVVKFSESEVKCLMRQLISGLEHCHSRGVLHRDIKGSNLLIDDGGVLKIADFGLATIFDPNHKRPMTSRVVTLWYRAPELLLGATDYGVGIDLWSAGCILAELLAGRPIMPGRTEVEQLHKIYKLCGSPSEDYWKKGKFTHGAIYKPREPYKRSIRETFKDFPPSSLPLIDALLSIEPEDRQTASAALKSEFFTSEPYACEPADLPKYPPSKEIDAKRRDEETRRQRAASKAQGDGARKNRHRDRSNRALPAPEANAELQSNVDRRRLITHANAKSKSEKFPPPHQDGGAMGVPLGASQHIDPTFIPRDMVPSFTSSSFNFSKDEPPTQVQTWSGPLGHPITGVSRKKKDNTKSSKGKRAVVA

SEQ ID NO: 45302 - protein, 435 aa, Arabidopsis thaliana
  peptide (1)..(435): Ceres Seq. ID no. 12601580
  misc_feature (1)..(265): Pfam Name: Protein kinase domain Pfam Description: Protein kinase domain
  misc_feature (1)..(367): Homolog of NCBI NO: 25402555 NR Description: hypothetical protein [imported] - Arabidopsis
  misc_feature (1)..(367): Homolog of NCBI NO: 15217565 NR Description: putative protein kinase; protein id: At1g09600.1
  misc_feature (1)..(379): Homolog of NCBI NO: 28393523 NR Description: putative cell division-related protein
  misc_feature (1)..(379): Homolog of NCBI NO: 15219169 NR Description: cell division-related protein, putative; protein
  misc_feature (1)..(367): Homolog of NCBI NO: 26449319 NR Description: putative cyclin-dependent protein kinase
  misc_feature (1)..(367): Homolog of NCBI NO: 15241289 NR Description: cyclin-dependent protein kinase-like; protein id:
  misc_feature (1)..(434): Homolog of NCBI NO: 15229881 NR Description: putative cyclin-dependent protein kinase
  misc_feature (1)..(428): Homolog of NCBI NO: 34899282 NR Description: putative CRK1 protein(cdc2-related kinase 1)
  misc_feature (1)..(433): Homolog of NCBI NO: 7671528 NR Description: CRK1 protein [Beta vulgaris]
  misc_feature (1)..(435): Homolog of NCBI NO: 15221868 NR Description: CRK1 protein, putative
MLTGKIVALKKVRFDNLEPESVKFMAREILVLRRLDHPNVVKLEGLVTSRMSCSLYLVFQYMDHDLAGLASSPVVKFSESEVKCLMRQLISGLEHCHSRGVLHRDIKGSNLLIDDGGVLKIADFGLATIFDPNHKRPMTSRVVTLWYRAPELLLGATDYGVGIDLWSAGCILAELLAGRPIMPGRTEVEQLHKIYKLCGSPSEDYWKKGKFTHGAIYKPREPYKRSIRETFKDFPPSSLPLIDALLSIEPEDRQTASAALKSEFFTSEPYACEPADLPKYPPSKEIDAKRRDEETRRQRAASKAQGDGARKNRHRDRSNRALPAPEANAELQSNVDRRRLITHANAKSKSEKFPPPHQDGGAMGVPLGASQHIDPTFIPRDMVPSFTSSSFNFSKDEPPTQVQTWSGPLGHPITGVSRKKKDNTKSSKGKRAVVA

SEQ ID NO: 45303 - protein, 411 aa, Arabidopsis thaliana
  peptide (1)..(411): Ceres Seq. ID no. 12601581
  misc_feature (1)..(241): Pfam Name: Protein kinase domain Pfam Description: Protein kinase domain
  misc_feature (1)..(343): Homolog of NCBI NO: 25402555 NR Description: hypothetical protein [imported] - Arabidopsis
  misc_feature (1)..(343): Homolog of NCBI NO: 15217565 NR Description: putative protein kinase; protein id: At1g09600.1
  misc_feature (1)..(355): Homolog of NCBI NO: 28393523 NR Description: putative cell division-related protein
  misc_feature (1)..(355): Homolog of NCBI NO: 15219169 NR Description: cell division-related protein, putative; protein
  misc_feature (1)..(343): Homolog of NCBI NO: 26449319 NR Description: putative cyclin-dependent protein kinase
  misc_feature (1)..(343): Homolog of NCBI NO: 15241289 NR Description: cyclin-dependent protein kinase-like; protein id:
  misc_feature (1)..(410): Homolog of NCBI NO: 15229881 NR Description: putative cyclin-dependent protein kinase
  misc_feature (1)..(404): Homolog of NCBI NO: 34899282 NR Description: putative CRK1 protein(cdc2-related kinase 1)
  misc_feature (1)..(409): Homolog of NCBI NO: 7671528 NR Description: CRK1 protein [Beta vulgaris]
  misc_feature (1)..(411): Homolog of NCBI NO: 15221868 NR Description: CRK1 protein, putative
MAREILVLRRLDHPNVVKLEGLVTSRMSCSLYLVFQYMDHDLAGLASSPVVKFSESEVKCLMRQLISGLEHCHSRGVLHRDIKGSNLLIDDGGVLKIADFGLATIFDPNHKRPMTSRVVTLWYRAPELLLGATDYGVGIDLWSAGCILAELLAGRPIMPGRTEVEQLHKIYKLCGSPSEDYWKKGKFTHGAIYKPREPYKRSIRETFKDFPPSSLPLIDALLSIEPEDRQTASAALKSEFFTSEPYACEPADLPKYPPSKEIDAKRRDEETRRQRAASKAQGDGARKNRHRDRSNRALPAPEANAELQSNVDRRRLITHANAKSKSEKFPPPHQDGGAMGVPLGASQHIDPTFIPRDMVPSFTSSSFNFSKDEPPTQVQTWSGPLGHPITGVSRKKKDNTKSSKGKRAVVA

SEQ ID NO: 45304 - DNA, 2389 bp, Arabidopsis thaliana; identical to SEQ ID NO: 43744
  misc_feature (1)..(2389): Ceres Seq. ID no. 13591580
  misc_feature: MA Experiment ID: 108434 Result: Up-regulated in Transcription
  misc_feature: MA Experiment 108434 PARAMETER Experiment Name: At_Root_Tips_cDNA_P Parameter: Tissue Value: Root Tips
  misc_feature: MA Experiment ID: 108463 Result: Down-regulated in Transcription
  misc_feature: MA Experiment 108463 PARAMETER Experiment Name: At_Germinating_Seeds_cDNA_P Parameter: Age (day) Value: 3 vs. 0
  misc_feature: MA Experiment 108463 PARAMETER Experiment Name: At_Germinating_Seeds_cDNA_P Parameter: Tissue Value: Germinating Seeds
  misc_feature: MA Experiment ID: 108469 Result: Up-regulated in Transcription
  misc_feature: MA Experiment ID: 108573 Result: Down-regulated in Transcription
  misc_feature: MA Experiment 108573 PARAMETER Experiment Name: At_Drought_cDNA_P Parameter: Timepoint (hr) Value: 6
  misc_feature: MA Experiment 108573 PARAMETER Experiment Name: At_Drought_cDNA_P Parameter: Tissue Value: Aerial
  misc_feature: MA Experiment 108573 PARAMETER Experiment Name: At_Drought_cDNA_P Parameter: Treatment Value: Drought vs. No Drought
  misc_feature: MA Experiment ID: 108576 Result: Up-regulated in Transcription
  misc_feature: MA Experiment 108576 PARAMETER Experiment Name: At_42deg_Heat_cDNA_P Parameter: Temperature (deg C) Value: 42 vs. 22
  misc_feature: MA Experiment 108576 PARAMETER Experiment Name: At_42deg_Heat_cDNA_P Parameter: Timepoint (hr) Value: 1
  misc_feature: MA Experiment 108576 PARAMETER Experiment Name: At_42deg_Heat_cDNA_P Parameter: Tissue Value: Aerial
  misc_feature: MA Experiment ID: 108577 Result: Up-regulated in Transcription
  misc_feature: MA Experiment 108577 PARAMETER Experiment Name: At_42deg_Heat_cDNA_P Parameter: Temperature (deg C) Value: 42 vs. 22
  misc_feature: MA Experiment 108577 PARAMETER Experiment Name: At_42deg_Heat_cDNA_P Parameter: Timepoint (hr) Value: 6
  misc_feature: MA Experiment 108577 PARAMETER Experiment Name: At_42deg_Heat_cDNA_P Parameter: Tissue Value: Aerial
  misc_feature: MA Experiment ID: 108595 Result: Up-regulated in Transcription
  misc_feature: MA Experiment 108595 PARAMETER Experiment Name: At_Ler-pi_Ovule_cDNA_P Parameter: Plant Line Value: null
  misc_feature: MA Experiment ID: 108668 Result: Up-regulated in Transcription
  misc_feature: MA Experiment 108668 PARAMETER Experiment Name: At_2mM_SA_cDNA_P Parameter: Plant Line Value: WS
  misc_feature: MA Experiment 108668 PARAMETER Experiment Name: At_2mM_SA_cDNA_P Parameter: Timepoint (hr) Value: 6
  misc_feature: MA Experiment 108668 PARAMETER Experiment Name: At_2mM_SA_cDNA_P Parameter: Treatment Value: 2mM SA vs. No Treatment
  misc_feature: MA Experiment ID: 20000086 Result: Up-regulated in Transcription
  misc_feature: MA Experiment 20000086 PARAMETER Experiment Name: At_100uM_ABA_Mutants_cDNA_P Parameter: Plant Line Value: CS22
  misc_feature: MA Experiment 20000086 PARAMETER Experiment Name: At_100uM_ABA_Mutants_cDNA_P Parameter: Timepoint (hr) Value: 6
  misc_feature: MA Experiment 20000086 PARAMETER Experiment Name: At_100uM_ABA_Mutants_cDNA_P Parameter: Tissue Value: Aerial
  misc_feature: MA Experiment 20000086 PARAMETER Experiment Name: At_100uM_ABA_Mutants_cDNA_P Parameter: Treatment Value: 100uM ABA vs. No Treatment
  misc_feature: MA Experiment ID: 20000089 Result: Up-regulated in Transcription
  misc_feature: MA Experiment ID: 20000090 Result: Up-regulated in Transcription
  misc_feature: MA Experiment ID: 20000093 Result: Up-regulated in Transcription
  misc_feature: MA Experiment 20000093 PARAMETER Experiment Name: At_42deg_Heat_cDNA_P Parameter: Temperature (deg C) Value: 42 vs. 22
  misc_feature: MA Experiment 20000093 PARAMETER Experiment Name: At_42deg_Heat_cDNA_P Parameter: Timepoint (hr) Value: 0.5
  misc_feature: MA Experiment 20000093 PARAMETER Experiment Name: At_42deg_Heat_cDNA_P Parameter: Tissue Value: Aerial
  misc_feature: MA Experiment ID: 20000111 Result: Up-regulated in Transcription
  misc_feature: MA Experiment 20000111 PARAMETER Experiment Name: At_42deg_Heat_cDNA_P Parameter: Temperature (deg C) Value: 42 vs. 22
  misc_feature: MA Experiment 20000111 PARAMETER Experiment Name: At_42deg_Heat_cDNA_P Parameter: Timepoint (hr) Value: 6
  misc_feature: MA Experiment 20000111 PARAMETER Experiment Name: At_42deg_Heat_cDNA_P Parameter: Tissue Value: Aerial
  misc_feature: MA Experiment ID: 20000112 Result: Up-regulated in Transcription
  misc_feature: MA Experiment 20000112 PARAMETER Experiment Name: At_42deg_Heat_cDNA_P Parameter: Temperature (deg C) Value: 42 vs. 22
  misc_feature: MA Experiment 20000112 PARAMETER Experiment Name: At_42deg_Heat_cDNA_P Parameter: Timepoint (hr) Value: 2
  misc_feature: MA Experiment 20000112 PARAMETER Experiment Name: At_42deg_Heat_cDNA_P Parameter: Tissue Value: Aerial
  misc_feature: MA Experiment ID: 20000171 Result: Up-regulated in Transcription
  misc_feature: MA Experiment 20000171 PARAMETER Experiment Name: At_42deg_Heat_P Parameter: Age (day) Value: 14
  misc_feature: MA Experiment 20000171 PARAMETER Experiment Name: At_42deg_Heat_P Parameter: Organism Value: A. thaliana
  misc_feature: MA Experiment 20000171 PARAMETER Experiment Name: At_42deg_Heat_P Parameter: Plant Line Value: WS
  misc_feature: MA Experiment 20000171 PARAMETER Experiment Name: At_42deg_Heat_P Parameter: Temperature (deg C) Value: 42 vs. 22
  misc_feature: MA Experiment 20000171 PARAMETER Experiment Name: At_42deg_Heat_P Parameter: Timepoint (hr) Value: 1
  misc_feature: MA Experiment 20000171 PARAMETER Experiment Name: At_42deg_Heat_P Parameter: Tissue Value: Aerial
  misc_feature: MA Experiment ID: 20000173 Result: Up-regulated in Transcription
  misc_feature: MA Experiment 20000173 PARAMETER Experiment Name: At_42deg_Heat_P Parameter: Age (day) Value: 14
  misc_feature: MA Experiment 20000173 PARAMETER Experiment Name: At_42deg_Heat_P Parameter: Organism Value: A. thaliana
  misc_feature: MA Experiment 20000173 PARAMETER Experiment Name: At_42deg_Heat_P Parameter: Plant Line Value: WS
  misc_feature: MA Experiment 20000173 PARAMETER Experiment Name: At_42deg_Heat_P Parameter: Temperature (deg C) Value: 42 vs. 22
  misc_feature: MA Experiment 20000173 PARAMETER Experiment Name: At_42deg_Heat_P Parameter: Timepoint (hr) Value: 6
  misc_feature: MA Experiment 20000173 PARAMETER Experiment Name: At_42deg_Heat_P Parameter: Tissue Value: Aerial
  misc_feature: MA Experiment ID: 20000179 Result: Up-regulated in Transcription
  misc_feature: MA Experiment 20000179 PARAMETER Experiment Name: At_Germinating_Seeds_P Parameter: Age (hr) Value: 6 vs. 0
  misc_feature: MA Experiment 20000179 PARAMETER Experiment Name: At_Germinating_Seeds_P Parameter: Tissue Value: Germinating Seeds
  misc_feature: MA Experiment ID: 20000182 Result: Up-regulated in Transcription
  misc_feature: MA Experiment 20000182 PARAMETER Experiment Name: At_2mM_SA_P Parameter: Age (day) Value: 14
  misc_feature: MA Experiment 20000182 PARAMETER Experiment Name: At_2mM_SA_P Parameter: Organism Value: A. thaliana
  misc_feature: MA Experiment 20000182 PARAMETER Experiment Name: At_2mM_SA_P Parameter: Plant Line Value: WS
  misc_feature: MA Experiment 20000182 PARAMETER Experiment Name: At_2mM_SA_P Parameter: Timepoint (hr) Value: 6
  misc_feature: MA Experiment 20000182 PARAMETER Experiment Name: At_2mM_SA_P Parameter: Tissue Value: Aerial
  misc_feature: MA Experiment 20000182 PARAMETER Experiment Name: At_2mM_SA_P Parameter: Treatment Value: 2mM SA vs. No Treatment
  misc_feature: MA Experiment ID: 20000224 Result: Up-regulated in Transcription
  misc_feature: MA Experiment ID: 20000227 Result: Up-regulated in Transcription
  misc_feature: MA Experiment 20000227 PARAMETER Experiment Name: At_Root-Tips-vs-Tops_P Parameter: Tissue Value: Root Tips vs. Root Tops
  misc_feature: MA Experiment ID: 20000234 Result: Up-regulated in Transcription
  misc_feature: MA Experiment 20000234 PARAMETER Experiment Name: At_Siliques_P Parameter: Age (day) Value: 21
  misc_feature: MA Experiment 20000234 PARAMETER Experiment Name: At_Siliques_P Parameter: Organism Value: A. thaliana
  misc_feature: MA Experiment 20000234 PARAMETER Experiment Name: At_Siliques_P Parameter: Plant Line Value: WS
  misc_feature: MA Experiment 20000234 PARAMETER Experiment Name: At_Siliques_P Parameter: Tissue Value: Less Than 5mm Siliques vs. Whole Plant
  misc_feature: MA Experiment ID: 20000235 Result: Up-regulated in Transcription
  misc_feature: MA Experiment 20000235 PARAMETER Experiment Name: At_Siliques_P Parameter: Age (day) Value: 21
  misc_feature: MA Experiment 20000235 PARAMETER Experiment Name: At_Siliques_P Parameter: Organism Value: A. thaliana
  misc_feature: MA Experiment 20000235 PARAMETER Experiment Name: At_Siliques_P Parameter: Plant Line Value: WS
  misc_feature: MA Experiment 20000235 PARAMETER Experiment Name: At_Siliques_P Parameter: Tissue Value: 5-10mm Siliques vs. Whole Plant
  misc_feature: MA Experiment ID: 20000495 Result: Up-regulated in Transcription
  misc_feature: MA Experiment 20000495 PARAMETER Experiment Name: At_Guard_Cells_P Parameter: Harvest Date Value: 8/2/2002
  misc_feature: MA Experiment 20000495 PARAMETER Experiment Name: At_Guard_Cells_P Parameter: Organism Value: A. thaliana
  misc_feature: MA Experiment 20000495 PARAMETER Experiment Name: At_Guard_Cells_P Parameter: Tissue Value: Guard Cells vs. Leaves
  misc_feature: MA Experiment ID: 20000794 Result: Down-regulated in Transcription
  misc_feature: MA Experiment 20000794 PARAMETER Experiment Name: At_Petals_P Parameter: Age (day) Value: 23-25 days
  misc_feature: MA Experiment 20000794 PARAMETER Experiment Name: At_Petals_P Parameter: Plant Line Value: WS
  misc_feature: MA Experiment 20000794 PARAMETER Experiment Name: At_Petals_P Parameter: Tissue Value: Petals vs. Whole plant
  misc_feature: MA Experiment ID: 20001450 Result: Down-regulated in Transcription
  misc_feature: MA Experiment 20001450 PARAMETER Experiment Name: At_Far-red-induction_P Parameter: Age (day) Value: 7
  misc_feature: MA Experiment 20001450 PARAMETER Experiment Name: At_Far-red-induction_P Parameter: Light Value: Far-red vs. White
  misc_feature: MA Experiment 20001450 PARAMETER Experiment Name: At_Far-red-induction_P Parameter: Organism Value: A. thaliana
  misc_feature: MA Experiment 20001450 PARAMETER Experiment Name: At_Far-red-induction_P Parameter: Plant Line Value: Columbia
  misc_feature: MA Experiment 20001450 PARAMETER Experiment Name: At_Far-red-induction_P Parameter: Timepoint (hr) Value: 8
  misc_feature: MA Experiment 20001450 PARAMETER Experiment Name: At_Far-red-induction_P Parameter: Tissue Value: Whole Plant
  misc_feature: MA Experiment ID: 20001556 Result: Up-regulated in Transcription
  misc_feature: MA Experiment 20001556 PARAMETER Experiment Name: At_Drought_Soil_Dry_P Parameter: Age (day) Value: 26
  misc_feature: MA Experiment 20001556 PARAMETER Experiment Name: At_Drought_Soil_Dry_P Parameter: Organism Value: A. thaliana
  misc_feature: MA Experiment 20001556 PARAMETER Experiment Name: At_Drought_Soil_Dry_P Parameter: Plant Line Value: WS
  misc_feature: MA Experiment 20001556 PARAMETER Experiment Name: At_Drought_Soil_Dry_P Parameter: Post Timepoint (hr) Value: None
  misc_feature: MA Experiment 20001556 PARAMETER Experiment Name: At_Drought_Soil_Dry_P Parameter: Post-Treatment Value: None
  misc_feature: MA Experiment 20001556 PARAMETER Experiment Name: At_Drought_Soil_Dry_P Parameter: Timepoint (day) Value: 12
  misc_feature: MA Experiment 20001556 PARAMETER Experiment Name: At_Drought_Soil_Dry_P Parameter: Treatment Value: Drought vs. No Drought
  misc_feature: MA Experiment ID: 20001558 Result: Up-regulated in Transcription
  misc_feature: MA Experiment 20001558 PARAMETER Experiment Name: At_Drought_Soil_Dry_P Parameter: Age (day) Value: 27
  misc_feature: MA Experiment 20001558 PARAMETER Experiment Name: At_Drought_Soil_Dry_P Parameter: Organism Value: A. thaliana
  misc_feature: MA Experiment 20001558 PARAMETER Experiment Name: At_Drought_Soil_Dry_P Parameter: Plant Line Value: WS
  misc_feature: MA Experiment 20001558 PARAMETER Experiment Name: At_Drought_Soil_Dry_P Parameter: Post Timepoint (hr) Value: 6
  misc_feature: MA Experiment 20001558 PARAMETER Experiment Name: At_Drought_Soil_Dry_P Parameter: Post-Treatment Value: Re-Water vs. No Drought
  misc_feature: MA Experiment 20001558 PARAMETER Experiment Name: At_Drought_Soil_Dry_P Parameter: Timepoint (day) Value: 13
  misc_feature: MA Experiment 20001558 PARAMETER Experiment Name: At_Drought_Soil_Dry_P Parameter: Treatment Value: Drought vs. No Drought
  misc_feature: MA Experiment ID: 20001560 Result: Up-regulated in Transcription
  misc_feature: MA Experiment 20001560 PARAMETER Experiment Name: At_Drought_Soil_Dry_P Parameter: Age (day) Value: 28
  misc_feature: MA Experiment 20001560 PARAMETER Experiment Name: At_Drought_Soil_Dry_P Parameter: Organism Value: A. thaliana
  misc_feature: MA Experiment 20001560 PARAMETER Experiment Name: At_Drought_Soil_Dry_P Parameter: Plant Line Value: WS
  misc_feature: MA Experiment 20001560 PARAMETER Experiment Name: At_Drought_Soil_Dry_P Parameter: Post Timepoint (hr) Value: None
  misc_feature: MA Experiment 20001560 PARAMETER Experiment Name: At_Drought_Soil_Dry_P Parameter: Post-Treatment Value: None
  misc_feature: MA Experiment 20001560 PARAMETER Experiment Name: At_Drought_Soil_Dry_P Parameter: Timepoint (day) Value: 14
  misc_feature: MA Experiment 20001560 PARAMETER Experiment Name: At_Drought_Soil_Dry_P Parameter: Treatment Value: Drought vs. No Drought

SEQ ID NO: 45305 - protein, 669 aa, Arabidopsis thaliana; identical to SEQ ID NO: 25857
  peptide (1)..(669): Ceres Seq. ID no. 15221053
  misc_feature (34)..(655): Homolog of NCBI NO: 14423732 NR Description: Heat shock 70 kDa protein
  misc_feature (35)..(656): Homolog of NCBI NO: 21263753 NR Description: Heat shock cognate 71 kDa protein (Hsc70.1)
  misc_feature (199)..(669): Homolog of NCBI NO: 168424 NR Description: polypeptide chain-binding protein
  misc_feature (15)..(669): Homolog of NCBI NO: 23480384 NR Description: heat shock protein [Plasmodium yoelii yoelii]
  misc_feature (35)..(669): Homolog of NCBI NO: 29539338 NR Description: Heat shock 70 kDa protein [Cyanidioschyzon
  misc_feature (37)..(669): Homolog of NCBI NO: 1037176 NR Description: immunoglobulin heavy chain binding protein
  misc_feature (1)..(664): Homolog of NCBI NO: 13897312 NR Description: luminal binding protein, BiP [Scherffelia dubia]
  misc_feature (34)..(655): Homolog of NCBI NO: 14423732 NR Description: Heat shock 70 kDa protein
  misc_feature (35)..(656): Homolog of NCBI NO: 21263753 NR Description: Heat shock cognate 71 kDa protein (Hsc70.1)
  misc_feature (199)..(669): Homolog of NCBI NO: 168424 NR Description: polypeptide chain-binding protein
  misc_feature (15)..(669): Homolog of NCBI NO: 23480384 NR Description: heat shock protein [Plasmodium yoelii yoelii]
  misc_feature (35)..(669): Homolog of NCBI NO: 29539338 NR Description: Heat shock 70 kDa protein [Cyanidioschyzon
  misc_feature (37)..(669): Homolog of NCBI NO: 1037176 NR Description: immunoglobulin heavy chain binding protein
  misc_feature (1)..(664): Homolog of NCBI NO: 13897312 NR Description: luminal binding protein, BiP [Scherffelia dubia]
  misc_feature (34)..(655): Homolog of NCBI NO: 14423732 NR Description: Heat shock 70 kDa protein
  misc_feature (35)..(656): Homolog of NCBI NO: 21263753 NR Description: Heat shock cognate 71 kDa protein (Hsc70.1)
  misc_feature (199)..(669): Homolog of NCBI NO: 168424 NR Description: polypeptide chain-binding protein
  misc_feature (15)..(669): Homolog of NCBI NO: 23480384 NR Description: heat shock protein [Plasmodium yoelii yoelii]
  misc_feature (35)..(669): Homolog of NCBI NO: 29539338 NR Description: Heat shock 70 kDa protein [Cyanidioschyzon
  misc_feature (37)..(669): Homolog of NCBI NO: 1037176 NR Description: immunoglobulin heavy chain binding protein
  misc_feature (1)..(664): Homolog of NCBI NO: 13897312 NR Description: luminal binding protein, BiP [Scherffelia dubia]
  misc_feature (34)..(655): Homolog of NCBI NO: 14423732 NR Description: Heat shock 70 kDa protein
  misc_feature (35)..(656): Homolog of NCBI NO: 21263753 NR Description: Heat shock cognate 71 kDa protein (Hsc70.1)
  misc_feature (199)..(669): Homolog of NCBI NO: 168424 NR Description: polypeptide chain-binding protein
  misc_feature (15)..(669): Homolog of NCBI NO: 23480384 NR Description: heat shock protein [Plasmodium yoelii yoelii]
  misc_feature (35)..(669): Homolog of NCBI NO: 29539338 NR Description: Heat shock 70 kDa protein [Cyanidioschyzon
  misc_feature (37)..(669): Homolog of NCBI NO: 1037176 NR Description: immunoglobulin heavy chain binding protein
  misc_feature (1)..(664): Homolog of NCBI NO: 13897312 NR Description: luminal binding protein, BiP [Scherffelia dubia]
  misc_feature (34)..(655): Homolog of NCBI NO: 14423732 NR Description: Heat shock 70 kDa protein
  misc_feature (35)..(656): Homolog of NCBI NO: 21263753 NR Description: Heat shock cognate 71 kDa protein (Hsc70.1)
  misc_feature (199)..(669): Homolog of NCBI NO: 168424 NR Description: polypeptide chain-binding protein
  misc_feature (15)..(669): Homolog of NCBI NO: 23480384 NR Description: heat shock protein [Plasmodium yoelii yoelii]
  misc_feature (35)..(669): Homolog of NCBI NO: 29539338 NR Description: Heat shock 70 kDa protein [Cyanidioschyzon
  misc_feature (37)..(669): Homolog of NCBI NO: 1037176 NR Description: immunoglobulin heavy chain binding protein
  misc_feature (1)..(664): Homolog of NCBI NO: 13897312 NR Description: luminal binding protein, BiP [Scherffelia dubia]

SEQ ID NO: 45306 - protein, 516 aa, Arabidopsis thaliana; identical to SEQ ID NO: 25858
  peptide (1)..(516): Ceres Seq. ID no. 15221054
  misc_feature (1)..(502): Homolog of NCBI NO: 14423732 NR Description: Heat shock 70 kDa protein
  misc_feature (1)..(503): Homolog of NCBI NO: 21263753 NR Description: Heat shock cognate 71 kDa protein (Hsc70.1)
  misc_feature (46)..(516): Homolog of NCBI NO: 168424 NR Description: polypeptide chain-binding protein
  misc_feature (1)..(516): Homolog of NCBI NO: 23480384 NR Description: heat shock protein [Plasmodium yoelii yoelii]
  misc_feature (1)..(516): Homolog of NCBI NO: 29539338 NR Description: Heat shock 70 kDa protein [Cyanidioschyzon
  misc_feature (1)..(516): Homolog of NCBI NO: 1037176 NR Description: immunoglobulin heavy chain binding protein
  misc_feature (1)..(511): Homolog of NCBI NO: 13897312 NR Description: luminal binding protein, BiP [Scherffelia dubia]
  misc_feature (1)..(502): Homolog of NCBI NO: 14423732 NR Description: Heat shock 70 kDa protein
  misc_feature (1)..(503): Homolog of NCBI NO: 21263753 NR Description: Heat shock cognate 71 kDa protein (Hsc70.1)
  misc_feature (46)..(516): Homolog of NCBI NO: 168424 NR Description: polypeptide chain-binding protein
  misc_feature (1)..(516): Homolog of NCBI NO: 23480384 NR Description: heat shock protein [Plasmodium yoelii yoelii]
  misc_feature (1)..(516): Homolog of NCBI NO: 29539338 NR Description: Heat shock 70 kDa protein [Cyanidioschyzon
  misc_feature (1)..(516): Homolog of NCBI NO: 1037176 NR Description: immunoglobulin heavy chain binding protein
  misc_feature (1)..(511): Homolog of NCBI NO: 13897312 NR Description: luminal binding protein, BiP [Scherffelia dubia]
  misc_feature (1)..(502): Homolog of NCBI NO: 14423732 NR Description: Heat shock 70 kDa protein
  misc_feature (1)..(503): Homolog of NCBI NO: 21263753 NR Description: Heat shock cognate 71 kDa protein (Hsc70.1)
  misc_feature (46)..(516): Homolog of NCBI NO: 168424 NR Description: polypeptide chain-binding protein
  misc_feature (1)..(516): Homolog of NCBI NO: 23480384 NR Description: heat shock protein [Plasmodium yoelii yoelii]
  misc_feature (1)..(516): Homolog of NCBI NO: 29539338 NR Description: Heat shock 70 kDa protein [Cyanidioschyzon
  misc_feature (1)..(516): Homolog of NCBI NO: 1037176 NR Description: immunoglobulin heavy chain binding protein
  misc_feature (1)..(511): Homolog of NCBI NO: 13897312 NR Description: luminal binding protein, BiP [Scherffelia dubia]
  misc_feature (1)..(502): Homolog of NCBI NO: 14423732 NR Description: Heat shock 70 kDa protein
  misc_feature (1)..(503): Homolog of NCBI NO: 21263753 NR Description: Heat shock cognate 71 kDa protein (Hsc70.1)
  misc_feature (46)..(516): Homolog of NCBI NO: 168424 NR Description: polypeptide chain-binding protein
  misc_feature (1)..(516): Homolog of NCBI NO: 23480384 NR Description: heat shock protein [Plasmodium yoelii yoelii]
  misc_feature (1)..(516): Homolog of NCBI NO: 29539338 NR Description: Heat shock 70 kDa protein [Cyanidioschyzon
  misc_feature (1)..(516): Homolog of NCBI NO: 1037176 NR Description: immunoglobulin heavy chain binding protein
  misc_feature (1)..(511): Homolog of NCBI NO: 13897312 NR Description: luminal binding protein, BiP [Scherffelia dubia]
  misc_feature (1)..(502): Homolog of NCBI NO: 14423732 NR Description: Heat shock 70 kDa protein
  misc_feature (1)..(503): Homolog of NCBI NO: 21263753 NR Description: Heat shock cognate 71 kDa protein (Hsc70.1)
  misc_feature (46)..(516): Homolog of NCBI NO: 168424 NR Description: polypeptide chain-binding protein
  misc_feature (1)..(516): Homolog of NCBI NO: 23480384 NR Description: heat shock protein [Plasmodium yoelii yoelii]
  misc_feature (1)..(516): Homolog of NCBI NO: 29539338 NR Description: Heat shock 70 kDa protein [Cyanidioschyzon
  misc_feature (1)..(516): Homolog of NCBI NO: 1037176 NR Description: immunoglobulin heavy chain binding protein
  misc_feature (1)..(511): Homolog of NCBI NO: 13897312 NR Description: luminal binding protein, BiP [Scherffelia dubia]

SEQ ID NO: 45307 - protein, 511 aa, Arabidopsis thaliana; identical to SEQ ID NO: 43747
  peptide (1)..(511): Ceres Seq. ID no. 15221055
  misc_feature (1)..(497): Homolog of NCBI NO: 14423732 NR Description: Heat shock 70 kDa protein
  misc_feature (1)..(498): Homolog of NCBI NO: 21263753 NR Description: Heat shock cognate 71 kDa protein (Hsc70.1)
  misc_feature (41)..(511): Homolog of NCBI NO: 168424 NR Description: polypeptide chain-binding protein
  misc_feature (1)..(511): Homolog of NCBI NO: 23480384 NR Description: heat shock protein [Plasmodium yoelii yoelii]
  misc_feature (1)..(511): Homolog of NCBI NO: 29539338 NR Description: Heat shock 70 kDa protein [Cyanidioschyzon
  misc_feature (1)..(511): Homolog of NCBI NO: 1037176 NR Description: immunoglobulin heavy chain binding protein
  misc_feature (1)..(506): Homolog of NCBI NO: 13897312 NR Description: luminal binding protein, BiP [Scherffelia dubia]
  misc_feature (1)..(497): Homolog of NCBI NO: 14423732 NR Description: Heat shock 70 kDa protein
  misc_feature (1)..(498): Homolog of NCBI NO: 21263753 NR Description: Heat shock cognate 71 kDa protein (Hsc70.1)
  misc_feature (41)..(511): Homolog of NCBI NO: 168424 NR Description: polypeptide chain-binding protein
  misc_feature (1)..(511): Homolog of NCBI NO: 23480384 NR Description: heat shock protein [Plasmodium yoelii yoelii]
  misc_feature (1)..(511): Homolog of NCBI NO: 29539338 NR Description: Heat shock 70 kDa protein [Cyanidioschyzon
  misc_feature (1)..(511): Homolog of NCBI NO: 1037176 NR Description: immunoglobulin heavy chain binding protein
  misc_feature (1)..(506): Homolog of NCBI NO: 13897312 NR Description: luminal binding protein, BiP [Scherffelia dubia]
  misc_feature (1)..(497): Homolog of NCBI NO: 14423732 NR Description: Heat shock 70 kDa protein
  misc_feature (1)..(498): Homolog of NCBI NO: 21263753 NR Description: Heat shock cognate 71 kDa protein (Hsc70.1)
  misc_feature (41)..(511): Homolog of NCBI NO: 168424 NR Description: polypeptide chain-binding protein
  misc_feature (1)..(511): Homolog of NCBI NO: 23480384 NR Description: heat shock protein [Plasmodium yoelii yoelii]
  misc_feature (1)..(511): Homolog of NCBI NO: 29539338 NR Description: Heat shock 70 kDa protein [Cyanidioschyzon
  misc_feature (1)..(511): Homolog of NCBI NO: 1037176 NR Description: immunoglobulin heavy chain binding protein
  misc_feature (1)..(506): Homolog of NCBI NO: 13897312 NR Description: luminal binding protein, BiP [Scherffelia dubia]
  misc_feature (1)..(497): Homolog of NCBI NO: 14423732 NR Description: Heat shock 70 kDa protein
  misc_feature (1)..(498): Homolog of NCBI NO: 21263753 NR Description: Heat shock cognate 71 kDa protein (Hsc70.1)
  misc_feature (41)..(511): Homolog of NCBI NO: 168424 NR Description: polypeptide chain-binding protein
  misc_feature (1)..(511): Homolog of NCBI NO: 23480384 NR Description: heat shock protein [Plasmodium yoelii yoelii]
  misc_feature (1)..(511): Homolog of NCBI NO: 29539338 NR Description: Heat shock 70 kDa protein [Cyanidioschyzon
  misc_feature (1)..(511): Homolog of NCBI NO: 1037176 NR Description: immunoglobulin heavy chain binding protein
  misc_feature (1)..(506): Homolog of NCBI NO: 13897312 NR Description: luminal binding protein, BiP [Scherffelia dubia]
  misc_feature (1)..(497): Homolog of NCBI NO: 14423732 NR Description: Heat shock 70 kDa protein
  misc_feature (1)..(498): Homolog of NCBI NO: 21263753 NR Description: Heat shock cognate 71 kDa protein (Hsc70.1)
  misc_feature (41)..(511): Homolog of NCBI NO: 168424 NR Description: polypeptide chain-binding protein
  misc_feature (1)..(511): Homolog of NCBI NO: 23480384 NR Description: heat shock protein [Plasmodium yoelii yoelii]
  misc_feature (1)..(511): Homolog of NCBI NO: 29539338 NR Description: Heat shock 70 kDa protein [Cyanidioschyzon
  misc_feature (1)..(511): Homolog of NCBI NO: 1037176 NR Description: immunoglobulin heavy chain binding protein
  misc_feature (1)..(506): Homolog of NCBI NO: 13897312 NR Description: luminal binding protein, BiP [Scherffelia dubia]

SEQ ID NO: 45308 - DNA, 2322 bp, Arabidopsis thaliana; identical to SEQ ID NO: 44793
  misc_feature (1)..(2322): Ceres Seq. ID no. 12489113
  misc_feature: MA Experiment ID: 108473 Result: Down-regulated in Transcription
  misc_feature: MA Experiment 108473 PARAMETER Experiment Name: At_Drought_Flowers_cDNA_P Parameter: Timepoint (hr) Value: 7 d
  misc_feature: MA Experiment 108473 PARAMETER Experiment Name: At_Drought_Flowers_cDNA_P Parameter: Tissue Value: Flower
  misc_feature: MA Experiment 108473 PARAMETER Experiment Name: At_Drought_Flowers_cDNA_P Parameter: Treatment Value: Drought vs. No Drought
  misc_feature: MA Experiment ID: 108572 Result: Up-regulated in Transcription
  misc_feature: MA Experiment 108572 PARAMETER Experiment Name: At_Drought_cDNA_P Parameter: Timepoint (hr) Value: 1
  misc_feature: MA Experiment 108572 PARAMETER Experiment Name: At_Drought_cDNA_P Parameter: Tissue Value: Aerial
  misc_feature: MA Experiment 108572 PARAMETER Experiment Name: At_Drought_cDNA_P Parameter: Treatment Value: Drought vs. No Drought
  misc_feature: MA Experiment ID: 108576 Result: Down-regulated in Transcription
  misc_feature: MA Experiment 108576 PARAMETER Experiment Name: At_42deg_Heat_cDNA_P Parameter: Temperature (deg C) Value: 42 vs. 22
  misc_feature: MA Experiment 108576 PARAMETER Experiment Name: At_42deg_Heat_cDNA_P Parameter: Timepoint (hr) Value: 1
  misc_feature: MA Experiment 108576 PARAMETER Experiment Name: At_42deg_Heat_cDNA_P Parameter: Tissue Value: Aerial
  misc_feature: MA Experiment ID: 108577 Result: Down-regulated in Transcription
  misc_feature: MA Experiment 108577 PARAMETER Experiment Name: At_42deg_Heat_cDNA_P Parameter: Temperature (deg C) Value: 42 vs. 22
  misc_feature: MA Experiment 108577 PARAMETER Experiment Name: At_42deg_Heat_cDNA_P Parameter: Timepoint (hr) Value: 6
  misc_feature: MA Experiment 108577 PARAMETER Experiment Name: At_42deg_Heat_cDNA_P Parameter: Tissue Value: Aerial
  misc_feature: MA Experiment ID: 108594 Result: Down-regulated in Transcription
  misc_feature: MA Experiment 108594 PARAMETER Experiment Name: At_Ler-rhl_Root_cDNA_P Parameter: Plant Line Value: null
  misc_feature: MA Experiment ID: 108595 Result: Down-regulated in Transcription
  misc_feature: MA Experiment 108595 PARAMETER Experiment Name: At_Ler-pi_Ovule_cDNA_P Parameter: Plant Line Value: null
  misc_feature: MA Experiment ID: 108607 Result: Up-regulated in Transcription
  misc_feature: MA Experiment 108607 PARAMETER Experiment Name: At_100uM_ABA_cDNA_P Parameter: Timepoint (hr) Value: 4
  misc_feature: MA Experiment 108607 PARAMETER Experiment Name: At_100uM_ABA_cDNA_P Parameter: Tissue Value: Aerial
  misc_feature: MA Experiment 108607 PARAMETER Experiment Name: At_100uM_ABA_cDNA_P Parameter: Treatment Value: 100uM ABA vs. No Treatment
  misc_feature: MA Experiment ID: 20000090 Result: Down-regulated in Transcription
  misc_feature: MA Experiment ID: 20000111 Result: Down-regulated in Transcription
  misc_feature: MA Experiment 20000111 PARAMETER Experiment Name: At_42deg_Heat_cDNA_P Parameter: Temperature (deg C) Value: 42 vs. 22
  misc_feature: MA Experiment 20000111 PARAMETER Experiment Name: At_42deg_Heat_cDNA_P Parameter: Timepoint (hr) Value: 6
  misc_feature: MA Experiment 20000111 PARAMETER Experiment Name: At_42deg_Heat_cDNA_P Parameter: Tissue Value: Aerial
  misc_feature: MA Experiment ID: 20000112 Result: Down-regulated in Transcription
  misc_feature: MA Experiment 20000112 PARAMETER Experiment Name: At_42deg_Heat_cDNA_P Parameter: Temperature (deg C) Value: 42 vs. 22
  misc_feature: MA Experiment 20000112 PARAMETER Experiment Name: At_42deg_Heat_cDNA_P Parameter: Timepoint (hr) Value: 2
  misc_feature: MA Experiment 20000112 PARAMETER Experiment Name: At_42deg_Heat_cDNA_P Parameter: Tissue Value: Aerial
  misc_feature: MA Experiment ID: 20000113 Result: Down-regulated in Transcription
  misc_feature: MA Experiment 20000113 PARAMETER Experiment Name: At_42deg_Heat_cDNA_P Parameter: Temperature (deg C) Value: 42 vs. 22
  misc_feature: MA Experiment 20000113 PARAMETER Experiment Name: At_42deg_Heat_cDNA_P Parameter: Timepoint (hr) Value: 8
  misc_feature: MA Experiment 20000113 PARAMETER Experiment Name: At_42deg_Heat_cDNA_P Parameter: Tissue Value: Aerial
  misc_feature: MA Experiment ID: 20000117 Result: Down-regulated in Transcription
  misc_feature: MA Experiment 20000117 PARAMETER Experiment Name: At_100uM_ABA_Mutants_cDNA_P Parameter: Plant Line Value: Columbia
  misc_feature: MA Experiment 20000117 PARAMETER Experiment Name: At_100uM_ABA_Mutants_cDNA_P Parameter: Timepoint (hr) Value: 6
  misc_feature: MA Experiment 20000117 PARAMETER Experiment Name: At_100uM_ABA_Mutants_cDNA_P Parameter: Tissue Value: Aerial
  misc_feature: MA Experiment 20000117 PARAMETER Experiment Name: At_100uM_ABA_Mutants_cDNA_P Parameter: Treatment Value: 100uM ABA vs. No Treatment
  misc_feature: MA Experiment ID: 20000234 Result: Up-regulated in Transcription
  misc_feature: MA Experiment 20000234 PARAMETER Experiment Name: At_Siliques_P Parameter: Age (day) Value: 21
  misc_feature: MA Experiment 20000234 PARAMETER Experiment Name: At_Siliques_P Parameter: Organism Value: A. thaliana
  misc_feature: MA Experiment 20000234 PARAMETER Experiment Name: At_Siliques_P Parameter: Plant Line Value: WS
  misc_feature: MA Experiment 20000234 PARAMETER Experiment Name: At_Siliques_P Parameter: Tissue Value: Less Than 5mm Siliques vs. Whole Plant
  misc_feature: MA Experiment ID: 20000235 Result: Up-regulated in Transcription
  misc_feature: MA Experiment 20000235 PARAMETER Experiment Name: At_Siliques_P Parameter: Age (day) Value: 21
  misc_feature: MA Experiment 20000235 PARAMETER Experiment Name: At_Siliques_P Parameter: Organism Value: A. thaliana
  misc_feature: MA Experiment 20000235 PARAMETER Experiment Name: At_Siliques_P Parameter: Plant Line Value: WS
  misc_feature: MA Experiment 20000235 PARAMETER Experiment Name: At_Siliques_P Parameter: Tissue Value: 5-10mm Siliques vs. Whole Plant
  misc_feature: MA Experiment ID: 20000265 Result: Up-regulated in Transcription
  misc_feature: MA Experiment 20000265 PARAMETER Experiment Name: At_Open_Flower_P Parameter: Age (day) Value: 21
  misc_feature: MA Experiment 20000265 PARAMETER Experiment Name: At_Open_Flower_P Parameter: Plant Line Value: WS
  misc_feature: MA Experiment 20000265 PARAMETER Experiment Name: At_Open_Flower_P Parameter: Tissue Value: Closed Flower vs. Whole Plant
  misc_feature: MA Experiment ID: 20000286 Result: Up-regulated in Transcription
  misc_feature: MA Experiment 20000286 PARAMETER Experiment Name: At_Open_Flower_P Parameter: Age (day) Value: 21
  misc_feature: MA Experiment 20000286 PARAMETER Experiment Name: At_Open_Flower_P Parameter: Plant Line Value: WS
  misc_feature: MA Experiment 20000286 PARAMETER Experiment Name: At_Open_Flower_P Parameter: Tissue Value: Half Open vs. Whole Plant
  misc_feature: MA Experiment ID: 20000495 Result: Down-regulated in Transcription
  misc_feature: MA Experiment 20000495 PARAMETER Experiment Name: At_Guard_Cells_P Parameter: Harvest Date Value: 8/2/2002
  misc_feature: MA Experiment 20000495 PARAMETER Experiment Name: At_Guard_Cells_P Parameter: Organism Value: A. thaliana
  misc_feature: MA Experiment 20000495 PARAMETER Experiment Name: At_Guard_Cells_P Parameter: Tissue Value: Guard Cells vs. Leaves
  misc_feature: MA Experiment ID: 20000794 Result: Down-regulated in Transcription
  misc_feature: MA Experiment 20000794 PARAMETER Experiment Name: At_Petals_P Parameter: Age (day) Value: 23-25 days
  misc_feature: MA Experiment 20000794 PARAMETER Experiment Name: At_Petals_P Parameter: Plant Line Value: WS
  misc_feature: MA Experiment 20000794 PARAMETER Experiment Name: At_Petals_P Parameter: Tissue Value: Petals vs. Whole plant
  misc_feature: MA Experiment ID: 20001248 Result: Down-regulated in Transcription
  misc_feature: MA Experiment 20001248 PARAMETER Experiment Name: At_Far-red-induction_P Parameter: Age (day) Value: 7
  misc_feature: MA Experiment 20001248 PARAMETER Experiment Name: At_Far-red-induction_P Parameter: Light Value: Far-red vs. White
  misc_feature: MA Experiment 20001248 PARAMETER Experiment Name: At_Far-red-induction_P Parameter: Organism Value: A. thaliana
  misc_feature: MA Experiment 20001248 PARAMETER Experiment Name: At_Far-red-induction_P Parameter: Plant Line Value: Columbia
  misc_feature: MA Experiment 20001248 PARAMETER Experiment Name: At_Far-red-induction_P Parameter: Timepoint (hr) Value: 4
  misc_feature: MA Experiment 20001248 PARAMETER Experiment Name: At_Far-red-induction_P Parameter: Tissue Value: Whole Plant
  misc_feature: MA Experiment ID: 20001450 Result: Down-regulated in Transcription
  misc_feature: MA Experiment 20001450 PARAMETER Experiment Name: At_Far-red-induction_P Parameter: Age (day) Value: 7
  misc_feature: MA Experiment 20001450 PARAMETER Experiment Name: At_Far-red-induction_P Parameter: Light Value: Far-red vs. White
  misc_feature: MA Experiment 20001450 PARAMETER Experiment Name: At_Far-red-induction_P Parameter: Organism Value: A. thaliana
  misc_feature: MA Experiment 20001450 PARAMETER Experiment Name: At_Far-red-induction_P Parameter: Plant Line Value: Columbia
  misc_feature: MA Experiment 20001450 PARAMETER Experiment Name: At_Far-red-induction_P Parameter: Timepoint (hr) Value: 8
  misc_feature: MA Experiment 20001450 PARAMETER Experiment Name: At_Far-red-induction_P Parameter: Tissue Value: Whole Plant
  misc_feature: MA Experiment ID: 20001451 Result: Down-regulated in Transcription
  misc_feature: MA Experiment 20001451 PARAMETER Experiment Name: At_Far-red-induction_P Parameter: Age (day) Value: 7
  misc_feature: MA Experiment 20001451 PARAMETER Experiment Name: At_Far-red-induction_P Parameter: Light Value: Far-red vs. White
  misc_feature: MA Experiment 20001451 PARAMETER Experiment Name: At_Far-red-induction_P Parameter: Organism Value: A. thaliana
  misc_feature: MA Experiment 20001451 PARAMETER Experiment Name: At_Far-red-induction_P Parameter: Plant Line Value: Columbia
  misc_feature: MA Experiment 20001451 PARAMETER Experiment Name: At_Far-red-induction_P Parameter: Timepoint (hr) Value: 24
  misc_feature: MA Experiment 20001451 PARAMETER Experiment Name: At_Far-red-induction_P Parameter: Tissue Value: Whole Plant
  misc_feature: MA Experiment ID: 20001557 Result: Up-regulated in Transcription
  misc_feature: MA Experiment 20001557 PARAMETER Experiment Name: At_Drought_Soil_Dry_P Parameter: Age (day) Value: 27
  misc_feature: MA Experiment 20001557 PARAMETER Experiment Name: At_Drought_Soil_Dry_P Parameter: Organism Value: A. thaliana
  misc_feature: MA Experiment 20001557 PARAMETER Experiment Name: At_Drought_Soil_Dry_P Parameter: Plant Line Value: WS
  misc_feature: MA Experiment 20001557 PARAMETER Experiment Name: At_Drought_Soil_Dry_P Parameter: Post Timepoint (hr) Value: 3
  misc_feature: MA Experiment 20001557 PARAMETER Experiment Name: At_Drought_Soil_Dry_P Parameter: Post-Treatment Value: Re-Water vs. No Drought
  misc_feature: MA Experiment 20001557 PARAMETER Experiment Name: At_Drought_Soil_Dry_P Parameter: Timepoint (day) Value: 13
  misc_feature: MA Experiment 20001557 PARAMETER Experiment Name: At_Drought_Soil_Dry_P Parameter: Treatment Value: Drought vs. No Drought
  misc_feature: MA Experiment ID: 20001560 Result: Up-regulated in Transcription
  misc_feature: MA Experiment 20001560 PARAMETER Experiment Name: At_Drought_Soil_Dry_P Parameter: Age (day) Value: 28
  misc_feature: MA Experiment 20001560 PARAMETER Experiment Name: At_Drought_Soil_Dry_P Parameter: Organism Value: A. thaliana
  misc_feature: MA Experiment 20001560 PARAMETER Experiment Name: At_Drought_Soil_Dry_P Parameter: Plant Line Value: WS
  misc_feature: MA Experiment 20001560 PARAMETER Experiment Name: At_Drought_Soil_Dry_P Parameter: Post Timepoint (hr) Value: None
  misc_feature: MA Experiment 20001560 PARAMETER Experiment Name: At_Drought_Soil_Dry_P Parameter: Post-Treatment Value: None
  misc_feature: MA Experiment 20001560 PARAMETER Experiment Name: At_Drought_Soil_Dry_P Parameter: Timepoint (day) Value: 14
  misc_feature: MA Experiment 20001560 PARAMETER Experiment Name: At_Drought_Soil_Dry_P Parameter: Treatment Value: Drought vs. No Drought
  misc_feature: MA Experiment ID: 20001911 Result: Down-regulated in Transcription
  misc_feature: MA Experiment 20001911 PARAMETER Experiment Name: At_Drought_Reproduction_P Parameter: Age (day) Value: 40
  misc_feature: MA Experiment 20001911 PARAMETER Experiment Name: At_Drought_Reproduction_P Parameter: Organism Value: A. thaliana
  misc_feature: MA Experiment 20001911 PARAMETER Experiment Name: At_Drought_Reproduction_P Parameter: Plant Line Value: WS
  misc_feature: MA Experiment 20001911 PARAMETER Experiment Name: At_Drought_Reproduction_P Parameter: Timepoint (day) Value: 10
  misc_feature: MA Experiment 20001911 PARAMETER Experiment Name: At_Drought_Reproduction_P Parameter: Tissue Value: Flowers
  misc_feature: MA Experiment 20001911 PARAMETER Experiment Name: At_Drought_Reproduction_P Parameter: Treatment Value: Drought vs. No Drought

SEQ ID NO: 45309 - protein, 713 aa, Arabidopsis thaliana; identical to SEQ ID NO: 44794
  peptide (1)..(713): Ceres Seq. ID no. 12489114
  misc_feature (129)..(599): Pfam Name: AMP-binding enzyme Pfam Description: AMP-binding enzyme
  misc_feature (129)..(599): Pfam Name: AMP-binding enzyme Pfam Description: AMP-binding enzyme
  misc_feature (87)..(707): Homolog of NCBI NO: 18397422 NR Description: putative long-chain-fatty-acid--CoA ligase
  misc_feature (31)..(711): Homolog of NCBI NO: 22327099 NR Description: long-chain-fatty-acid--CoA ligase-like protein
  misc_feature (87)..(707): Homolog of NCBI NO: 13516481 NR Description: long-chain acyl-CoA synthetase [Arabidopsis
  misc_feature (59)..(705): Homolog of NCBI NO: 15226536 NR Description: putative acyl-CoA synthetase
  misc_feature (71)..(709): Homolog of NCBI NO: 34898260 NR Description: similar to long-chain-fatty-acid--CoA ligase 1
  misc_feature (87)..(707): Homolog of NCBI NO: 18397422 NR Description: putative long-chain-fatty-acid--CoA ligase
  misc_feature (87)..(707): Homolog of NCBI NO: 13516481 NR Description: long-chain acyl-CoA synthetase [Arabidopsis
  misc_feature (71)..(709): Homolog of NCBI NO: 34898260 NR Description: similar to long-chain-fatty-acid--CoA ligase 1
  misc_feature (56)..(707): Homolog of NCBI NO: 15217631 NR Description: acyl-CoA synthetase, putative
  misc_feature (56)..(713): Homolog of NCBI NO: 7437845 NR Description: probable long-chain-fatty-acid-CoA ligase (EC
  misc_feature (49)..(713): Homolog of NCBI NO: 15236634 NR Description: acyl-CoA synthetase - like protein
  misc_feature (59)..(713): Homolog of NCBI NO: 15237023 NR Description: putative acyl-CoA synthetase
  misc_feature (59)..(713): Homolog of NCBI NO: 20805871 NR Description: long chain acyl-CoA synthetase 5 [Arabidopsis
  misc_feature (59)..(705): Homolog of NCBI NO: 15226536 NR Description: putative acyl-CoA synthetase
  misc_feature (31)..(711): Homolog of NCBI NO: 22327099 NR Description: long-chain-fatty-acid--CoA ligase-like protein
  misc_feature (59)..(713): Homolog of NCBI NO: 20805871 NR Description: long chain acyl-CoA synthetase 5 [Arabidopsis
  misc_feature (59)..(713): Homolog of NCBI NO: 15237023 NR Description: putative acyl-CoA synthetase
  misc_feature (49)..(713): Homolog of NCBI NO: 15236634 NR Description: acyl-CoA synthetase - like protein
  misc_feature (56)..(713): Homolog of NCBI NO: 7437845 NR Description: probable long-chain-fatty-acid-CoA ligase (EC
  misc_feature (56)..(707): Homolog of NCBI NO: 15217631 NR Description: acyl-CoA synthetase, putative

SEQ ID NO: 45310 - protein, 665 aa, Arabidopsis thaliana; identical to SEQ ID NO: 44795
  peptide (1)..(665): Ceres Seq. ID no. 12489115
  misc_feature (81)..(551): Pfam Name: AMP-binding enzyme Pfam Description: AMP-binding enzyme
  misc_feature (81)..(551): Pfam Name: AMP-binding enzyme Pfam Description: AMP-binding enzyme
  misc_feature (39)..(659): Homolog of NCBI NO: 18397422 NR Description: putative long-chain-fatty-acid--CoA ligase
  misc_feature (1)..(663): Homolog of NCBI NO: 22327099 NR Description: long-chain-fatty-acid--CoA ligase-like protein
  misc_feature (39)..(659): Homolog of NCBI NO: 13516481 NR Description: long-chain acyl-CoA synthetase [Arabidopsis
  misc_feature (11)..(657): Homolog of NCBI NO: 15226536 NR Description: putative acyl-CoA synthetase
  misc_feature (23)..(661): Homolog of NCBI NO: 34898260 NR Description: similar to long-chain-fatty-acid--CoA ligase 1
  misc_feature (39)..(659): Homolog of NCBI NO: 18397422 NR Description: putative long-chain-fatty-acid--CoA ligase
  misc_feature (39)..(659): Homolog of NCBI NO: 13516481 NR Description: long-chain acyl-CoA synthetase [Arabidopsis
  misc_feature (23)..(661): Homolog of NCBI NO: 34898260 NR Description: similar to long-chain-fatty-acid--CoA ligase 1
  misc_feature (8)..(659): Homolog of NCBI NO: 15217631 NR Description: acyl-CoA synthetase, putative
  misc_feature (8)..(665): Homolog of NCBI NO: 7437845 NR Description: probable long-chain-fatty-acid-CoA ligase (EC
  misc_feature (1)..(665): Homolog of NCBI NO: 15236634 NR Description: acyl-CoA synthetase - like protein
  misc_feature (11)..(665): Homolog of NCBI NO: 15237023 NR Description: putative acyl-CoA synthetase
  misc_feature (11)..(665): Homolog of NCBI NO: 20805871 NR Description: long chain acyl-CoA synthetase 5 [Arabidopsis
  misc_feature (11)..(657): Homolog of NCBI NO: 15226536 NR Description: putative acyl-CoA synthetase
  misc_feature (1)..(663): Homolog of NCBI NO: 22327099 NR Description: long-chain-fatty-acid--CoA ligase-like protein
  misc_feature (11)..(665): Homolog of NCBI NO: 20805871 NR Description: long chain acyl-CoA synthetase 5 [Arabidopsis
  misc_feature (11)..(665): Homolog of NCBI NO: 15237023 NR Description: putative acyl-CoA synthetase
  misc_feature (1)..(665): Homolog of NCBI NO: 15236634 NR Description: acyl-CoA synthetase - like protein
  misc_feature (8)..(665): Homolog of NCBI NO: 7437845 NR Description: probable long-chain-fatty-acid-CoA ligase (EC
  misc_feature (8)..(659): Homolog of NCBI NO: 15217631 NR Description: acyl-CoA synthetase, putative

SEQ ID NO: 45311 - protein, 603 aa, Arabidopsis thaliana; identical to SEQ ID NO: 44796
  peptide (1)..(603): Ceres Seq. ID no. 12489116
  misc_feature (19)..(489): Pfam Name: AMP-binding enzyme Pfam Description: AMP-binding enzyme
  misc_feature (19)..(489): Pfam Name: AMP-binding enzyme Pfam Description: AMP-binding enzyme
  misc_feature (1)..(597): Homolog of NCBI NO: 18397422 NR Description: putative long-chain-fatty-acid--CoA ligase
  misc_feature (1)..(601): Homolog of NCBI NO: 22327099 NR Description: long-chain-fatty-acid--CoA ligase-like protein
  misc_feature (1)..(597): Homolog of NCBI NO: 13516481 NR Description: long-chain acyl-CoA synthetase [Arabidopsis
  misc_feature (1)..(595): Homolog of NCBI NO: 15226536 NR Description: putative acyl-CoA synthetase
  misc_feature (1)..(599): Homolog of NCBI NO: 34898260 NR Description: similar to long-chain-fatty-acid--CoA ligase 1
  misc_feature (1)..(597): Homolog of NCBI NO: 18397422 NR Description: putative long-chain-fatty-acid--CoA ligase
  misc_feature (1)..(597): Homolog of NCBI NO: 13516481 NR Description: long-chain acyl-CoA synthetase [Arabidopsis
  misc_feature (1)..(599): Homolog of NCBI NO: 34898260 NR Description: similar to long-chain-fatty-acid--CoA ligase 1
  misc_feature (1)..(597): Homolog of NCBI NO: 15217631 NR Description: acyl-CoA synthetase, putative
  misc_feature (1)..(603): Homolog of NCBI NO: 7437845 NR Description: probable long-chain-fatty-acid-CoA ligase (EC
  misc_feature (1)..(603): Homolog of NCBI NO: 15236634 NR Description: acyl-CoA synthetase - like protein
  misc_feature (1)..(603): Homolog of NCBI NO: 15237023 NR Description: putative acyl-CoA synthetase
  misc_feature (1)..(603): Homolog of NCBI NO: 20805871 NR Description: long chain acyl-CoA synthetase 5 [Arabidopsis
  misc_feature (1)..(595): Homolog of NCBI NO: 15226536 NR Description: putative acyl-CoA synthetase
  misc_feature (1)..(601): Homolog of NCBI NO: 22327099 NR Description: long-chain-fatty-acid--CoA ligase-like protein
  misc_feature (1)..(603): Homolog of NCBI NO: 20805871 NR Description: long chain acyl-CoA synthetase 5 [Arabidopsis
  misc_feature (1)..(603): Homolog of NCBI NO: 15237023 NR Description: putative acyl-CoA synthetase
  misc_feature (1)..(603): Homolog of NCBI NO: 15236634 NR Description: acyl-CoA synthetase - like protein
  misc_feature (1)..(603): Homolog of NCBI NO: 7437845 NR Description: probable long-chain-fatty-acid-CoA ligase (EC
  misc_feature (1)..(597): Homolog of NCBI NO: 15217631 NR Description: acyl-CoA synthetase, putative

SEQ ID NO: 45312 - DNA, 1270 bp, Arabidopsis thaliana
  misc_feature (1)..(1270): Ceres Seq. ID no. 13591546
  misc_feature: MA Experiment ID: 20000227 Result: Up-regulated in Transcription
  misc_feature: MA Experiment 20000227 PARAMETER Experiment Name: At_Root-Tips-vs-Tops_P Parameter: Tissue Value: Root Tips vs. Root Tops
  misc_feature: MA Experiment ID: 20000496 Result: Up-regulated in Transcription
  misc_feature: MA Experiment 20000496 PARAMETER Experiment Name: At_Guard_Cells_P Parameter: Harvest Date Value: 7/19/2002
  misc_feature: MA Experiment 20000496 PARAMETER Experiment Name: At_Guard_Cells_P Parameter: Organism Value: Canola
  misc_feature: MA Experiment 20000496 PARAMETER Experiment Name: At_Guard_Cells_P Parameter: Tissue Value: Guard Cells vs. Leaves
  misc_feature: MA Experiment ID: 20000573 Result: Down-regulated in Transcription
  misc_feature: MA Experiment 20000573 PARAMETER Experiment Name: At_100uM_ABA_Mutants__P Parameter: Organism Value: A. thaliana
  misc_feature: MA Experiment 20000573 PARAMETER Experiment Name: At_100uM_ABA_Mutants__P Parameter: Plant Line Value: CS22 vs. Ler wt
  misc_feature: MA Experiment 20000573 PARAMETER Experiment Name: At_100uM_ABA_Mutants__P Parameter: Timepoint (hr) Value: N/A
  misc_feature: MA Experiment 20000573 PARAMETER Experiment Name: At_100uM_ABA_Mutants__P Parameter: Tissue Value: Whole Plant
  misc_feature: MA Experiment 20000573 PARAMETER Experiment Name: At_100uM_ABA_Mutants__P Parameter: Treatment Value: None
  misc_feature: MA Experiment ID: 20001557 Result: Up-regulated in Transcription
  misc_feature: MA Experiment 20001557 PARAMETER Experiment Name: At_Drought_Soil_Dry_P Parameter: Age (day) Value: 27
  misc_feature: MA Experiment 20001557 PARAMETER Experiment Name: At_Drought_Soil_Dry_P Parameter: Organism Value: A. thaliana
  misc_feature: MA Experiment 20001557 PARAMETER Experiment Name: At_Drought_Soil_Dry_P Parameter: Plant Line Value: WS
  misc_feature: MA Experiment 20001557 PARAMETER Experiment Name: At_Drought_Soil_Dry_P Parameter: Post Timepoint (hr) Value: 3
  misc_feature: MA Experiment 20001557 PARAMETER Experiment Name: At_Drought_Soil_Dry_P Parameter: Post-Treatment Value: Re-Water vs. No Drought
  misc_feature: MA Experiment 20001557 PARAMETER Experiment Name: At_Drought_Soil_Dry_P Parameter: Timepoint (day) Value: 13
  misc_feature: MA Experiment 20001557 PARAMETER Experiment Name: At_Drought_Soil_Dry_P Parameter: Treatment Value: Drought vs. No Drought
agagcaacaatggattttttcgacgaagacaggcctagattcgttttccaatctcgtccttcttcttctcacacggcggaggaagaagaagaagctagaatccctaacaagcttttcatttcaatctccgtctcaatctccctcatcatattatctctctccttcttctacttcgaatctgaacctgccaaatcgctactattatggctttccctctctttcctcgtcggtcctttcgctcctagctcgctcaccggaggtaagattcgcgtcggttatggtcagatcttggagccagaacagattcacgatgagtcatccacggataacgaacgtgaatccaggaggaaatcggtgaataagcgatctaaaggttcgacgaagagcgataatccgccggaaaatgcttctgcggtgactgaagtttcgaggaaagtggtgattccgcagtctaaggagagtggatctgtgaatgaaactaaagattggactgctgaagagatcgagattttgaagaagcagttgattaagcatccagctggtaaacctgggagatgggagacggtggcttcagcgttcggaggaagatacaagacagagaatgtgattaagaaggcgaaagagataggtgagaagaaaatctatgagagtgatgattacgctcagtttttaaagaataggaaagcttcagatcctagattggttgatgaaaacgaagagaattctggagctggtggagatgcggaaggtactaaggagatttggagtaatggagaagacattgcattgctcaatgctttaaaagcttttcctaaggaggcagctatgagatgggagaagattgcagctgcagtacctgggaagtcgaaagcagcttgtatgaagagagttactgagcttaaaaaagggtttcggagctcgaaaactccagctaattaactagaggacatctgtacgggattaaggcaaataccaggagaggaaaaacaattttgtgtttgctgcttgagattattgctacaacgcccaaagtagtgaatagagttctgcaggaagtttcttttagagagaagaaaagaaagcatctcaatatgccaaagaatttaacataaagttatgagttcttctttacttcaagctttgattcgaattacaagacttgagcatctgtgtatcccctccccaaagagcacctattttattactagggaaatatataaaaagactatatatattcttaatccaaaattccaaactagaattttcatat

SEQ ID NO: 45313 - protein, 312 aa, Arabidopsis thaliana
  peptide (1)..(312): Ceres Seq. ID no. 13591547
  misc_feature (160)..(210): Pfam Name: Myb-like DNA-binding domain Pfam Description: Myb-like DNA-binding domain
  misc_feature (150)..(308): Homolog of NCBI NO: 32481976 NR Description: zuotin related factor 2 [Rattus norvegicus]
  misc_feature (150)..(228): Homolog of NCBI NO: 15239928 NR Description: cell division protein - related [Arabidopsis
  misc_feature (225)..(311): Homolog of NCBI NO: 15239928 NR Description: cell division protein - related [Arabidopsis
  misc_feature (237)..(309): Homolog of NCBI NO: 15229761 NR Description: cell division protein - related [Arabidopsis
  misc_feature (97)..(230): Homolog of NCBI NO: 15229761 NR Description: cell division protein - related [Arabidopsis
  misc_feature (244)..(309): Homolog of NCBI NO: 39546277 NR Description: OSJNBa0083D01.10 [Oryza sativa (japonica
  misc_feature (114)..(228): Homolog of NCBI NO: 39546277 NR Description: OSJNBa0083D01.10 [Oryza sativa (japonica
  misc_feature (4)..(308): Homolog of NCBI NO: 34905190 NR Description: P0498E12.13 [Oryza sativa (japonica
  misc_feature (4)..(312): Homolog of NCBI NO: 18422552 NR Description: myb protein family [Arabidopsis thaliana]
  misc_feature (1)..(312): Homolog of NCBI NO: 9758732 NR Description: gene_id:MFC19.9~unknown protein [Arabidopsis
RATMDFFDEDRPRFVFQSRPSSSHTAEEEEEARIPNKLFISISVSISLIILSLSFFYFESEPAKSLLLWLSLSFLVGPFAPSSLTGGKIRVGYGQILEPEQIHDESSTDNERESRRKSVNKRSKGSTKSDNPPENASAVTEVSRKVVIPQSKESGSVNETKDWTAEEIEILKKQLIKHPAGKPGRWETVASAFGGRYKTENVIKKAKEIGEKKIYESDDYAQFLKNRKASDPRLVDENEENSGAGGDAEGTKEIWSNGEDIALLNALKAFPKEAAMRWEKIAAAVPGKSKAACMKRVTELKKGFRSSKTPAN

SEQ ID NO: 45314 - protein, 309 aa, Arabidopsis thaliana
  peptide (1)..(309): Ceres Seq. ID no. 13591548
  misc_feature (157)..(207): Pfam Name: Myb-like DNA-binding domain Pfam Description: Myb-like DNA-binding domain
  misc_feature (147)..(305): Homolog of NCBI NO: 32481976 NR Description: zuotin related factor 2 [Rattus norvegicus]
  misc_feature (147)..(225): Homolog of NCBI NO: 15239928 NR Description: cell division protein - related [Arabidopsis
  misc_feature (222)..(308): Homolog of NCBI NO: 15239928 NR Description: cell division protein - related [Arabidopsis
  misc_feature (234)..(306): Homolog of NCBI NO: 15229761 NR Description: cell division protein - related [Arabidopsis
  misc_feature (94)..(227): Homolog of NCBI NO: 15229761 NR Description: cell division protein - related [Arabidopsis
  misc_feature (241)..(306): Homolog of NCBI NO: 39546277 NR Description: OSJNBa0083D01.10 [Oryza sativa (japonica
  misc_feature (111)..(225): Homolog of NCBI NO: 39546277 NR Description: OSJNBa0083D01.10 [Oryza sativa (japonica
  misc_feature (1)..(305): Homolog of NCBI NO: 34905190 NR Description: P0498E12.13 [Oryza sativa (japonica
  misc_feature (1)..(309): Homolog of NCBI NO: 18422552 NR Description: myb protein family [Arabidopsis thaliana]
  misc_feature (1)..(309): Homolog of NCBI NO: 9758732 NR Description: gene_id:MFC19.9~unknown protein [Arabidopsis
MDFFDEDRPRFVFQSRPSSSHTAEEEEEARIPNKLFISISVSISLIILSLSFFYFESEPAKSLLLWLSLSFLVGPFAPSSLTGGKIRVGYGQILEPEQIHDESSTDNERESRRKSVNKRSKGSTKSDNPPENASAVTEVSRKVVIPQSKESGSVNETKDWTAEEIEILKKQLIKHPAGKPGRWETVASAFGGRYKTENVIKKAKEIGEKKIYESDDYAQFLKNRKASDPRLVDENEENSGAGGDAEGTKEIWSNGEDIALLNALKAFPKEAAMRWEKIAAAVPGKSKAACMKRVTELKKGFRSSKTPAN

SEQ ID NO: 45315 - DNA, 1445 bp, Arabidopsis thaliana
  misc_feature (1)..(1445): Ceres Seq. ID no. 13593120
  misc_feature: MA Experiment ID: 20000315 Result: Up-regulated in Transcription
  misc_feature: MA Experiment 20000315 PARAMETER Experiment Name: At_14day_Shoots-Roots_Sub_P Parameter: Age (day) Value: 14
  misc_feature: MA Experiment 20000315 PARAMETER Experiment Name: At_14day_Shoots-Roots_Sub_P Parameter: Organism Value: A. thaliana
  misc_feature: MA Experiment 20000315 PARAMETER Experiment Name: At_14day_Shoots-Roots_Sub_P Parameter: Plant Line Value: WS
  misc_feature: MA Experiment 20000315 PARAMETER Experiment Name: At_14day_Shoots-Roots_Sub_P Parameter: Tissue Value: Shoots vs. Whole Plant
  misc_feature: MA Experiment ID: 20000328 Result: Up-regulated in Transcription
  misc_feature: MA Experiment 20000328 PARAMETER Experiment Name: At_42deg_Heat_Sub_P Parameter: Age (day) Value: 14
  misc_feature: MA Experiment 20000328 PARAMETER Experiment Name: At_42deg_Heat_Sub_P Parameter: Organism Value: A. thaliana
  misc_feature: MA Experiment 20000328 PARAMETER Experiment Name: At_42deg_Heat_Sub_P Parameter: Plant Line Value: WS
  misc_feature: MA Experiment 20000328 PARAMETER Experiment Name: At_42deg_Heat_Sub_P Parameter: Temperature (deg C) Value: 42 vs. 22
  misc_feature: MA Experiment 20000328 PARAMETER Experiment Name: At_42deg_Heat_Sub_P Parameter: Timepoint (hr) Value: 6
  misc_feature: MA Experiment 20000328 PARAMETER Experiment Name: At_42deg_Heat_Sub_P Parameter: Tissue Value: Aerial
ggcgctctcatatttctcacattttcgtagccgcaagactcctttcagattcttacttgcagctatgggtaaagagaagtttcacattaacattgtggtcattggtcatgttgattctggaaaatcgaccacaactggtcacttgatctataagcttggtggtattgacaagcgtgtcatcgagaggttcgagaaggaggctgctgagatgaacaagaggtccttcaagtacgcatgggtgttggacaaacttaaggccgagcgtgagcgtggtattaccatcgatattgctctatggaagttcgagaccaccaagtactactgcacagtcattgatgccccaggacatcgtgatttcatcaagaacatgattactggtacctcccaggctgattgtgctgttcttatcattgactccaccactggaggttttgaggctggtatctctaaggatggtcagacccgtgagcacgctcttcttgctttcacccttggtgtcaagcagatgatttgctgttgtaacaagatggatgccaccacccccaaatactccaaggctaggtacgatgaaatcatcaaggaggtgtcttcatacctgaagaaggtcggatacaaccctgacaaaatcccatttgtgccaatctctggattcgagggagacaacatgattgagaggtcaaccaaccttgactggtacaagggaccaactcttcttgaggctcttgaccagatcaacgagcccaagaggccatcagacaagccccttcgtcttccacttcaggatgtctacaagattggtggtattggaacggtgccagtgggacgtgttgagactggtatgatcaagcctggtatggttgttacctttgctcccacagggttgaccactgaggttaagtctgttgagatgcaccacgagtctcttcttgaggcacttcccggtgacaatgttggattcaatgtcaagaatgttgctgtcaaggatcttaagagaggatacgttgcctctaactccaaggatgatccagctaagggtgccgccaacttcacctcccaggtcatcatcatgaaccaccctggtcagattggtaacggttacgccccagttctcgattgccacacctctcacattgcagtcaagttctctgagatcttgaccaagattgacaggcgttctggtaaggagattgagaaggagcccaagtttttgaagaatggtgacgctggtatggttaagatgaccccaaccaagcccatggttgttgagactttctccgagtacccacctttgggacgtttcgctgttagggacatgaggcagaccgttgctgttggtgttattaagagcgtggacaagaaggacccaactggagccaaggtcaccaaggctgcagtgaagaagggtgccaaatgaactcgaatcctcaaaactctatccgcagatg

SEQ ID NO: 45316 - protein, 470 aa, Arabidopsis thaliana; identical to SEQ ID NO: 40875
  peptide (1)..(470): Ceres Seq. ID no. 15221202
  misc_feature (26)..(248): Pfam Name: Elongation factor Tu GTP binding domain Pfam Description: Elongation factor Tu GTP binding domain
  misc_feature (26)..(248): Pfam Name: Elongation factor Tu GTP binding domain Pfam Description: Elongation factor Tu GTP binding domain
  misc_feature (22)..(470): Homolog of NCBI NO: 15081765 NR Description: At1g07930/T6D22_3 [Arabidopsis thaliana]
  misc_feature (22)..(470): Homolog of NCBI NO: 17064954 NR Description: putative elongation factor 1-a [Arabidopsis
  misc_feature (22)..(468): Homolog of NCBI NO: 25407012 NR Description: protein T6D22.2 [imported] - Arabidopsis thaliana
  misc_feature (22)..(470): Homolog of NCBI NO: 18086389 NR Description: At1g07930/T6D22_3 [Arabidopsis thaliana]
  misc_feature (22)..(470): Homolog of NCBI NO: 23397097 NR Description: putative translation elongation factor eEF-1
  misc_feature (22)..(470): Homolog of NCBI NO: 15081765 NR Description: At1g07930/T6D22_3 [Arabidopsis thaliana]
  misc_feature (22)..(468): Homolog of NCBI NO: 25407012 NR Description: protein T6D22.2 [imported] - Arabidopsis thaliana
  misc_feature (22)..(470): Homolog of NCBI NO: 23397097 NR Description: putative translation elongation factor eEF-1
  misc_feature (17)..(470): Homolog of NCBI NO: 25407012 NR Description: protein T6D22.2 [imported] - Arabidopsis thaliana
  misc_feature (22)..(470): Homolog of NCBI NO: 15239308 NR Description: elongation factor 1-alpha (EF-1-alpha)
  misc_feature (22)..(470): Homolog of NCBI NO: 99688 NR Description: translation elongation factor eEF-1 alpha chain
  misc_feature (22)..(470): Homolog of NCBI NO: 13605682 NR Description: At1g07930/T6D22_3 [Arabidopsis thaliana]
  misc_feature (22)..(470): Homolog of NCBI NO: 13430510 NR Description: putative translation elongation factor eEF-1
  misc_feature (22)..(470): Homolog of NCBI NO: 18086389 NR Description: At1g07930/T6D22_3 [Arabidopsis thaliana]
  misc_feature (22)..(470): Homolog of NCBI NO: 17064954 NR Description: putative elongation factor 1-a [Arabidopsis
  misc_feature (22)..(470): Homolog of NCBI NO: 13430510 NR Description: putative translation elongation factor eEF-1
  misc_feature (22)..(470): Homolog of NCBI NO: 13605682 NR Description: At1g07930/T6D22_3 [Arabidopsis thaliana]
  misc_feature (22)..(470): Homolog of NCBI NO: 99688 NR Description: translation elongation factor eEF-1 alpha chain
  misc_feature (22)..(470): Homolog of NCBI NO: 15239308 NR Description: elongation factor 1-alpha (EF-1-alpha)
  misc_feature (17)..(470): Homolog of NCBI NO: 25407012 NR Description: protein T6D22.2 [imported] - Arabidopsis thaliana

SEQ ID NO: 45317 - protein, 449 aa, Arabidopsis thaliana; identical to SEQ ID NO: 27284
  peptide (1)..(449): Ceres Seq. ID no. 15221203
  misc_feature (5)..(227): Pfam Name: Elongation factor Tu GTP binding domain Pfam Description: Elongation factor Tu GTP binding domain
  misc_feature (5)..(227): Pfam Name: Elongation factor Tu GTP binding domain Pfam Description: Elongation factor Tu GTP binding domain
  misc_feature (1)..(449): Homolog of NCBI NO: 15081765 NR Description: At1g07930/T6D22_3 [Arabidopsis thaliana]
  misc_feature (1)..(449): Homolog of NCBI NO: 17064954 NR Description: putative elongation factor 1-a [Arabidopsis
  misc_feature (1)..(447): Homolog of NCBI NO: 25407012 NR Description: protein T6D22.2 [imported] - Arabidopsis thaliana
  misc_feature (1)..(449): Homolog of NCBI NO: 18086389 NR Description: At1g07930/T6D22_3 [Arabidopsis thaliana]
  misc_feature (1)..(449): Homolog of NCBI NO: 23397097 NR Description: putative translation elongation factor eEF-1
  misc_feature (1)..(449): Homolog of NCBI NO: 15081765 NR Description: At1g07930/T6D22_3 [Arabidopsis thaliana]
  misc_feature (1)..(447): Homolog of NCBI NO: 25407012 NR Description: protein T6D22.2 [imported] - Arabidopsis thaliana
  misc_feature (1)..(449): Homolog of NCBI NO: 23397097 NR Description: putative translation elongation factor eEF-1
  misc_feature (1)..(449): Homolog of NCBI NO: 25407012 NR Description: protein T6D22.2 [imported] - Arabidopsis thaliana
  misc_feature (1)..(449): Homolog of NCBI NO: 15239308 NR Description: elongation factor 1-alpha (EF-1-alpha)
  misc_feature (1)..(449): Homolog of NCBI NO: 99688 NR Description: translation elongation factor eEF-1 alpha chain
  misc_feature (1)..(449): Homolog of NCBI NO: 13605682 NR Description: At1g07930/T6D22_3 [Arabidopsis thaliana]
  misc_feature (1)..(449): Homolog of NCBI NO: 13430510 NR Description: putative translation elongation factor eEF-1
  misc_feature (1)..(449): Homolog of NCBI NO: 18086389 NR Description: At1g07930/T6D22_3 [Arabidopsis thaliana]
  misc_feature (1)..(449): Homolog of NCBI NO: 17064954 NR Description: putative elongation factor 1-a [Arabidopsis
  misc_feature (1)..(449): Homolog of NCBI NO: 13430510 NR Description: putative translation elongation factor eEF-1
  misc_feature (1)..(449): Homolog of NCBI NO: 13605682 NR Description: At1g07930/T6D22_3 [Arabidopsis thaliana]
  misc_feature (1)..(449): Homolog of NCBI NO: 99688 NR Description: translation elongation factor eEF-1 alpha chain
  misc_feature (1)..(449): Homolog of NCBI NO: 15239308 NR Description: elongation factor 1-alpha (EF-1-alpha)
  misc_feature (1)..(449): Homolog of NCBI NO: 25407012 NR Description: protein T6D22.2 [imported] - Arabidopsis thaliana

SEQ ID NO: 45318 - protein, 401 aa, Arabidopsis thaliana; identical to SEQ ID NO: 21437
  peptide (1)..(401): Ceres Seq. ID no. 15221204
  misc_feature (1)..(179): Pfam Name: Elongation factor Tu GTP binding domain Pfam Description: Elongation factor Tu GTP binding domain
  misc_feature (1)..(179): Pfam Name: Elongation factor Tu GTP binding domain Pfam Description: Elongation factor Tu GTP binding domain
  misc_feature (1)..(401): Homolog of NCBI NO: 15081765 NR Description: At1g07930/T6D22_3 [Arabidopsis thaliana]
  misc_feature (1)..(401): Homolog of NCBI NO: 17064954 NR Description: putative elongation factor 1-a [Arabidopsis
  misc_feature (1)..(399): Homolog of NCBI NO: 25407012 NR Description: protein T6D22.2 [imported] - Arabidopsis thaliana
  misc_feature (1)..(401): Homolog of NCBI NO: 18086389 NR Description: At1g07930/T6D22_3 [Arabidopsis thaliana]
  misc_feature (1)..(401): Homolog of NCBI NO: 23397097 NR Description: putative translation elongation factor eEF-1
  misc_feature (1)..(401): Homolog of NCBI NO: 15081765 NR Description: At1g07930/T6D22_3 [Arabidopsis thaliana]
  misc_feature (1)..(399): Homolog of NCBI NO: 25407012 NR Description: protein T6D22.2 [imported] - Arabidopsis thaliana
  misc_feature (1)..(401): Homolog of NCBI NO: 23397097 NR Description: putative translation elongation factor eEF-1
  misc_feature (1)..(401): Homolog of NCBI NO: 25407012 NR Description: protein T6D22.2 [imported] - Arabidopsis thaliana
  misc_feature (1)..(401): Homolog of NCBI NO: 15239308 NR Description: elongation factor 1-alpha (EF-1-alpha)
  misc_feature (1)..(401): Homolog of NCBI NO: 99688 NR Description: translation elongation factor eEF-1 alpha chain
  misc_feature (1)..(401): Homolog of NCBI NO: 13605682 NR Description: At1g07930/T6D22_3 [Arabidopsis thaliana]
  misc_feature (1)..(401): Homolog of NCBI NO: 13430510 NR Description: putative translation elongation factor eEF-1
  misc_feature (1)..(401): Homolog of NCBI NO: 18086389 NR Description: At1g07930/T6D22_3 [Arabidopsis thaliana]
  misc_feature (1)..(401): Homolog of NCBI NO: 17064954 NR Description: putative elongation factor 1-a [Arabidopsis
  misc_feature (1)..(401): Homolog of NCBI NO: 13430510 NR Description: putative translation elongation factor eEF-1
  misc_feature (1)..(401): Homolog of NCBI NO: 13605682 NR Description: At1g07930/T6D22_3 [Arabidopsis thaliana]
  misc_feature (1)..(401): Homolog of NCBI NO: 99688 NR Description: translation elongation factor eEF-1 alpha chain
  misc_feature (1)..(401): Homolog of NCBI NO: 15239308 NR Description: elongation factor 1-alpha (EF-1-alpha)
  misc_feature (1)..(401): Homolog of NCBI NO: 25407012 NR Description: protein T6D22.2 [imported] - Arabidopsis thaliana

SEQ ID NO: 45319 - DNA, 1942 bp, Arabidopsis thaliana
  misc_feature (1)..(1942): Ceres Seq. ID no. 12560641
  misc_feature: MA Experiment ID: 20000182 Result: Up-regulated in Transcription
  misc_feature: MA Experiment 20000182 PARAMETER Experiment Name: At_2mM_SA_P Parameter: Age (day) Value: 14
  misc_feature: MA Experiment 20000182 PARAMETER Experiment Name: At_2mM_SA_P Parameter: Organism Value: A. thaliana
  misc_feature: MA Experiment 20000182 PARAMETER Experiment Name: At_2mM_SA_P Parameter: Plant Line Value: WS
  misc_feature: MA Experiment 20000182 PARAMETER Experiment Name: At_2mM_SA_P Parameter: Timepoint (hr) Value: 6
  misc_feature: MA Experiment 20000182 PARAMETER Experiment Name: At_2mM_SA_P Parameter: Tissue Value: Aerial
  misc_feature: MA Experiment 20000182 PARAMETER Experiment Name: At_2mM_SA_P Parameter: Treatment Value: 2mM SA vs. No Treatment
  misc_feature: MA Experiment ID: 20000185 Result: Down-regulated in Transcription
  misc_feature: MA Experiment 20000185 PARAMETER Experiment Name: At_Roots__P Parameter: Age (day) Value: 7 vs. 21
  misc_feature: MA Experiment 20000185 PARAMETER Experiment Name: At_Roots__P Parameter: Organism Value: A. thaliana
  misc_feature: MA Experiment 20000185 PARAMETER Experiment Name: At_Roots__P Parameter: Tissue Value: Roots vs. Whole Plant
  misc_feature: MA Experiment ID: 20000437 Result: Up-regulated in Transcription
  misc_feature: MA Experiment 20000437 PARAMETER Experiment Name: At_Drought_P Parameter: Age (day) Value: 8
  misc_feature: MA Experiment 20000437 PARAMETER Experiment Name: At_Drought_P Parameter: Organism Value: A. thaliana
  misc_feature: MA Experiment 20000437 PARAMETER Experiment Name: At_Drought_P Parameter: Plant Line Value: WS
  misc_feature: MA Experiment 20000437 PARAMETER Experiment Name: At_Drought_P Parameter: Timepoint (hr) Value: 24
  misc_feature: MA Experiment 20000437 PARAMETER Experiment Name: At_Drought_P Parameter: Tissue Value: Whole Plant
  misc_feature: MA Experiment 20000437 PARAMETER Experiment Name: At_Drought_P Parameter: Treatment Value: Drought vs. No Drought
  misc_feature: MA Experiment ID: 20000794 Result: Up-regulated in Transcription
  misc_feature: MA Experiment 20000794 PARAMETER Experiment Name: At_Petals_P Parameter: Age (day) Value: 23-25 days
  misc_feature: MA Experiment 20000794 PARAMETER Experiment Name: At_Petals_P Parameter: Plant Line Value: WS
  misc_feature: MA Experiment 20000794 PARAMETER Experiment Name: At_Petals_P Parameter: Tissue Value: Petals vs. Whole plant
  misc_feature: MA Experiment ID: 20001247 Result: Up-regulated in Transcription
  misc_feature: MA Experiment 20001247 PARAMETER Experiment Name: At_Far-red-induction_P Parameter: Age (day) Value: 7
  misc_feature: MA Experiment 20001247 PARAMETER Experiment Name: At_Far-red-induction_P Parameter: Light Value: Far-red vs. White
  misc_feature: MA Experiment 20001247 PARAMETER Experiment Name: At_Far-red-induction_P Parameter: Organism Value: A. thaliana
  misc_feature: MA Experiment 20001247 PARAMETER Experiment Name: At_Far-red-induction_P Parameter: Plant Line Value: Columbia
  misc_feature: MA Experiment 20001247 PARAMETER Experiment Name: At_Far-red-induction_P Parameter: Timepoint (hr) Value: 1
  misc_feature: MA Experiment 20001247 PARAMETER Experiment Name: At_Far-red-induction_P Parameter: Tissue Value: Whole Plant
  misc_feature: MA Experiment ID: 20001248 Result: Up-regulated in Transcription
  misc_feature: MA Experiment 20001248 PARAMETER Experiment Name: At_Far-red-induction_P Parameter: Age (day) Value: 7
  misc_feature: MA Experiment 20001248 PARAMETER Experiment Name: At_Far-red-induction_P Parameter: Light Value: Far-red vs. White
  misc_feature: MA Experiment 20001248 PARAMETER Experiment Name: At_Far-red-induction_P Parameter: Organism Value: A. thaliana
  misc_feature: MA Experiment 20001248 PARAMETER Experiment Name: At_Far-red-induction_P Parameter: Plant Line Value: Columbia
  misc_feature: MA Experiment 20001248 PARAMETER Experiment Name: At_Far-red-induction_P Parameter: Timepoint (hr) Value: 4
  misc_feature: MA Experiment 20001248 PARAMETER Experiment Name: At_Far-red-induction_P Parameter: Tissue Value: Whole Plant
  misc_feature: MA Experiment ID: 20001557 Result: Up-regulated in Transcription
  misc_feature: MA Experiment 20001557 PARAMETER Experiment Name: At_Drought_Soil_Dry_P Parameter: Age (day) Value: 27
  misc_feature: MA Experiment 20001557 PARAMETER Experiment Name: At_Drought_Soil_Dry_P Parameter: Organism Value: A. thaliana
  misc_feature: MA Experiment 20001557 PARAMETER Experiment Name: At_Drought_Soil_Dry_P Parameter: Plant Line Value: WS
  misc_feature: MA Experiment 20001557 PARAMETER Experiment Name: At_Drought_Soil_Dry_P Parameter: Post Timepoint (hr) Value: 3
  misc_feature: MA Experiment 20001557 PARAMETER Experiment Name: At_Drought_Soil_Dry_P Parameter: Post-Treatment Value: Re-Water vs. No Drought
  misc_feature: MA Experiment 20001557 PARAMETER Experiment Name: At_Drought_Soil_Dry_P Parameter: Timepoint (day) Value: 13
  misc_feature: MA Experiment 20001557 PARAMETER Experiment Name: At_Drought_Soil_Dry_P Parameter: Treatment Value: Drought vs. No Drought
acttttttcttcctactaaaatctctccggtttcattcatatctctctctctctctgggccttactcaatcaccaccaaataacagacaaaaaaacgccttcatcgccggcgaaagtgagtcggagaatggcgtatatgtgcaccgacagcggaaacttaatggctatagcacaacaactcatcaaacagaagcagcaacaacaatcacaacatcaacaacaagaagaacaagaacaagaacccaacccctggcccaatccatccttcgggtttactcttcccggttcgggtttctccgacccgtttcaagtaaccaacgacccaggttttcactttccacacctggagcatcatcaaaacgcagccgtcgcttccgaggagtttgactccgacgagtggatggagagtttgatcaacggtggagatgcgtcacaaaccaatccagacttcccaatctacggccatgatccattcgtctcattcccgagtcgactcagtgctccttcatatctcaaccgagtcaacaaagatgactcagcgagtcaacaactccctccgccaccagcttccaccgctatatggtctccatctccgccatcaccacaacatcctcctcctcccccgccgcagccggattttgatctaaaccagccgatttttaaagctatccacgattatgcacgtaaaccggaaactaaaccggacacactaattcggatcaaagaatccgtgtccgaatcaggcgacccgatacaacgagtcgggtattacttcgcagaagctctgtctcataaagaaacagagtctccgtcgtcatcgtcgtcgtcatccctagaagatttcattctctcatacaaaaccttaaacgacgcatgtccatattcaaagttcgctcatttaacagcgaatcaagcaattctcgaagctacgaatcaatcaaacaacattcacatagtcgatttcgggatttttcaaggtattcaatggtctgctctgttacaagctttagcgacccgttcttctggtaaacccacccggatccggatttcgggtatacccgctccgtctctaggagactcaccgggaccgtctctgatcgctacgggaaaccgtctccgtgatttcgcggcgattttggatctcaatttcgagttttatccggttctgactccgattcaattactaaacgggtcaagttttcgggttgacccggatgaggttttggttgtgaattttatgcttgagctttataagcttctagatgaaacagcgacgactgttggtacggcgctccggttagctagatcgttaaacccgaggattgtgacgcttggagaatacgaagtcagtttaaaccgggttgaatttgctaaccgggttaagaactctctccggttttattccgcggtttttgaatcgcttgaaccgaatttggatcgagattcgaaagaaaggctgagagtggagagagtgttgttcggtaggaggattatggatttggtccgatcagatgatgataataataaaccgggaacccggtttgggttaatggaggagaaagaacaatggagagtgttgatggagaaagctggatttgagccggttaaaccgagtaattacgcggttagccaagcgaagctgctactatggaactacaattatagtacattgtattcacttgttgaatcggagccaggtttcatctccttggcttggaacaatgtgcctctcctcaccgtttcctcttggcgttgactacttggtccgataagttaatctagtattttgagttagcttttagaattgaattgtttggggttagatttggatgtttaattagtctctagcctattctcttactcttttttatctagtgcttggagtgatgatggtttgtcgtttatgttcatttgtaatatatattgtatgtaacatttgact

SEQ ID NO: 45320 - protein, 542 aa, Arabidopsis thaliana
  peptide (1)..(542): Ceres Seq. ID no. 12560642
  misc_feature (153)..(444): Pfam Name: GRAS family transcription factor Pfam Description: GRAS family transcription factor
  misc_feature (197)..(542): Homolog of NCBI NO: 26450054 NR Description: putative SCARECROW gene regulator [Arabidopsis
  misc_feature (197)..(542): Homolog of NCBI NO: 15238903 NR Description: SCARECROW gene regulator-like
  misc_feature (193)..(542): Homolog of NCBI NO: 26451075 NR Description: putative RGA1 [Arabidopsis thaliana]
  misc_feature (193)..(542): Homolog of NCBI NO: 15228553 NR Description: RGA1-like protein; protein id: At3g03450.1
  misc_feature (211)..(542): Homolog of NCBI NO: 4160441 NR Description: lateral suppressor protein [Lycopersicon
  misc_feature (193)..(541): Homolog of NCBI NO: 25989334 NR Description: chitin-inducible gibberellin-responsive protein
  misc_feature (431)..(542): Homolog of NCBI NO: 11358829 NR Description: scarecrow-like protein 7
  misc_feature (93)..(542): Homolog of NCBI NO: 17064924 NR Description: SCARECROW gene regulator [Arabidopsis thaliana]
  misc_feature (93)..(542): Homolog of NCBI NO: 15240076 NR Description: SCARECROW gene regulator
  misc_feature (1)..(542): Homolog of NCBI NO: 15229819 NR Description: scarecrow-like 7 (SCL7); protein id: At3g50650.1
MAYMCTDSGNLMAIAQQLIKQKQQQQSQHQQQEEQEQEPNPWPNPSFGFTLPGSGFSDPFQVTNDPGFHFPHLEHHQNAAVASEEFDSDEWMESLINGGDASQTNPDFPIYGHDPFVSFPSRLSAPSYLNRVNKDDSASQQLPPPPASTAIWSPSPPSPQHPPPPPPQPDFDLNQPIFKAIHDYARKPETKPDTLIRIKESVSESGDPIQRVGYYFAEALSHKETESPSSSSSSSLEDFILSYKTLNDACPYSKFAHLTANQAILEATNQSNNIHIVDFGIFQGIQWSALLQALATRSSGKPTRIRISGIPAPSLGDSPGPSLIATGNRLRDFAAILDLNFEFYPVLTPIQLLNGSSFRVDPDEVLVVNFMLELYKLLDETATTVGTALRLARSLNPRIVTLGEYEVSLNRVEFANRVKNSLRFYSAVFESLEPNLDRDSKERLRVERVLFGRRIMDLVRSDDDNNKPGTRFGLMEEKEQWRVLMEKAGFEPVKPSNYAVSQAKLLLWNYNYSTLYSLVESEPGFISLAWNNVPLLTVSSWR

SEQ ID NO: 45321 - protein, 539 aa, Arabidopsis thaliana
  peptide (1)..(539): Ceres Seq. ID no. 12560643
  misc_feature (150)..(441): Pfam Name: GRAS family transcription factor Pfam Description: GRAS family transcription factor
  misc_feature (194)..(539): Homolog of NCBI NO: 26450054 NR Description: putative SCARECROW gene regulator [Arabidopsis
  misc_feature (194)..(539): Homolog of NCBI NO: 15238903 NR Description: SCARECROW gene regulator-like
  misc_feature (190)..(539): Homolog of NCBI NO: 26451075 NR Description: putative RGA1 [Arabidopsis thaliana]
  misc_feature (190)..(539): Homolog of NCBI NO: 15228553 NR Description: RGA1-like protein; protein id: At3g03450.1
  misc_feature (208)..(539): Homolog of NCBI NO: 4160441 NR Description: lateral suppressor protein [Lycopersicon
  misc_feature (190)..(538): Homolog of NCBI NO: 25989334 NR Description: chitin-inducible gibberellin-responsive protein
  misc_feature (428)..(539): Homolog of NCBI NO: 11358829 NR Description: scarecrow-like protein 7
  misc_feature (90)..(539): Homolog of NCBI NO: 17064924 NR Description: SCARECROW gene regulator [Arabidopsis thaliana]
  misc_feature (90)..(539): Homolog of NCBI NO: 15240076 NR Description: SCARECROW gene regulator
  misc_feature (1)..(539): Homolog of NCBI NO: 15229819 NR Description: scarecrow-like 7 (SCL7); protein id: At3g50650.1
MCTDSGNLMAIAQQLIKQKQQQQSQHQQQEEQEQEPNPWPNPSFGFTLPGSGFSDPFQVTNDPGFHFPHLEHHQNAAVASEEFDSDEWMESLINGGDASQTNPDFPIYGHDPFVSFPSRLSAPSYLNRVNKDDSASQQLPPPPASTAIWSPSPPSPQHPPPPPPQPDFDLNQPIFKAIHDYARKPETKPDTLIRIKESVSESGDPIQRVGYYFAEALSHKETESPSSSSSSSLEDFILSYKTLNDACPYSKFAHLTANQAILEATNQSNNIHIVDFGIFQGIQWSALLQALATRSSGKPTRIRISGIPAPSLGDSPGPSLIATGNRLRDFAAILDLNFEFYPVLTPIQLLNGSSFRVDPDEVLVVNFMLELYKLLDETATTVGTALRLARSLNPRIVTLGEYEVSLNRVEFANRVKNSLRFYSAVFESLEPNLDRDSKERLRVERVLFGRRIMDLVRSDDDNNKPGTRFGLMEEKEQWRVLMEKAGFEPVKPSNYAVSQAKLLLWNYNYSTLYSLVESEPGFISLAWNNVPLLTVSSWR

SEQ ID NO: 45322 - protein, 531 aa, Arabidopsis thaliana
  peptide (1)..(531): Ceres Seq. ID no. 12560644
  misc_feature (142)..(433): Pfam Name: GRAS family transcription factor Pfam Description: GRAS family transcription factor
  misc_feature (186)..(531): Homolog of NCBI NO: 26450054 NR Description: putative SCARECROW gene regulator [Arabidopsis
  misc_feature (186)..(531): Homolog of NCBI NO: 15238903 NR Description: SCARECROW gene regulator-like
  misc_feature (182)..(531): Homolog of NCBI NO: 26451075 NR Description: putative RGA1 [Arabidopsis thaliana]
  misc_feature (182)..(531): Homolog of NCBI NO: 15228553 NR Description: RGA1-like protein; protein id: At3g03450.1
  misc_feature (200)..(531): Homolog of NCBI NO: 4160441 NR Description: lateral suppressor protein [Lycopersicon
  misc_feature (182)..(530): Homolog of NCBI NO: 25989334 NR Description: chitin-inducible gibberellin-responsive protein
  misc_feature (420)..(531): Homolog of NCBI NO: 11358829 NR Description: scarecrow-like protein 7
  misc_feature (82)..(531): Homolog of NCBI NO: 17064924 NR Description: SCARECROW gene regulator [Arabidopsis thaliana]
  misc_feature (82)..(531): Homolog of NCBI NO: 15240076 NR Description: SCARECROW gene regulator
  misc_feature (1)..(531): Homolog of NCBI NO: 15229819 NR Description: scarecrow-like 7 (SCL7); protein id: At3g50650.1
MAIAQQLIKQKQQQQSQHQQQEEQEQEPNPWPNPSFGFTLPGSGFSDPFQVTNDPGFHFPHLEHHQNAAVASEEFDSDEWMESLINGGDASQTNPDFPIYGHDPFVSFPSRLSAPSYLNRVNKDDSASQQLPPPPASTAIWSPSPPSPQHPPPPPPQPDFDLNQPIFKAIHDYARKPETKPDTLIRIKESVSESGDPIQRVGYYFAEALSHKETESPSSSSSSSLEDFILSYKTLNDACPYSKFAHLTANQAILEATNQSNNIHIVDFGIFQGIQWSALLQALATRSSGKPTRIRISGIPAPSLGDSPGPSLIATGNRLRDFAAILDLNFEFYPVLTPIQLLNGSSFRVDPDEVLVVNFMLELYKLLDETATTVGTALRLARSLNPRIVTLGEYEVSLNRVEFANRVKNSLRFYSAVFESLEPNLDRDSKERLRVERVLFGRRIMDLVRSDDDNNKPGTRFGLMEEKEQWRVLMEKAGFEPVKPSNYAVSQAKLLLWNYNYSTLYSLVESEPGFISLAWNNVPLLTVSSWR

SEQ ID NO: 45323 - DNA, 1873 bp, Arabidopsis thaliana
  misc_feature (1)..(1873): Ceres Seq. ID no. 13576017
  misc_feature: MA Experiment ID: 20000265 Result: Up-regulated in Transcription
  misc_feature: MA Experiment 20000265 PARAMETER Experiment Name: At_Open_Flower_P Parameter: Age (day) Value: 21
  misc_feature: MA Experiment 20000265 PARAMETER Experiment Name: At_Open_Flower_P Parameter: Plant Line Value: WS
  misc_feature: MA Experiment 20000265 PARAMETER Experiment Name: At_Open_Flower_P Parameter: Tissue Value: Closed Flower vs. Whole Plant
  misc_feature: MA Experiment ID: 20000437 Result: Down-regulated in Transcription
  misc_feature: MA Experiment 20000437 PARAMETER Experiment Name: At_Drought_P Parameter: Age (day) Value: 8
  misc_feature: MA Experiment 20000437 PARAMETER Experiment Name: At_Drought_P Parameter: Organism Value: A. thaliana
  misc_feature: MA Experiment 20000437 PARAMETER Experiment Name: At_Drought_P Parameter: Plant Line Value: WS
  misc_feature: MA Experiment 20000437 PARAMETER Experiment Name: At_Drought_P Parameter: Timepoint (hr) Value: 24
  misc_feature: MA Experiment 20000437 PARAMETER Experiment Name: At_Drought_P Parameter: Tissue Value: Whole Plant
  misc_feature: MA Experiment 20000437 PARAMETER Experiment Name: At_Drought_P Parameter: Treatment Value: Drought vs. No Drought
  misc_feature: MA Experiment ID: 20001911 Result: Down-regulated in Transcription
  misc_feature: MA Experiment 20001911 PARAMETER Experiment Name: At_Drought_Reproduction_P Parameter: Age (day) Value: 40
  misc_feature: MA Experiment 20001911 PARAMETER Experiment Name: At_Drought_Reproduction_P Parameter: Organism Value: A. thaliana
  misc_feature: MA Experiment 20001911 PARAMETER Experiment Name: At_Drought_Reproduction_P Parameter: Plant Line Value: WS
  misc_feature: MA Experiment 20001911 PARAMETER Experiment Name: At_Drought_Reproduction_P Parameter: Timepoint (day) Value: 10
  misc_feature: MA Experiment 20001911 PARAMETER Experiment Name: At_Drought_Reproduction_P Parameter: Tissue Value: Flowers
  misc_feature: MA Experiment 20001911 PARAMETER Experiment Name: At_Drought_Reproduction_P Parameter: Treatment Value: Drought vs. No Drought
ggtgtctccttcactttcaaagacagtctctttccccaaagagcggattcaggattcaccatctcgatctgtgtccaaagctcctatctttcttctttcttccctgaagaattttctggagcttctcagatcagaggaagatgatgcaatcctaagactctaagacttcttcaaggctgtgttttatcgtgggatttttaaacatggggaaggaaaatgctgtgtctcggccattcactcgttcccttgcctctgctttgcgcgcttcagaagtgacttctactacacagaatcaacagagagtaaacacaaaaagaccagccttggaggatacaagagccactggacccaacaagaggaagaagcgagcggttctaggggagatcacaaatgttaactccaatacagctatacttgaggccaaaaacagcaagcagataaagaaaggacgcggtcatggattggcgagtacatcccagttggcaacttctgttacttcagaagtcacagatcttcagtccaggaccgatgcaaaagttgaagttgcatcaaatacagcaggaaacctttctgtttctaaaggcacagataacacagctgataactgtattgagatatggaattctagattgcctccaagacctcttgggagatcagcttctacagctgagaaaagtgctgttattggtagttcaactgtaccggatatcccaaaatttgtagacatcgattcagatgacaaggatcctttactgtgctgcctctatgcccctgaaatccactacaatttgcgtgtttcagagcttaaacgcagaccacttccggactttatggagagaatacagaaggatgtcacccagtccatgcggggaattctggttgattggcttgtggaggtctctgaagaatacacacttgcatctgacactctctacctcacagtgtatctcatagactggttcctccatggaaactacgtgcaaagacagcaacttcaactgctcggcatcacttgcatgctaattgcctcgaagtatgaggaaatctctgctccacgcattgaggagttttgcttcattacggataacacctacacaagagatcaggtcctggaaatggagaaccaagtacttaagcattttagctttcaaatatacactcccactccaaaaacgttccttaggagatttctcagagcagctcaagcctctcgcctgagcccaagccttgaagtcgagtttctagccagctatctaacagagttgacattaatagactaccatttcttaaagtttcttccttccgttgttgctgcttcagcggtttttctcgccaagtggacaatggaccaatcaaaccacccatggaatccaacacttgagcattacacaacgtacaaagcatcggatctgaaagcatctgttcatgccttacaagatctgcagcttaacaccaaaggttgccccttgagcgctatacgcatgaagtataggcaagagaaatacaaatctgtggcggttctcacgtctccaaagctacttgacacgctattctgaaggtttcaactcctaaccgataatagttttgtcacattgatggtccaatttcgttttcattcatctgttactctttgttcataaaacagaatttccacagtcccactcatctaatacctgattagaattcggtttagcctagtttgatccgtggtttggttcttccaaacccgggaacatctaatcggtacctagagttttttttattgtaacgagaatgtacatttttctcccatcttgaggcaatgtaaacagattcggaattttcatatcagttttctgatatgaagtaggtttaagtatttatatttcaaatt

SEQ ID NO: 45324 - protein, 450 aa, Arabidopsis thaliana
  peptide (1)..(450): Ceres Seq. ID no. 13576018
  misc_feature (191)..(318): Pfam Name: Cyclin, N-terminal domain Pfam Description: Cyclin, N-terminal domain
  misc_feature (10)..(450): Homolog of NCBI NO: 7438498 NR Description: cyclin cyc3 - alfalfa
  misc_feature (10)..(450): Homolog of NCBI NO: 1245816 NR Description: cyclin A homolog [Medicago falcata=alfalfa,
  misc_feature (224)..(450): Homolog of NCBI NO: 2129566 NR Description: mitosis-specific cyclin 3c - Arabidopsis thaliana
  misc_feature (1)..(450): Homolog of NCBI NO: 15220120 NR Description: cyclin, putative [Arabidopsis thaliana]
  misc_feature (1)..(450): Homolog of NCBI NO: 1076444 NR Description: mitosis-specific cyclin CYC1 - rape
  misc_feature (1)..(439): Homolog of NCBI NO: 25294181 NR Description: probable cyclin [imported] - Arabidopsis thaliana
  misc_feature (1)..(450): Homolog of NCBI NO: 15218225 NR Description: cyclin, putative [Arabidopsis thaliana]
MGKENAVSRPFTRSLASALRASEVTSTTQNQQRVNTKRPALEDTRATGPNKRKKRAVLGEITNVNSNTAILEAKNSKQIKKGRGHGLASTSQLATSVTSEVTDLQSRTDAKVEVASNTAGNLSVSKGTDNTADNCIEIWNSRLPPRPLGRSASTAEKSAVIGSSTVPDIPKFVDIDSDDKDPLLCCLYAPEIHYNLRVSELKRRPLPDFMERIQKDVTQSMRGILVDWLVEVSEEYTLASDTLYLTVYLIDWFLHGNYVQRQQLQLLGITCMLIASKYEEISAPRIEEFCFITDNTYTRDQVLEMENQVLKHFSFQIYTPTPKTFLRRFLRAAQASRLSPSLEVEFLASYLTELTLIDYHFLKFLPSVVAASAVFLAKWTMDQSNHPWNPTLEHYTTYKASDLKASVHALQDLQLNTKGCPLSAIRMKYRQEKYKSVAVLTSPKLLDTLF

SEQ ID NO: 45325 - protein, 241 aa, Arabidopsis thaliana
  peptide (1)..(241): Ceres Seq. ID no. 13576019
  misc_feature (1)..(109): Pfam Name: Cyclin, N-terminal domain Pfam Description: Cyclin, N-terminal domain
  misc_feature (1)..(241): Homolog of NCBI NO: 7438498 NR Description: cyclin cyc3 - alfalfa
  misc_feature (1)..(241): Homolog of NCBI NO: 1245816 NR Description: cyclin A homolog [Medicago falcata=alfalfa,
  misc_feature (15)..(241): Homolog of NCBI NO: 2129566 NR Description: mitosis-specific cyclin 3c - Arabidopsis thaliana
  misc_feature (1)..(241): Homolog of NCBI NO: 15220120 NR Description: cyclin, putative [Arabidopsis thaliana]
  misc_feature (1)..(241): Homolog of NCBI NO: 1076444 NR Description: mitosis-specific cyclin CYC1 - rape
  misc_feature (1)..(230): Homolog of NCBI NO: 25294181 NR Description: probable cyclin [imported] - Arabidopsis thaliana
  misc_feature (1)..(241): Homolog of NCBI NO: 15218225 NR Description: cyclin, putative [Arabidopsis thaliana]
MERIQKDVTQSMRGILVDWLVEVSEEYTLASDTLYLTVYLIDWFLHGNYVQRQQLQLLGITCMLIASKYEEISAPRIEEFCFITDNTYTRDQVLEMENQVLKHFSFQIYTPTPKTFLRRFLRAAQASRLSPSLEVEFLASYLTELTLIDYHFLKFLPSVVAASAVFLAKWTMDQSNHPWNPTLEHYTTYKASDLKASVHALQDLQLNTKGCPLSAIRMKYRQEKYKSVAVLTSPKLLDTLF

SEQ ID NO: 45326 - protein, 230 aa, Arabidopsis thaliana
  peptide (1)..(230): Ceres Seq. ID no. 13576020
  misc_feature (1)..(98): Pfam Name: Cyclin, N-terminal domain Pfam Description: Cyclin, N-terminal domain
  misc_feature (1)..(230): Homolog of NCBI NO: 7438498 NR Description: cyclin cyc3 - alfalfa
  misc_feature (1)..(230): Homolog of NCBI NO: 1245816 NR Description: cyclin A homolog [Medicago falcata=alfalfa,
  misc_feature (4)..(230): Homolog of NCBI NO: 2129566 NR Description: mitosis-specific cyclin 3c - Arabidopsis thaliana
  misc_feature (1)..(230): Homolog of NCBI NO: 15220120 NR Description: cyclin, putative [Arabidopsis thaliana]
  misc_feature (1)..(230): Homolog of NCBI NO: 1076444 NR Description: mitosis-specific cyclin CYC1 - rape
  misc_feature (1)..(219): Homolog of NCBI NO: 25294181 NR Description: probable cyclin [imported] - Arabidopsis thaliana
  misc_feature (1)..(230): Homolog of NCBI NO: 15218225 NR Description: cyclin, putative [Arabidopsis thaliana]
MRGILVDWLVEVSEEYTLASDTLYLTVYLIDWFLHGNYVQRQQLQLLGITCMLIASKYEEISAPRIEEFCFITDNTYTRDQVLEMENQVLKHFSFQIYTPTPKTFLRRFLRAAQASRLSPSLEVEFLASYLTELTLIDYHFLKFLPSVVAASAVFLAKWTMDQSNHPWNPTLEHYTTYKASDLKASVHALQDLQLNTKGCPLSAIRMKYRQEKYKSVAVLTSPKLLDTLF
